United States Patent Application Publication US 2018/0126003 A1 - sequence listing, part 118

SEQ ID NO: 206572 - DNA, 5402 bp, Artificial Sequence
  derived and/or modified sequence
atggcaacggatagcggcgaccctgcttcaaccgaagactctgagaagcctgacgggataagtttcgagaatcgcgttccccaggttgccgctaccttgaccgttgaagctaggctcaaagagaagaattcgacatttagtgcaagcggcgagacggtggaacggaagcggttcttccgcaaatccgtggagatgacagaagacgacaaagtcgctgaatcttcacctaaggacgagcggattaaggccgcaatgaatatcccacgggtggataaactgcccagcaacgtgcttagaggaggacaagaagtgaagtacgaacaatgctcaaaaagcacctccgaaatcagcaaagattgcttcaaggagaaaaacgaaaaagaaatggaagaggaagccgaaatgaaagccgtcgcaacttccccgtccggcagatttctgaagttcgatattgaactcggcaggggtgcttttaaaacggtgtacaagggactcgacacagaaacctgggtggaagtcgcctggtgtgagcttcaagatcgtaaacttacaaaggctgaacagcagcggttcaaagaggaagctgaaatgttaaagggactccagcatccaaacatcgttagattctacgattcctgggaaagtatattaaaaggaaagaaatgcatcgtgctcgtgacggagctcatgacctccgggaccctcaaaacctatctcaaacgttttaaggttatgaagccaaaagtactgagatcatggtgtcgccaaatactgaagggacttcagtttttgcatacaagaacgcctccaattatccacagggatctgaagtgcgacaatatttttatcaccggcccaaccggcagcgttaaaatcggagatctaggcctggctaccctcatgaggacatcctttgccaagtccgtgatcggaacgcccgaattcatggctccagagatgtatgaagagcactatgatgaatccgtagacgtttatgcgttcggcatgtgcatgcttgagatggcaacttctgaatacccttattctgagtgccagaacgccgctcagatttatcgaaaagtgacttccgggattaagccagcatcatttaataaagtgacagatcccgaagttaaggaaatcattgaggggtgtataaggcaaaacaaaagtgaacgcctgtcgatccgagatctactcaatcacgcctttttcgctgaagataccggcttgagggtcgagttggctgaagaagatgattgttctaactcgtcactcgccttacgactttgggtagaggaccctaagaagctaaaagggaagcataaggacaacgaggcaatcgagttttctttcaaccttgagaccgacacgcccgaggaggtggcgtatgaaatggtcaaaagtggattctttcatgaatcggactccaaggcagtagctaaaagcatacgagacagggtgacgcctataaaaaaaacgcgtgaaaaaaagcccgcaggttgtctagaagagagaagagactctcagtgtaaatctatgggtaatgtctttccccaaccacagaacactaccctgcctctcgcaccagctcagcagacaggggctgaatgcgaggaaacagaagttgatcagcatgtccggcagcagctgctgcagagaaagcctcagcagcactgctcaagcgttaccggcgacaatctttcggaggcaggagctgcatcagtaatccattcagatacaagcagtcagccatccgtggcatattccagcaaccagactatgggctcacagatggtgtccaatattccgcaggcggaagtaaatgtccccggacagatttacagctcacagcagttagtgggccactatcaacaggtgagcggactccagaaacattccaagctgacacagcctcagatcctgcccctggtgcaggggcagagtaccgtcctccccgttcacgtgctgggtccaacagttgtgagccagccacaggtgtctcccctgaccgtgcagaaggtgccacagatcaaaccggtttcccaaccggtcggcgcagagcagcaagccgctttgctgaaacctgacttagtgcgatcactcaatcaggatgttgccactacaaaggaaaatgtgagtagtcctgacaacccctcaggcaatggcaaacaggatcggatcaagcagcggagggctagctgtcccaggcctgagaaaggaacaaagtttcagctgaccgtccttcaggtttccacttccggtgacaatatggtggagtgtcagctggaaacacataataacaaaatggtgaccttcaagtttgacgtggatggcgacgccccagaagatatcgcagactacatggttgaggataattttgttttggagtcagagaaggagaagttcgtggaagaactccgggctatcgttgggcaggctcaggaaattctgcacgttcacttcgctacagagcgtgccactggggtggactctattaccgttgacagcaattcatcacaaaccggcagctccgaacaggtgcagatcaacagtactagtacacagaccagtaatgagtctgctccacaatccagtcccgtgggcaggtggcggttctgcatcaaccagactattaggaaccgcgaaactcagagtcctccaagcctgcagcattccatgagcgctgtgcccggaaggcatcccctgccttctccaaagaataccagcaacaaggaaatttcccgcgataccctgttgaccatcgagaacaacccctgtcacagagccctctttacaagtaaatccgagcacaaagatgtggtagacgggaaaatctcagaatgcgcgagcgtcgaaacaaaacaacctgccattctctaccaagtggaggataatcgtcaaattatggcccctgttacaaattctagtagttattccactaccagcgtgcgggcagtaccagccgaatgcgagggactcacaaagcaggctagcatctttattcccgtttacccgtgtcaccaaacggcctcccaggctgacgcactcatgagccaccctggggagagcactcagacgagtggaaatagcctcacaacactcgcctttgaccagaaaccgcagaccctgagcgtgcagcagccagcgatggacgcagaatttatttcccaggaaggggagaccaccgtcaacactgaggcctcttcaccaaaaacagttatcccaactcagacacccggtcttgaacccacaacgctacagcctactacagttcttgagagcgatggagagagacccccaaaactcgagtttgctgacaatcgaatcaaaactttggacgagaaacttcgaaatctcctataccaggagcactccatttcctcaatataccccgagagtcagaaggacacccagtcgattgactcgcccttctcctccagcgctgaagatacgctgtcgtgccccgtcactgaagttattgctatttcccactgtggcattaaggattcccccgtccagagccccaatttccaacaaaccggcagcaaacttttatcaaatgtggcggcaagccaacccgctaacatttctgtgttcaagcgcgacctcaacgtgatcacaagtgtccccagtgaactgtgccttcacgagatgtcaagtgatgcaagccttccgggtgatcccgaggcctaccccgcagcagtctccagtgggggagcaatccacctccagactggcggtggttatttcggtctttccttcacatgcccctccttgaaaaacccgatcagtaaaaaaagctggactcggaagctgaaaagctgggcctacaggcttcgccagagcactagcttctttaaacgctctaaggtgcgccaggtggagacagaggaaatgaggagtgctatcgctcctgaccccattccacttactagggagagcaccgccgacacacgtgcactgaatagatgtaaggccatgtctgggagctttcagagggggagattccaggtgattaccatcccacaacagcagtctgctaagatgaccagcttcggcatagagcacatctcagtgttttctgagacaaatcattcatctgaggaggcatttatcaagaccgctaagtcacagctggttgaaattgaaccggctacccagaacccaaagaccagcttcagctacgagaagctacaggcacttcaagagacgtgcaaggagaacaagggagtgcccaagcaaggggacaatttcttgagttttagtgctgcctgtgagactgatgtttcctccgtgaccccagaaaaggagtttgaggagacgtccgccaccgggtcatctatgcagagcggctccgagctcctacttaaagagcgggaaatcttaacagcaggaaaacagccttcatccgactctgagtttagcgctagcctagcagggtcggggaagagtgtcgcaaaaactggtcccgaaagcaaccagtgcctaccccatcacgaagagcaggcatatgcccagacccagagttcactcttctactccccatccagcccaatgagttcagacgacgaatcagaaatagaggacgaggacctcaaagtcgagctgcagcgcctgcgcgaaaagcatattcaggaagtggtgaacctccaaacccaacaaaacaaggagctgcaggagctgtacgaacggttaaggtctattaaggacagcaagacgcagagcactgaaattcctctgcctcctgcctctcctcgacgaccaaggagcttcaagagcaagctgaggtcaagaccccagtctcttacccacgtggacaatggtatcgtcgccactggaaaatcttgcctgatcaatgaactggagaatccgctgtgcgtggaaagtaatgctgcgtcatgtcagcagtcccccgcaagtaagaaaggaatgtttaccgacgacttacataagctggtggatgactggactaaggaagcagtgggtaattcgctcatcaagccatccttaaaccaactgaaacagtcccagcacaagctcgaaacagaaaattggaacaaggtctctgaaaataccccgagtaccatgggctacaccagtacctggatcagctccctctcccagatccgtggagcggtccctacaagcttgccccagggtctgagcctgccctcttttccaggacccctctcgtcgtacgggatgccacatgtgtgtcagtacaatgcagtggccggagctgggtacccagtccagtgggttggaatctcaggcacaacgcaacaatccgtagtaattccggctcagagcggcggtcctttccagcctgggatgaatatgcaggctttccccactagttctgtgcagaacccggctacaattccccctggtccgaaata

SEQ ID NO: 206573 - DNA, 5402 bp, Artificial Sequence
  derived and/or modified sequence
atggccaccgactccggcgaccccgcaagcacagaggactccgaaaaacccgacgggatcagcttcgaaaatcgagttccacaggtggccgcaacactcaccgtcgaggctcggctcaaagagaaaaattctacattttccgctagtggggagactgttgaacgcaagcggttcttccgaaaatccgtggagatgacagaggacgacaaagtcgctgaatcctctcccaaagatgagcggattaaggccgctatgaacataccaagagtggataagctaccgtcgaatgtattaagggggggtcaggaagtgaagtatgagcagtgctcaaagtccacaagtgagattagcaaagattgttttaaggaaaaaaacgagaaagaaatggaagaggaggcggagatgaaagctgtggccacgtcgcctagcggacggttcctaaaattcgacattgagttgggtcgcggagctttcaaaactgtgtacaaaggacttgacacagagacttgggtggaggtggcctggtgtgaattacaggatcgaaaattaactaaagcggaacaacagaggttcaaggaagaggccgaaatgctgaaaggcctccaacacccaaacatagttaggttctatgactcttgggagagtatattgaaagggaagaagtgcatcgtgctggtgactgagctcatgacctccggtaccttaaagacatacttgaaacgcttcaaggtgatgaagccaaaagttctgagatcttggtgtaggcagatcctgaaaggactgcagttcctgcacacaaggactccccctattatccatagggacctcaagtgtgataacatttttattaccggccctacagggtccgtgaagattggggacctgggtctggcaacacttatgcgcacatcctttgccaagagcgtgatcggaacccccgagttcatggcacccgaaatgtacgaggagcattatgatgaatctgtggatgtctacgctttcgggatgtgcatgctagagatggctacctccgagtatccctattctgagtgtcagaacgctgcacagatctacaggaaagttaccagtggaatcaaacctgcgtcctttaataaggtgactgatccagaagtgaaggagatcattgagggctgtattcgacaaaacaaaagcgaacgcctaagcattcgggacttgctcaaccatgccttttttgccgaagataccggattaagggttgaattagcggaggaggacgactgtagcaactcctcgttggccttgagactatgggtggaggaccccaagaagctcaagggtaaacataaggataatgaggccatcgagtttagttttaacctcgagacagacactcctgaagaggtggcatatgagatggtcaagagcggctttttccatgagagcgactcaaaggcggttgccaaatcaattagggacagggtaacacccatcaagaaaacccgcgagaagaaacccgctggatgcttagaggagagaagagattcccaatgcaaatccatggggaacgtgttccctcaaccacaaaatactactctgccactcgcaccagcccagcagaccggcgctgagtgtgaagagacagaagtcgaccagcatgtgcgacagcagctccttcaacgtaagccccagcagcattgttccagcgtcaccggagacaatcttagcgaggctggtgccgcaagcgtaatacatagcgacacaagttcgcagccttccgttgcttactcgtccaaccaaacaatgggatcacagatggtgtccaatatccctcaggcagaggtgaatgtgcccggacagatatactccagccagcaactggtaggacattatcagcaggtcagtggcctccagaaacacagcaagttaacccaaccacagattcttccactggtgcaagggcaatctaccgtgctacctgtgcatgtgttggggccaactgtggtgtcacagccccaggtgagcccactcactgttcagaaggtgccgcagatcaaacccgtgagccagcctgtgggcgcagagcagcaggctgctctgctcaagcccgatctggtgaggtcgttgaatcaggatgtggccaccaccaaggaaaatgtctcctcacccgacaacccttctgggaatggaaaacaagatagaattaagcagcggagagcaagctgcccacggcctgagaaggggactaagttccagctgacagtactccaagtgagtacaagtggggacaacatggtggaatgtcagcttgaaacacacaacaacaaaatggtcaccttcaagttcgacgtggatggcgatgcacccgaagatattgctgactacatggtagaggacaacttcgtgctagagagtgagaaggagaagttcgtcgaagaactgcgcgctattgtcgggcaagctcaggagatcctacatgtgcactttgcaactgagcgagcgactggagtggactccatcaccgtggattccaacagtagccagactggctcttcagaacaggtacagatcaattctaccagcacgcagacttctaacgaaagtgccccacagtcttcaccggtgggcagatggcggttttgtattaatcagaccattcggaatagagaaacacagagcccaccttctctgcaacattcaatgtccgcggtaccagggcgacaccccctcccttccccgaagaacacctcgaacaaagagataagccgtgacaccctcttgaccatcgaaaataacccctgccacagagccctgtttacgtcaaagagtgagcacaaggacgtggttgacggcaagataagtgaatgtgccagcgtggagacaaaacagcctgctatcctctatcaagtcgaagataatcgacagattatggccccagttacgaactcaagcagctacagcaccacgtcagtcagggccgttcctgccgagtgtgagggactgaccaagcaggctagcatattcatccctgtgtacccctgtcatcaaacagctagccaggcggacgccctaatgtcccacccgggtgagtcgactcagacgtcaggcaattcactgaccacgctcgctttcgaccagaaaccccagaccctctccgtgcagcagccagccatggacgccgaatttatctcgcaggaaggcgagacgaccgtgaacaccgaggcttctagccccaagacggtgatcccaacacagactccaggcttggaaccgacaacactacagcccaccactgtgttagaatcagacggtgaaagacctcccaagctggagttcgcggacaatcgcatcaagactttggatgaaaagttgcgcaatctgctctaccaggagcacagcatctcctcaatttatccggagagtcagaaagacacccagtccatcgacagcccttttagctcgagcgctgaagacactctttcatgccctgtcactgaggtgatcgcgatcagtcattgtggtatcaaagacagcccggtacagtcaccaaatttccagcagacaggcagcaagttgctcagcaatgtcgccgctagccagcccgcaaatatttctgtgtttaagagggacctgaacgtaatcacatctgtgccctccgagttgtgcttgcatgaaatgtccagcgacgcaagtttgccaggagacccagaagcctatccagcagccgtgtcctcaggtggcgcaatccacttacaaactggtgggggatattttgggctctcgtttacctgcccctccctcaagaaccccatctcaaagaagagctggacacggaagcttaagagttgggcataccgtctccggcagagtacaagcttttttaagcgttctaaagtgaggcaggtggagaccgaagagatgcggtcagccatcgcccctgaccctataccgttaaccagagagtccacagccgacactcgggcactcaaccgctgtaaggcgatgtcaggatcatttcagcggggacggtttcaggtgatcacgatccctcaacagcaatcagcaaagatgacttcatttggtatcgaacacatctctgttttctcagaaaccaatcactcttccgaggaagcttttattaaaacagcaaaatctcagctagtggaaattgaaccggctacccaaaatccaaaaacatccttcagttatgaaaaacttcaagctttgcaggagacgtgcaaagagaacaaaggggtgccgaagcagggcgataactttctgtctttcagcgccgcatgcgagacagacgtcagctctgttaccccggagaaagagttcgaagagacctccgcgacggggagcagcatgcaatcgggctctgagctgcttttaaaagagagggagatcctgactgctggcaagcagcccagctctgattccgaattctcagccagtctggctggatccggtaagtcagtggctaagacaggacctgaatccaatcagtgtttgccccaccatgaggagcaggcctacgctcaaacacagagcagccttttttacagcccttcctcccctatgtcatctgacgacgagagcgagattgaagacgaggacttaaaagtggaactccagaggctgcgagagaagcatatacaagaggttgttaatctgcagacccagcagaacaaagagctccaggaactgtacgagaggctgagaagcataaaggattctaaaacccagtctactgagatacccttaccaccagcaagccctcgcaggcccagatccttcaagagcaaattgaggagcaggcctcagtctctgactcatgtggataacggaattgtcgcaaccggcaaatcttgcctcattaacgaactggaaaaccctctgtgcgtcgagtcaaatgctgcaagttgccagcaaagcccagcctcaaaaaagggtatgtttactgacgaccttcataaactggttgatgactggacaaaagaggccgtgggaaattctctgatcaagccctctttaaaccaactgaagcagtcacaacataagttagaaacagagaactggaacaaggtgtccgaaaacacaccatctactatggggtatacctctacctggatttcatcattatctcaaatccggggtgccgttccaactagccttccccaggggctgagcttgccctcttttcctgggccactgtccagctatggtatgcctcatgtgtgtcagtacaacgcagtagcaggtgcaggctaccccgtccagtgggtaggcatttcggggacaactcaacagtccgtcgtgatcccagcccagtccggaggcccttttcagcctggaatgaacatgcaggcctttccaactagcagcgtccagaatccggctacgattcccccaggccctaagta

SEQ ID NO: 206574 - DNA, 498 bp, Artificial Sequence
  derived and/or modified sequence
atggctacagacagtggcgacccggcatctacagaggacagcgaaaagcccgatgggatatccttcgaaaaccgagtgccacaggtggccgcaaccttgactgtggaagccagactcaaagagaaaaacagcacgttctctgcaagtggagaaaccgtggagagaaaacgattcttccggaagtccgtggagatgacagaagacgataaggttgcggaaagtagtccgaaagacgaacgcattaaggctgccatgaatatccctagggtcgacaagcttccaagcaacgtgctacgcggtggacaagaagtgaagtatgaacagtgctccaaatctacatctgaaatcagcaaggattgctttaaggagaagaatgagaaagagatggaagaggaggccgagatgaaagccgtggccacgtcaccctctggcaggttcctaaagttcgatatcgaattgggcagaggagccttcaagaccgtgtacaagggcctatag

SEQ ID NO: 206575 - DNA, 5403 bp, Artificial Sequence
  derived and/or modified sequence
atggccactgattcaggggatccagccagcacagaagattctgagaaacctgatggaatttcatttgaaaacagagttccccaggtcgctgcaactttgacagtagaagctagactaaaggagaaaaacagtaccttctctgcttctggggaaactgtagaaaggaagagatttttccgaaagagtgttgaaatgacggaagatgacaaagttgccgaatcatcccccaaagatgagagaattaaggctgcaatgaatattccaagagtagataagcttccttcaaatgtgttgagaggtggacaagaagttaaatatgaacagtgttcaaagtcaacctcagaaatctcaaaagattgtttcaaggagaaaaatgaaaaggaaatggaagaagaagcagaaatgaaggctgtagctacttctcctagtggcagattcctgaaatttgacatagaactaggaagaggagcatttaaaacagtatataaaggactggacactgaaacatgggttgaggttgcttggtgtgagctgcaggaccgaaagttaaccaaagctgagcagcaaagattcaaggaagaagcagagatgttgaagggtctccagcaccccaatatagttcgattttatgattcctgggaatctatattaaaaggaaagaaatgtattgtattagtgactgaactaatgacatctgggaccttaaagacgtacttaaaacgatttaaagtcatgaaaccaaaggtcttaaggagctggtgcaggcaaattttaaaggggttgcagttcttgcacactaggactcctcctattattcaccgggatctgaagtgtgacaatattttcatcacgggacccactggatctgtgaagattggtgatctaggattagccaccttaatgcgtacctcatttgctaagagtgtcattggaactcctgagtttatggctccagagatgtatgaagaacactatgatgaatccgtagatgtttatgcttttggaatgtgtatgctggaaatggccacatcggagtatccttattctgagtgtcagaatgcagctcaaatataccggaaagtaactagtggcataaaaccagccagcttcaataaagtcactgatcctgaagtcaaagaaatcattgaaggatgtattcgtcaaaacaaatctgaaaggttgtctatcagggacctattaaaccatgcattttttgctgaggatacaggactgagggtggagttagcagaagaagatgattgctcaaattcatcccttgctttaagactctgggttgaagaccctaaaaaattgaaaggcaaacacaaagacaatgaagctattgaatttagtttcaacttagaaacagatacacctgaggaagtagcatatgaaatggtcaagtctgggttcttccatgaaagtgattccaaagctgttgctaaatccattagagaccgggtgacgccaataaagaagacaagagagaagaagcctgctggctgtttggaagaacgcagggattctcagtgcaagtctatggggaatgtattccctcagccccagaatacaactttaccccttgctcccgctcagcaaactggggctgaatgtgaagaaactgaagttgatcaacatgttagacaacagcttctacaaagaaaaccacagcagcactgctcctctgttacaggtgacaatttgtctgaggcaggagctgcatcagttatacattcagatacttcaagtcagcccagtgtagcctattcctcaaatcaaacgatgggctctcaaatggtttctaatatcccgcaggctgaagtaaatgttccagggcaaatttattcatctcagcaactagtaggacattaccagcaagtttcagggttacagaagcattcaaagctgactcagccgcagattttgcctttggttcaaggtcagtccactgttttacctgtacatgtccttggaccgacagttgtttcacaaccccaggtttccccattaactgttcagaaggtcccacagataaagcctgtatcccaaccagttggagctgaacaacaagcagctcttctaaaaccagatttagttcgaagcttgaatcaagatgtggcaactacgaaggaaaacgtcagtagccctgataacccaagtggaaatggcaaacaggatcggatcaaacagagaagagcttcctgtccccgaccagagaaggggactaaatttcagcttaccgtccttcaggtatcaacctctggagataacatggtagagtgtcagctggagacacacaacaacaagatggtcaccttcaagtttgatgttgatggtgatgcgccagaggatattgcagactatatggttgaagataactttgtgctggaaagtgagaaagaaaaatttgtagaagaattgagagctattgtaggtcaagcccaggagatccttcatgtccactttgccacagaaagagccactggagttgattctattactgtggactccaacagtagccagacagggtcatctgaacaagtacagataaattctacatctactcaaaccagcaatgaatctgctcctcagtcatccccagttggtcggtggcgattctgtatcaatcagacgataagaaaccgtgagactcagtctcctccttctcttcagcattccatgtctgcggttcctggccgacatccacttcctagtccaaaaaacacaagtaataaggaaatatcacgggacacattgctcactatagaaaataatccatgccaccgtgcacttttcacctccaaatcagaacacaaggatgtggttgatggtaagatttctgaatgtgctagtgtagaaaccaagcagccagctatactttatcaagtggaagataacaggcagataatggcaccagttactaatagttccagttactctactacttcagttcgtgcagttccagctgaatgtgagggactcaccaaacaagcaagcatattcatacctgtgtatccatgtcaccaaactgccagtcaggctgatgcacttatgtcccatcctggcgaatcaactcagacttctggtaactctcttacaactctggcatttgatcaaaagcctcaaaccttatcagtacagcagccagctatggatgcagagtttatttctcaagaaggagaaactacagtgaacactgaagcaagttctcctaagacagtcattcccactcagacccctggccttgaaccaactacccttcaacccactactgtcctggaatcagatggagaaagacctccaaaactggagtttgcagacaaccgaattaaaactctggatgaaaaattaagaaacttgctctatcaggagcacagcatctctagcatctatcccgagagtcagaaggatacccaaagcatagactctccattttcttcctctgctgaagataccctctcctgtccagtgacagaagtcatagccatcagtcactgtggaattaaagatagccctgtacaatcccctaatttccaacagacaggctctaagcttctgtccaatgtggctgcaagtcagcctgctaatatatcagtgttcaaaagggacctgaatgtgataacttctgtacccagcgaattgtgtttacatgagatgtcctcagatgcttcacttccaggggatccagaggcctatcctgctgctgtgtcaagcggtggagccattcatctgcagacaggaggtggatattttggcctaagctttacttgtcctagtctcaaaaatcctattagcaagaaatcctggactcgcaaattaaaaagctgggcatacaggctacggcagtcaaccagctttttcaagagatcaaaagtccgtcaagtggaaacagaagagatgagatcagcaattgctcctgatcccattcctctgacacgggagtccacagctgatactagggctttgaatagatgtaaagcgatgagtggatcatttcagcggggtcggttccaggtgattacaattcctcagcagcagtcagcaaaaatgacatcttttggaatagaacacatatcagtgttcagtgagacaaaccattctagtgaagaagcctttattaaaacagcaaagtctcagttggtagaaatagaacctgccacacaaaatccaaaaacttcgttttcttatgagaagttacaagctcttcaggaaacctgtaaagaaaataaaggagttcccaaacaaggtgacaacttcttatctttcagcgcagcttgtgagactgatgtatcttcagtgaccccagaaaaggaatttgaagaaacttcagccacaggaagtagcatgcagtctggatctgaactgttgcttaaagagagagagatattgactgctgggaaacagcctagctctgatagtgaattttcagccagtcttgctggcagtggaaagtcagtggcaaagactggtccagagagtaatcagtgcttaccacaccacgaagaacaagcttatgctcaaacacagagttcactcttctattcgccatcttccccaatgagcagtgatgatgaatcagaaatagaggatgaggacttgaaggtggagcttcaaagattacgagaaaaacacattcaggaggtggtaaatcttcaaacccagcagaataaggagctgcaggagctctatgaacgccttcggtcaattaaagatagcaaaacccaatctactgagattcctttgccacctgcatcaccacgtcgaccaagatctttcaaaagcaaacttcgaagccgcccccagtccttgacacatgtggacaatggcatagttgctacagggaaaagctgccttataaatgagttggaaaatccactgtgtgtggagagtaatgcagcatcatgccaacagtctccagccagtaaaaaagggatgttcacagatgacttacacaagctggtggatgactggacaaaggaagcagtaggaaattctcttattaagccaagtttaaaccaacttaaacaaagtcaacacaaactagagacagaaaactggaataaagtatctgaaaatactccgtctactatgggctacacatcaacatggatttcttctctgtcccaaatccgtggagctgtcccaacttccttgccacaaggactctcactcccttcatttcctgggccattatcatcatatggaatgcctcacgtttgtcagtataatgctgtggcgggggcggggtatccagtacagtgggtaggaatttcaggaacaacacaacaatctgtagtaattcccgcccaatctgggggaccattccagccagggatgaatatgcaggcatttccaacttcatcagtgcagaatcctgccacaatccctcctggtcctaaatga

SEQ ID NO: 206576 - DNA, 715 bp, Artificial Sequence
  derived and/or modified sequence
gggggcgggggagacatgccgtggctgttgcccccgcaacgtaactgggaggccagtatttgtaaatcggtgcttcgacttctaatcccaaagccggcaggttgctatggaaatacatgaccacgcaaaaggaagtccattctgataattctgatacctgagatgtaactggactgaagagtagaaacaggaaaaattttagtgccaactttaattacaatggccactgattcaggggatccagccagcacagaagattctgagaaacctgatggaatttcatttgaaaacagagttccccaggtcgctgcaactttgacagtagaagctagactaaaggagaaaaacagtaccttctctgcttctggggaaactgtagaaaggaagagatttttccgaaagagtgttgaaatgacggaagatgacaaagttgccgaatcatcccccaaagatgagagaattaaggctgcaatgaatattccaagagtagataagcttccttcaaatgtgttgagaggtggacaagaagttaaatatgaacagtgttcaaagtcaacctcagaaatctcaaaagattgtttcaaggagaaaaatgaaaaggaaatggaagaagaagcagaaatgaaggctgtagctacttctcctagtggcagattcctgaaatttgacatagaactaggaagaggagcatttaaaacagtatataaaggactgg

SEQ ID NO: 206577 - protein, 2354 aa, Artificial Sequence
  derived and/or modified sequence
MQKRQGYCSYCRVQYNNLEQHLFSAQHRSLTRQSRRQICTSSLMERFLQDVLQHHPYHCQESSSTQDETHVNTGSSSEVVHLDDAFSEEEEEDEDKVEDEDATEERPSEVSEPIEELHSRPHKSQEGTQEVSVRPSVIQKLEKGQQQPLEFVHKIGASVRKCNLVDIGQATNNRSNLVRPPVICNAPASCLPESSNDRPVTANTTSLPPAAHLDSVSKCDPNKVEKYLEQPDGASRNPVPSSHVETTSFSYQKHKESNRKSLRMNSDKLVLWKDVKSQGKTLSAGLKFHERMGTKGSLRVKSPSKLAVNPNKTDMPSNKGIFEDTIAKNHEEFFSNMDCTQEEKHLVFNKTAFWEQKCSVSSEMKFDCISLQSASDQPQETAQDLSLWKEEQIDQEDNYESRGSEMSFDCSSSFHSLTDQSKVSAKEVNLSKEVRTDVQYKNNKSYVSKISSDCDDILHLVTNQSQMIVKEISLQNARHISLVDQSYESSSSETNFDCDASPQSTSDYPQQSVTEVNLPKEVHIGLVDKNYGSSSSEVSADSVFPLQSVVDRPPVAVTETKLRKKAHTSLVDNYGSSCSETSFDCDVSLESVVDHPQLTVKGRNLKGRQVHLKHKKRKPSSAKAHLDCDVSLGTVADESQRAVEKINLLKEKNADLMDMNCESHGPEMGFQADAQLADQSQVAEIERQKVDVDLENKSVQSSRSSLSSDSPASLYHSAHDEPQEALDEVNLKELNIDMEVRSYDCSSSELTFDSDPPLLSVTEQSHLDAEGKERHIDLEDESCESDSSEITFDSDIPLYSVIDQPEVAVYEEETVDLESKSNESCVSEITFDSDIPLHSGNDHPEVAVKEVIQKEEYIHLERKNDEPSGSEISSDSHAPLHSVTNSPEVAVKKLNPQKEEQVHLENKENEPIDSEVSLDYNIIFHSVTGRSEDPIKEISLHTKEHMYLENKSVFETSLDSDVPLQAATHKPEVIVKETWLQREKHAEFQGRSTEFSGSKTSLDSGVPHYSVTEPQVAVNKINRKKQYVLENKNDKCSGSEIILDSNVPPQSMTDQPQLAFLKEKHVNLKDKNSKSGDSKITFDSEQLQEAVKKIDQWKEEVIGLKNKINEPSTYKLIHHPDVSVQSVADQPKVAIKHVNLGNENHMYLEVKNSQYSCSEMNLDSGFLGQSIVNRPQITILEQEHIELEGKHNQCCGSEVSFDSDDPLQSVADRLRETVKEISLWKDEEVDTEDRRNEAKGFEIMYDSDVLQPVAGQPEEVVKEVSLWKEHVDLENKIVKPTDSRINFDSHEPLQSVTNKIPGANKEINLLREEHVCLDDKGYVPSDSEIIYVSNIPLQSVIKQPHILEEEHASLEDKSSNSYSPEESSDSNDSFQAAADELQKPVKEINLWKEDHIYLEDKSYKLGDFDVSYASHIPVQFVTDQSSVPVKEINLQKKDHNDLENKNCEVCGSEIKCHSCVHLQSEVDQPQVSYKEADLQKEEHVVMEEKTDQPSDSEMMYDSDVPFQIVVNQFPGSVKETHLPKVVLVDLVPGDSDYEVISDDIPLQLVTDPPQLTVKDISCINTECIDIEDKSCDFFGSEVRCNCKASTPSMTNQCKETFKIINRKKDYIILGEPSCQSCGSEMNFNVDASDQSMTYESQGPDEKMVKYIDSEDKSCGYNGSKGKFNLEDTSHRTTHRLQKAHKEASLRKDPRNAGLKGKSCQSSASAVDFGASSKSALHRRADKKKRSKLKHRDLEVSCEPDGFEMNFQCAPPLPSDTDQPQETVKKRHPCKKVSSDLKEKNHDSQSSSVLKVDSVRNLKKAKDVIEDNPDEPVLEALPHVPPSFVGKTWSQIMREDDIKINALVKEFREGRFHCYFDDDCETKKVSSKGKKKVTWADLQGKEDTAPTQAVSESDDIVCGISDIDDLSVALDKPCHRHPPAERPPKQKGRVASQCQTAKISHSTQTSCKNYPVMKRKIIRQEEDPPKSKCSRLQDDRKTKKKVKIGTVEFPASCTKVLKPMQPKALVCVLSSLNIKLKEGEGLPFPKMRHHSWDNDIRFICKYKRNIFDYYEPLIKQIVISPPLSVIVPEFERRNWVKIHFNRSNQNSSAGDNDADGQGSASAPLMAVPARYGFNSHQGTSDSSLFLEESKVLHARELPKKRNFQLTFLNHDVVKISPKSVRNKLLESQSKKKIHGKRVTTSSNKLGFPKKVYKPIILQQKPRKASEKQSIWIRTKPSDIIRKYISKYSVFLRHRYQSRSAFLGRYLKKKKSVVSRLKKAKRTAKVLLNSSVPPAGAEELSSAMANPPPKRPVRASCRVARRRKKTDESYHGRQKGPSTPVRAYDLRSSSCLQQRERMMTRLANKLRGNEVK

SEQ ID NO: 206578 - DNA, 7065 bp, Artificial Sequence
  derived and/or modified sequence
atgcagaagagacagggctactgcagctactgcagagtgcagtacaacaacctggagcagcacctgttcagcgcccagcacagaagcctgaccagacagagcagaagacagatctgcaccagcagcctgatggagagattcctgcaggacgtgctgcagcaccacccctaccactgccaggagagcagcagcacccaggacgagacccacgtgaacaccggcagcagcagcgaggtggtgcacctggacgacgccttcagcgaggaggaggaggaggacgaggacaaggtggaggacgaggacgccaccgaggagagacccagcgaggtgagcgagcccatcgaggagctgcacagcagaccccacaagagccaggagggcacccaggaggtgagcgtgagacccagcgtgatccagaagctggagaagggccagcagcagcccctggagttcgtgcacaagatcggcgccagcgtgagaaagtgcaacctggtggacatcggccaggccaccaacaacagaagcaacctggtgagaccccccgtgatctgcaacgcccccgccagctgcctgcccgagagcagcaacgacagacccgtgaccgccaacaccaccagcctgccccccgccgcccacctggacagcgtgagcaagtgcgaccccaacaaggtggagaagtacctggagcagcccgacggcgccagcagaaaccccgtgcccagcagccacgtggagaccaccagcttcagctaccagaagcacaaggagagcaacagaaagagcctgagaatgaacagcgacaagctggtgctgtggaaggacgtgaagagccagggcaagaccctgagcgccggcctgaagttccacgagagaatgggcaccaagggcagcctgagagtgaagagccccagcaagctggccgtgaaccccaacaagaccgacatgcccagcaacaagggcatcttcgaggacaccatcgccaagaaccacgaggagttcttcagcaacatggactgcacccaggaggagaagcacctggtgttcaacaagaccgccttctgggagcagaagtgcagcgtgagcagcgagatgaagttcgactgcatcagcctgcagagcgccagcgaccagccccaggagaccgcccaggacctgagcctgtggaaggaggagcagatcgaccaggaggacaactacgagagcagaggcagcgagatgagcttcgactgcagcagcagcttccacagcctgaccgaccagagcaaggtgagcgccaaggaggtgaacctgagcaaggaggtgagaaccgacgtgcagtacaagaacaacaagagctacgtgagcaagatcagcagcgactgcgacgacatcctgcacctggtgaccaaccagagccagatgatcgtgaaggagatcagcctgcagaacgccagacacatcagcctggtggaccagagctacgagagcagcagcagcgagaccaacttcgactgcgacgccagcccccagagcaccagcgactacccccagcagagcgtgaccgaggtgaacctgcccaaggaggtgcacatcggcctggtggacaagaactacggcagcagcagcagcgaggtgagcgccgacagcgtgttccccctgcagagcgtggtggacagaccccccgtggccgtgaccgagaccaagctgagaaagaaggcccacaccagcctggtggacaactacggcagcagctgcagcgagaccagcttcgactgcgacgtgagcctggagagcgtggtggaccacccccagctgaccgtgaagggcagaaacctgaagggcagacaggtgcacctgaagcacaagaagagaaagcccagcagcgccaaggcccacctggactgcgacgtgagcctgggcaccgtggccgacgagagccagagagccgtggagaagatcaacctgctgaaggagaagaacgccgacctgatggacatgaactgcgagagccacggccccgagatgggcttccaggccgacgcccagctggccgaccagagccaggtggccgagatcgagagacagaaggtggacgtggacctggagaacaagagcgtgcagagcagcagaagcagcctgagcagcgacagccccgccagcctgtaccacagcgcccacgacgagccccaggaggccctggacgaggtgaacctgaaggagctgaacatcgacatggaggtgagaagctacgactgcagcagcagcgagctgaccttcgacagcgacccccccctgctgagcgtgaccgagcagagccacctggacgccgagggcaaggagagacacatcgacctggaggacgagagctgcgagagcgacagcagcgagatcaccttcgacagcgacatccccctgtacagcgtgatcgaccagcccgaggtggccgtgtacgaggaggagaccgtggacctggagagcaagagcaacgagagctgcgtgagcgagatcaccttcgacagcgacatccccctgcacagcggcaacgaccaccccgaggtggccgtgaaggaggtgatccagaaggaggagtacatccacctggagagaaagaacgacgagcccagcggcagcgagatcagcagcgacagccacgcccccctgcacagcgtgaccaacagccccgaggtggccgtgaagaagctgaacccccagaaggaggagcaggtgcacctggagaacaaggagaacgagcccatcgacagcgaggtgagcctggactacaacatcatcttccacagcgtgaccggcagaagcgaggaccccatcaaggagatcagcctgcacaccaaggagcacatgtacctggagaacaagagcgtgttcgagaccagcctggacagcgacgtgcccctgcaggccgccacccacaagcccgaggtgatcgtgaaggagacctggctgcagagagagaagcacgccgagttccagggcagaagcaccgagttcagcggcagcaagaccagcctggacagcggcgtgccccactacagcgtgaccgagccccaggtggccgtgaacaagatcaacagaaagaagcagtacgtgctggagaacaagaacgacaagtgcagcggcagcgagatcatcctggacagcaacgtgcccccccagagcatgaccgaccagccccagctggccttcctgaaggagaagcacgtgaacctgaaggacaagaacagcaagagcggcgacagcaagatcaccttcgacagcgagcagctgcaggaggccgtgaagaagatcgaccagtggaaggaggaggtgatcggcctgaagaacaagatcaacgagcccagcacctacaagctgatccaccaccccgacgtgagcgtgcagagcgtggccgaccagcccaaggtggccatcaagcacgtgaacctgggcaacgagaaccacatgtacctggaggtgaagaacagccagtacagctgcagcgagatgaacctggacagcggcttcctgggccagagcatcgtgaacagaccccagatcaccatcctggagcaggagcacatcgagctggagggcaagcacaaccagtgctgcggcagcgaggtgagcttcgacagcgacgaccccctgcagagcgtggccgacagactgagagagaccgtgaaggagatcagcctgtggaaggacgaggaggtggacaccgaggacagaagaaacgaggccaagggcttcgagatcatgtacgacagcgacgtgctgcagcccgtggccggccagcccgaggaggtggtgaaggaggtgagcctgtggaaggagcacgtggacctggagaacaagatcgtgaagcccaccgacagcagaatcaacttcgacagccacgagcccctgcagagcgtgaccaacaagatccccggcgccaacaaggagatcaacctgctgagagaggagcacgtgtgcctggacgacaagggctacgtgcccagcgacagcgagatcatctacgtgagcaacatccccctgcagagcgtgatcaagcagccccacatcctggaggaggagcacgccagcctggaggacaagagcagcaacagctacagccccgaggagagcagcgacagcaacgacagcttccaggccgccgccgacgagctgcagaagcccgtgaaggagatcaacctgtggaaggaggaccacatctacctggaggacaagagctacaagctgggcgacttcgacgtgagctacgccagccacatccccgtgcagttcgtgaccgaccagagcagcgtgcccgtgaaggagatcaacctgcagaagaaggaccacaacgacctggagaacaagaactgcgaggtgtgcggcagcgagatcaagtgccacagctgcgtgcacctgcagagcgaggtggaccagccccaggtgagctacaaggaggccgacctgcagaaggaggagcacgtggtgatggaggagaagaccgaccagcccagcgacagcgagatgatgtacgacagcgacgtgcccttccagatcgtggtgaaccagttccccggcagcgtgaaggagacccacctgcccaaggtggtgctggtggacctggtgcccggcgacagcgactacgaggtgatcagcgacgacatccccctgcagctggtgaccgaccccccccagctgaccgtgaaggacatcagctgcatcaacaccgagtgcatcgacatcgaggacaagagctgcgacttcttcggcagcgaggtgagatgcaactgcaaggccagcacccccagcatgaccaaccagtgcaaggagaccttcaagatcatcaacagaaagaaggactacatcatcctgggcgagcccagctgccagagctgcggcagcgagatgaacttcaacgtggacgccagcgaccagagcatgacctacgagagccagggccccgacgagaagatggtgaagtacatcgacagcgaggacaagagctgcggctacaacggcagcaagggcaagttcaacctggaggacaccagccacagaaccacccacagactgcagaaggcccacaaggaggccagcctgagaaaggaccccagaaacgccggcctgaagggcaagagctgccagagcagcgccagcgccgtggacttcggcgccagcagcaagagcgccctgcacagaagagccgacaagaagaagagaagcaagctgaagcacagagacctggaggtgagctgcgagcccgacggcttcgagatgaacttccagtgcgccccccccctgcccagcgacaccgaccagccccaggagaccgtgaagaagagacacccctgcaagaaggtgagcagcgacctgaaggagaagaaccacgacagccagagcagcagcgtgctgaaggtggacagcgtgagaaacctgaagaaggccaaggacgtgatcgaggacaaccccgacgagcccgtgctggaggccctgccccacgtgccccccagcttcgtgggcaagacctggagccagatcatgagagaggacgacatcaagatcaacgccctggtgaaggagttcagagagggcagattccactgctacttcgacgacgactgcgagaccaagaaggtgagcagcaagggcaagaagaaggtgacctgggccgacctgcagggcaaggaggacaccgcccccacccaggccgtgagcgagagcgacgacatcgtgtgcggcatcagcgacatcgacgacctgagcgtggccctggacaagccctgccacagacacccccccgccgagagaccccccaagcagaagggcagagtggccagccagtgccagaccgccaagatcagccacagcacccagaccagctgcaagaactaccccgtgatgaagagaaagatcatcagacaggaggaggacccccccaagagcaagtgcagcagactgcaggacgacagaaagaccaagaagaaggtgaagatcggcaccgtggagttccccgccagctgcaccaaggtgctgaagcccatgcagcccaaggccctggtgtgcgtgctgagcagcctgaacatcaagctgaaggagggcgagggcctgcccttccccaagatgagacaccacagctgggacaacgacatcagattcatctgcaagtacaagagaaacatcttcgactactacgagcccctgatcaagcagatcgtgatcagcccccccctgagcgtgatcgtgcccgagttcgagagaagaaactgggtgaagatccacttcaacagaagcaaccagaacagcagcgccggcgacaacgacgccgacggccagggcagcgccagcgcccccctgatggccgtgcccgccagatacggcttcaacagccaccagggcaccagcgacagcagcctgttcctggaggagagcaaggtgctgcacgccagagagctgcccaagaagagaaacttccagctgaccttcctgaaccacgacgtggtgaagatcagccccaagagcgtgagaaacaagctgctggagagccagagcaagaagaagatccacggcaagagagtgaccaccagcagcaacaagctgggcttccccaagaaggtgtacaagcccatcatcctgcagcagaagcccagaaaggccagcgagaagcagagcatctggatcagaaccaagcccagcgacatcatcagaaagtacatcagcaagtacagcgtgttcctgagacacagataccagagcagaagcgccttcctgggcagatacctgaagaagaagaagagcgtggtgagcagactgaagaaggccaagagaaccgccaaggtgctgctgaacagcagcgtgccccccgccggcgccgaggagctgagcagcgccatggccaaccccccccccaagagacccgtgagagccagctgcagagtggccagaagaagaaagaagaccgacgagagctaccacggcagacagaagggccccagcacccccgtgagagcctacgacctgagaagcagcagctgcctgcagcagagagagagaatgatgaccagactggccaacaagctgagaggcaacgaggtgaagtag

SEQ ID NO: 206579 - DNA, 7065 bp, Artificial Sequence
  derived and/or modified sequence
atgcaaaaaagacagggctattgtagctactgccgagtgcagtacaataatctggaacagcacctgtttagcgcgcaacaccgctctctcacgcgtcagagtagacggcaaatctgtacctcgtccctgatggaacgatttctgcaggacgtcctccaacaccatccctatcattgtcaggaatcctcctccacacaagatgaaacgcacgtgaacaccggtagttcaagtgaggttgtccatttggatgatgcattttctgaggaagaggaggaggatgaagacaaggtggaggacgaggacgcaaccgaggaaagacccagtgaggtctccgagcccatcgaagaactgcacagcaggccccacaagtcgcaggaaggaacacaggaggtgtccgtccggccaagtgtgattcagaaattagaaaaaggacagcagcagccattggagtttgtacacaagattggcgcatctgtaagaaagtgcaatttagtcgatataggccaggccaccaataatcggagcaaccttgtgcgaccgcccgtgatttgcaatgcccccgcctcttgtctccccgagagctcaaacgaccgccctgtgacagccaataccactagtttacctcctgcagctcacctggatagtgtaagtaagtgcgacccaaataaggtagaaaaatatctcgaacagccggacggagcttcccgaaatccggtgccctcctcccatgttgagactacaagtttcagttatcagaagcacaaagagtccaatcgaaaatccctgcgcatgaattccgacaaattggtcttatggaaagacgtgaagtctcaggggaagacactgtctgccggattaaagttccacgaaagaatgggaaccaaagggagtttacgggtgaagagcccaagcaaactggccgtgaatccgaacaaaacagacatgccatcaaataagggcatctttgaagacactatagccaaaaaccatgaggaattcttctccaacatggactgcacacaggaggagaaacacctcgtttttaacaagactgcgttttgggagcagaagtgttccgtctcaagcgaaatgaagtttgactgtatcagtttacaatcagcgtctgaccagccgcaggagactgcccaggacctttcattgtggaaggaggagcagatcgatcaggaggacaactatgaatcgaggggtagcgaaatgtcatttgattgttcatcttcatttcactctcttaccgaccaatctaaggtttctgcgaaagaggtcaacttgtctaaagaagtacggacagatgtgcaatacaagaataacaaatcctatgtgtctaagatcagtagcgattgtgacgatatattacacttggtgacaaatcagtctcaaatgatagtgaaggaaatttcattacagaacgccagacatatcagcctggtggaccagtcttatgagagctcctcctctgaaacaaactttgactgtgacgcaagcccccagtcaacaagcgactatccacaacagtctgtcactgaagtcaatctgcctaaggaggtccacattggccttgtggacaagaattacggctctagcagctctgaggtttccgccgacagtgtgtttcccctgcagtctgtcgttgaccggccaccggtggccgttaccgaaaccaagctacgaaaaaaagctcatacctcattggtcgacaattacggctctagttgctcggagacctctttcgactgcgatgtgtctctcgagagtgttgttgaccatcctcagttgactgtgaaaggcagaaatctgaaggggcggcaggtacacctgaaacataagaagcgtaagccatccagcgccaaagctcaccttgactgtgacgtatcattaggaaccgtggcagacgaaagtcagcgcgccgtcgagaaaatcaatctgctaaaagagaaaaacgccgaccttatggacatgaactgtgagtcccacggccctgagatgggcttccaggccgacgcccaacttgctgatcagtcccaagtggccgagatcgaacgacagaaagtggatgtggatctggagaataaatcagtgcaaagttccagatcttcattatcttctgactcacctgccagcttgtaccactcagcacacgacgagccgcaggaggccctggacgaggtgaatctgaaagagcttaatatagatatggaagtgcgctcatacgactgtagcagtagtgagttgacattcgattcagacccaccgctgttgtctgtcacagaacagtcccacctcgatgctgaaggtaaggagcgtcatatcgatctggaggacgagagttgtgaatcagactcttccgagataacatttgatagcgacattcctctgtattccgtgattgatcagcccgaggtcgccgtctacgaggaggaaaccgtggacctcgaatctaaatctaatgaaagctgcgttagcgagataacatttgacagtgatattccccttcacagcggcaatgatcaccctgaggtggccgtgaaagaggtcatacaaaaggaagagtacatccacctcgagcggaaaaatgacgaaccatctggcagcgagataagctcagatagtcacgctcccctgcacagcgtgacaaactcaccggaggtagccgtcaagaagctgaacccacagaaggaggagcaggtacacctcgagaataaggaaaatgagcccatcgactcggaggtgtcacttgactacaatattatcttccattctgtcaccggaaggtccgaggacccaatcaaggagatctcactgcacaccaaagagcacatgtatcttgagaacaaatctgtattcgaaacatccctggattctgatgtgccactgcaggccgcaacccacaagcctgaggttatcgtcaaggagacttggcttcagagagagaaacacgccgagtttcagggtcgatcaaccgaatttagcggctccaaaacctcgcttgactcaggcgtgccacactactcagtgactgaacctcaggttgctgtcaacaagatcaatcggaaaaaacagtacgtcttggagaacaagaatgataaatgttcgggttctgagataattttggacagcaatgtgccccctcagagtatgaccgaccagcctcagctggcgttcttgaaggagaagcacgtgaatttaaaggacaagaattccaagtctggtgactcaaagatcacatttgactccgaacaactgcaagaagcggttaagaagatcgatcaatggaaggaggaggtgatcggcctgaagaacaagatcaacgagccaagcacctataaacttattcatcacccagatgtcagtgtacaatcggtggctgaccaacccaaggtggcaatcaaacatgtgaacttgggcaatgagaaccatatgtatttagaggtgaagaatagccaatactcctgtagtgagatgaatcttgatagtggattcctggggcagtcaattgtgaatcggcctcagatcacgattctggagcaggaacacatcgagttggaaggcaagcataaccagtgctgcgggtcagaagttagtttcgattcagacgatcccctgcagtcggtcgctgatagacttcgtgaaactgtcaaggagatcagcctttggaaggacgaggaggtcgacactgaggatagacgcaacgaagccaaaggattcgagattatgtacgacagcgacgtgctccagcctgtcgcgggacaaccggaggaggtggtgaaggaggttagcctgtggaaagagcacgtggatttggagaataaaattgtcaaacctacagactcccgaatcaactttgacagtcacgagcccctgcagagcgttacgaacaaaattcctggggccaacaaagagatcaacctgctgagggaggagcacgtgtgtctagatgacaaagggtacgttccgtcagactccgaaattatttacgtgagcaacattcctctgcagtccgttattaagcaaccccacattttggaagaggagcatgcctcacttgaggacaaatcatctaacagctacagccctgaggaatcttctgacagcaacgactcttttcaggccgcagccgacgagctgcaaaagcctgtgaaggagataaacttgtggaaagaagatcatatttatcttgaggacaagtcttataagctgggtgacttcgacgtgagctacgcatcccacatcccagtgcaattcgtgacagatcagtcctctgtgcccgtgaaagagatcaacttacagaagaaagatcacaatgaccttgaaaacaagaactgcgaggtgtgtgggagtgaaatcaagtgccacagctgtgttcatctacagtcagaagtggatcagcctcaagtgtcttacaaggaagctgacctgcaaaaggaggaacatgtagtgatggaggagaaaaccgatcaaccatcagattcagagatgatgtacgattctgacgttccgttccagatcgttgtgaatcagttccctggatccgttaaagagactcatctgcccaaagttgttttagtggatctcgtgccaggtgacagcgactacgaggtaatctctgacgatatccctttgcagctcgtcactgatccaccccagctcaccgttaaggacatatcctgcatcaataccgaatgtattgacattgaggataaatcctgcgactttttcggcagtgaagtgaggtgtaattgcaaggcatcaaccccgagcatgaccaaccagtgtaaggaaacgttcaagataattaaccgtaagaaggactatataatcttaggggagccgagttgccaatcctgcggcagcgagatgaatttcaacgtggatgctagcgatcaaagcatgacgtatgaatctcaggggcccgatgagaagatggttaaatacatagacagcgaggacaagagctgtggatataatgggtcaaaagggaagtttaacctggaagatacctctcaccggacaacgcatcgactgcagaaggcccataaagaggcctcgctgcgcaaagatcctaggaatgcaggcctgaagggcaagagttgccagtcgtctgcttcggccgtcgatttcggcgccagttccaagagcgctctccataggagagcagacaagaagaagcggtctaaactcaaacatagggacctggaagtgtcatgtgagccagatggcttcgagatgaacttccagtgcgccccacctctgccttcagacaccgaccagcctcaggaaactgtaaagaagagacacccctgtaagaaggtcagcagtgacctgaaagagaagaatcacgactcccagagcagtagtgtgcttaaggtggactcggtcagaaatctgaagaaggcaaaagatgtcatagaagataatcctgacgaaccagttctagaggctctcccccacgtgccaccctccttcgtggggaagacctggtcccagatcatgcgagaggacgatataaagattaatgccctggtgaaggagtttcgcgagggtaggttccattgttacttcgacgacgactgcgagaccaagaaggtttcctcaaagggtaagaagaaagttacatgggccgacctgcagggcaaggaggatactgcccccactcaggctgtgtctgaaagcgatgacatagtctgcgggatctctgatatcgacgatctctccgtagctcttgacaaaccctgccacagacaccctccagcagaacgtccccctaagcagaaagggagagttgcaagtcaatgtcagaccgcgaagataagtcattcaacacagacttcttgcaaaaactaccctgtgatgaaaagaaaaatcatccggcaggaggaggatccccctaagtccaaatgtagtcggctgcaggacgacagaaagacgaagaagaaagttaagattggcaccgtcgagtttccagcctcatgcaccaaggttctgaaacccatgcagcctaaagcccttgtgtgcgttctcagtagcttaaacataaagctcaaagaaggggaaggactgccgttcccaaaaatgagacaccactcatgggacaacgacatccgattcatctgtaaatacaaacggaacatctttgactactacgagcctcttataaagcaaattgtgattagcccacccctgagtgtcatagtgcccgagttcgagcggaggaactgggttaaaattcactttaataggtcaaaccaaaactcctccgcgggcgacaatgacgcggatggacaaggtagcgcctccgctcccctcatggccgtgccagcccgttacgggttcaattcccaccaggggacatctgattcatccttatttctggaggagagtaaagtcctgcatgccagagaactccctaaaaagagaaactttcagctgacttttctcaaccatgacgtagtaaaaatcagcccgaaaagcgtgcggaacaagctactggagagtcagagcaagaagaagatccatgggaagagggttactacatcgtctaacaagttgggcttcccaaagaaagtctacaaacctatcatccttcagcaaaagccacgcaaggccagcgagaaacaatcaatctggattagaactaaaccttccgacattattcgcaagtatatcagtaagtacagcgtatttctgagacacaggtatcagtcccgaagcgctttcctgggaagataccttaaaaaaaagaaatccgtggttagtaggcttaagaaagcgaaacggacagctaaggttcttctgaacagcagcgtgcctcccgctggtgctgaggagctctctagtgctatggccaatcctccacctaaacggccggttagagccagttgccgcgtggccagaagaaggaagaaaactgacgagagctaccacggcaggcaaaagggcccctccactccggtgcgcgcttatgacctacggtctagttcttgcctccagcagagagagcggatgatgacaagacttgcaaacaagctacggggcaacgaagttaagtag

SEQ ID NO: 206580 - DNA, 7065 bp, Artificial Sequence
  derived and/or modified sequence
atgcagaagaggcagggctactgcagctactgccgggtgcagtacaacaacctggagcagcacctgttcagcgcccagcacaggagcctgacccggcagagccggcggcagatctgcaccagcagcctgatggagcgcttcctgcaggatgtgctgcagcaccacccctaccactgccaggagagcagcagcacccaggatgagacccacgtgaacacaggcagcagcagcgaggtggtgcacctggatgatgccttcagcgaggaggaggaggaggatgaggacaaggtggaggatgaagatgccacagaggagcggcccagcgaggtgtctgagcccatcgaggagctgcacagccggccccacaagagccaggagggcacccaggaggtgtctgtgcggcccagcgtcatccagaagctggagaagggccagcagcagcccctggagtttgtgcacaagattggagcctctgtgaggaagtgcaacctggtggacatcggccaggccaccaacaacagaagcaacctggtgcggccccctgtgatctgcaatgccccagccagctgcctgcctgagagcagcaatgacaggcctgtgacagccaacaccaccagcctgcccccagctgcccacctggacagcgtgtccaaatgtgaccccaacaaggtggagaagtacctggagcagccagatggagccagcaggaaccctgtgcccagcagccacgtggagaccaccagcttctcctaccagaagcacaaggagagcaacaggaagagcctgaggatgaacagcgacaagctggtgctgtggaaggatgtgaagagccagggcaagaccctgtctgctggcctgaagttccacgagaggatgggcaccaagggcagcctgcgggtgaagagccccagcaagctggccgtgaaccccaacaagacagacatgcccagcaacaagggcatctttgaggacaccatcgccaagaaccacgaggagttcttcagcaacatggactgcacccaggaggagaagcacctggtgttcaacaagacagccttctgggagcagaagtgcagcgtgagcagcgagatgaagtttgactgcatcagcctgcagagcgccagtgaccagccccaggagacagcccaggacctgagcctgtggaaggaggagcagattgaccaggaggacaactatgagagccggggcagcgagatgagctttgactgcagcagcagcttccacagcctgacagaccagagcaaggtgtctgccaaggaggtgaacctgagcaaggaggtgaggacagatgtgcagtacaagaacaacaagagctatgtgtccaagatcagcagtgactgtgatgacatcctgcacctggtgaccaaccagagccagatgattgtgaaggagatcagcctgcagaatgcccggcacatcagcctggtggaccagagctatgagagcagcagcagcgagaccaactttgactgtgatgccagcccccagagcaccagtgactacccccagcagagcgtgacagaggtgaacctgcccaaggaggtgcacatcggcctggtggacaagaactacggcagcagcagcagcgaggtgtctgctgacagcgtcttccccctgcagagcgtggtggacaggcctcctgtggccgtgacagagaccaagctgaggaagaaggcccacaccagcctggtggacaactacggcagcagctgcagcgagaccagctttgactgtgatgtgtccctggagagcgtggtggaccacccccagctgactgtgaagggcaggaacctgaagggccggcaggtgcacctgaagcacaagaagaggaagcccagcagcgccaaggcccacctggactgtgatgtgtccctgggcaccgtggctgatgagagccagagagctgtggagaagatcaacctgctgaaggagaagaatgctgacctgatggacatgaactgtgagagccacggccctgagatgggcttccaggctgatgcccagctggccgaccagagccaggtggccgagattgagcggcagaaggtggatgtggacctggagaacaagtctgtgcagagcagccgcagcagcctgagcagtgacagccctgccagcctgtaccacagcgcccatgatgagccccaggaggccctggatgaggtgaacctgaaggagctgaacatcgacatggaggtgcgctcctatgactgcagcagcagcgagctgacctttgacagcgacccccccctgctgtctgtgacagagcagagccacctggatgctgagggcaaggagcggcacatcgacctggaggatgagagctgtgagagtgacagcagcgagatcacctttgacagcgacatccccctgtacagcgtcatcgaccagcctgaggtggccgtgtatgaggaggagaccgtggacctggagagcaagagcaatgaaagctgtgtgtctgagatcacctttgacagcgacatccccctgcacagcggaaatgaccaccctgaggtggccgtgaaggaggtgatccagaaggaggagtacatccacctggagaggaagaatgatgagcccagcggcagcgagatcagcagtgacagccacgcccccctgcacagcgtgaccaacagccctgaggtggccgtgaagaagctgaacccccagaaggaggagcaggtgcacctggagaacaaggaaaatgagcccatcgacagcgaggtgtccctggactacaacatcatcttccacagcgtgacaggccgctctgaggaccccatcaaggagatcagcctgcacaccaaggagcacatgtacctggagaacaagtctgtgtttgagaccagcctggacagtgatgtgcccctgcaggccgccacccacaagccagaggtgattgtgaaggagacctggctgcagcgggagaagcacgccgagttccagggccgcagcacagagttcagcggcagcaagaccagcctggacagcggcgtgccccactacagcgtgacagagccccaggtggccgtgaacaagatcaacaggaagaagcagtatgtgctggagaacaagaatgacaagtgcagcggcagcgagatcatcctggacagcaatgtgcccccccagagcatgacagaccagccccagctggccttcctgaaggagaagcacgtgaacctgaaggacaagaacagcaagagcggggacagcaagatcacctttgacagcgagcagctgcaggaggccgtgaagaagattgaccagtggaaggaggaggtgattggcctgaagaacaagatcaatgagcccagcacctacaagctgatccaccacccagatgtgtctgtgcagagcgtggccgaccagcccaaggtggccatcaagcacgtgaacctgggcaatgaaaaccacatgtacctggaggtgaagaacagccagtacagctgcagcgagatgaacctggacagcggcttcctgggccagagcatcgtgaaccggccccagatcaccatcctggagcaggagcacatcgagctggagggcaagcacaaccagtgctgcggcagcgaggtgtcctttgacagtgatgaccccctgcagagcgtggccgaccggctgcgggagaccgtgaaggagatcagcctgtggaaggatgaggaggtggacacagaggacagaagaaatgaggccaagggctttgagatcatgtatgacagtgatgtgctgcagcctgtggccggccagcctgaggaggtggtgaaggaggtgtccctgtggaaggagcacgtggacctggagaacaagatcgtgaagcccacagacagccgcatcaactttgacagccatgagcccctgcagagcgtgaccaacaagatccctggggccaacaaggagatcaacctgctgcgggaggagcacgtgtgcctggatgacaagggctacgtgcccagcgacagcgagatcatctacgtgagcaacatccccctgcagagcgtcatcaagcagccccacatcctggaggaggagcacgccagcctggaggacaagagcagcaacagctacagccctgaggagagcagtgacagcaatgacagcttccaggccgctgctgatgagctgcagaagcctgtgaaggagatcaacctgtggaaggaggaccacatctacctggaggacaagagctacaagctgggggactttgatgtgtcctatgccagccacatccctgtgcagtttgtgacagaccagagctctgtgcctgtgaaggagatcaacctgcagaagaaggaccacaatgacctggagaacaagaactgtgaggtgtgtggcagcgagatcaagtgccacagctgtgtgcacctgcagagcgaggtggaccagccccaggtgtcctacaaggaggccgacctgcagaaggaggagcacgtggtgatggaggagaagacagaccagcccagcgacagcgagatgatgtatgacagtgatgtgcccttccagatcgtggtgaaccagtttcctggctctgtgaaggagacccacctgcccaaggtggtgctggtggacctggtgcctggggacagcgactatgaagtcatcagtgatgacatccccctgcagctggtgacagaccccccccagctgactgtgaaggacatcagctgcatcaacacagagtgcatcgacatcgaggacaagagctgtgacttcttcggcagcgaggtgcgctgcaactgcaaggccagcacccccagcatgaccaaccagtgcaaggagaccttcaagatcatcaacaggaagaaggactacatcatcctgggggagcccagctgccagagctgtggcagcgagatgaacttcaacgtggatgccagtgaccagagcatgacctatgagagccagggcccagatgagaagatggtgaagtacattgattctgaggacaagagctgtggctacaacggcagcaagggcaagttcaacctggaggacaccagccacaggaccacccaccggctgcagaaggcccacaaggaggccagcctgaggaaggaccccagaaatgccggcctgaagggcaagagctgccagagcagcgccagcgctgtggactttggagccagcagcaagagcgccctgcaccggcgggctgacaagaagaagaggagcaagctgaagcaccgggacctggaggtgtcctgtgagccagatggctttgagatgaacttccagtgtgccccacccctgcccagcgacacagaccagccccaggagaccgtgaagaagaggcacccctgcaagaaggtgtccagtgacctgaaggagaagaaccacgacagccagagcagctctgtgctgaaggtggacagcgtgaggaacctgaagaaggccaaggatgtgattgaggacaacccagatgagcctgtgctggaggccctgccccacgtgccccccagctttgtgggcaagacctggagccagatcatgagagaagatgacatcaagatcaatgccctggtgaaggagttccgggagggccgcttccactgctactttgatgatgactgtgagaccaagaaggtgagcagcaagggcaagaagaaggtgacctgggccgacctgcagggcaaggaggacacagcccccacccaggccgtgtctgagagtgatgacatcgtgtgtggcatcagtgacattgatgacctgtctgtggccctggacaagccctgccaccgccaccccccagctgagcggccccccaagcagaagggccgggtggccagccagtgccagacagccaagatcagccacagcacccagaccagctgcaagaactaccctgtgatgaagaggaagatcatccggcaggaggaggacccccccaagagcaagtgcagccggctgcaggatgacaggaagaccaagaagaaggtgaagattggaacagtggagttccctgccagctgcaccaaggtgctgaagcccatgcagcccaaggccctggtgtgtgtgctgagcagcctgaacatcaagctgaaggagggggagggcctgcccttccccaagatgaggcaccacagctgggacaatgacatccgcttcatctgcaagtacaagaggaacatctttgactactatgagcccctcatcaagcagatcgtcatcagcccccccctgtctgtgattgtgcctgagtttgaaagaagaaactgggtgaagatccacttcaacagaagcaaccagaacagcagcgctggggacaatgatgctgatggccagggcagcgccagcgcccccctgatggctgtgcctgcccgctatggcttcaacagccaccagggcaccagtgacagcagcctcttcctggaggagagcaaggtgctgcacgcccgggagctgcccaagaagaggaacttccagctgaccttcctgaaccatgatgtggtgaagatcagccccaagtctgtgaggaacaagctgctggagagccagagcaagaagaagatccacggcaagagggtgaccaccagcagcaacaagctgggcttccccaagaaggtgtacaagcccatcatcctgcagcagaagcccaggaaggccagcgagaagcagagcatctggatccgcaccaagcccagcgacatcatcaggaagtacatcagcaagtacagcgtcttcctgcggcaccgctaccagagccgcagcgccttcctgggccgctacctgaagaagaagaagtctgtggtgtcccggctgaagaaggccaagaggacagccaaggtgctgctgaacagctctgtgcccccagctggagctgaggagctgagcagcgccatggccaaccccccacccaagaggcctgtgcgggccagctgccgggtggcccggcggaggaagaagacagatgagagctaccacggccggcagaagggccccagcacccctgtgcgggcctatgacctgcggagcagcagctgcctgcagcagcgggagaggatgatgacccggctggccaacaagctgcggggaaatgaggtgaagtag

SEQ ID NO: 206581 - DNA, 7065 bp, Artificial Sequence
  derived and/or modified sequence
atgcagaagcggcagggctactgcagctactgccgggtgcagtacaacaacttggaacaacaccttttcagcgctcaacatcggtcgcttactcgccaatcgcgcagacagatctgcacctcctcactcatggagcgcttcctgcaggacgtactgcagcaccatccataccactgtcaggaaagttccagcacccaagatgagacccatgtgaacaccgggagctccagtgaagtggttcatcttgatgatgcattctcagaagaagaagaagaagacgaagacaaagtggaagatgaagacgctacagaggagagacctagcgaggtgtcggagcccatagaggagctgcacagtcggccccataagagccaagagggaactcaggaagtatccgtgcgcccttctgtgatccagaaactggaaaaaggtcaacagcagccgcttgagttcgtgcacaagatcggggcatccgtgcgcaagtgcaatctggtggatatcggacaggctacaaacaaccggtcaaatctggtacgacccccagtcatatgcaacgctcctgcctcttgtctcccagagtctagcaacgaccggccggtgaccgccaatacgacctcactgcctccagcggcacacctggactcagtgtccaagtgcgaccctaataaggttgaaaaatacctcgagcagcccgatggggcctcaaggaatcctgttccctcctctcatgtggagacaacatctttcagttaccaaaagcacaaggaatcgaacaggaagagcctccggatgaatagcgataaactggtcctgtggaaggatgtaaaaagtcaggggaagacgctctcagccgggctgaagttccacgagcggatgggaacaaaaggctccctgcgggtcaagagtcctagtaaattggctgtcaaccctaataagacagacatgcctagcaacaagggcatattcgaggacactattgccaagaaccacgaagaatttttcagcaacatggattgtacgcaggaggaaaaacacttggtctttaacaagaccgccttttgggaacaaaagtgtagtgtatctagcgagatgaagtttgattgtatttcgctgcagtccgccagcgaccagccacaggagaccgcccaggatctgtccctctggaaggaagagcaaattgaccaggaagataactacgaatcccgcggatctgaaatgtccttcgattgttcatctagcttccacagtctgaccgatcagtcgaaggtgtctgccaaggaagttaatttgagcaaagaagtaaggaccgacgttcagtacaaaaataacaaatcatacgtgtctaaaattagctctgactgtgatgatattcttcatttggtgaccaaccagagccagatgattgtaaaggaaataagcttacagaatgcccgtcacatctctctagttgaccagtcctatgagagttcctctagcgagacaaacttcgactgcgatgcatcaccccaaagcacttccgactacccccaacagtccgttactgaggtgaatctccccaaggaggttcacatcggcttggtagacaagaactatgggtcatctagctcggaggtttctgccgactcagtttttcctctgcagagtgtagttgatcgtccacctgtggctgttacagaaactaagttgcgtaaaaaagctcatacgagcctggtggacaactacggctcgagctgtagtgaaaccagttttgactgcgacgtgagtctcgagtctgtggtggaccacccacaactcaccgtcaagggacggaatctcaagggccgacaggtacacctgaagcacaaaaaacgtaagccttcctccgccaaggcacatcttgattgtgatgtaagcctcggaacagtggctgatgaaagccagagagccgtggagaaaatcaatctgctgaaggagaagaacgccgatctgatggacatgaattgcgagtcccacggccctgagatgggattccaagccgacgctcaactggctgaccagtctcaggtggcagagattgagagacagaaggtagacgtagatctcgaaaataagtcagttcagagctccaggagctccttgtcctcggattccccggcatctttataccacagcgcgcatgatgaaccacaggaggccttggatgaggttaatctgaaggaacttaatattgacatggaagtgcgctcctatgattgttcatccagcgagctgacctttgactctgaccctcctctcctgtctgtcacggagcagtcccacctcgacgcagaaggaaaggagcgccacatcgatctggaagacgaatcatgtgaaagcgactcctcagagatcacattcgacagcgacatccctttatacagtgtgattgaccaacccgaggtggcggtgtatgaagaagagacggtcgacctggaatctaagtcaaacgagtcctgcgtttctgagattaccttcgattctgacatccccctgcattccggcaatgatcaccctgaagtagccgtcaaagaagttattcagaaggaagagtacatccacttggaaagaaagaatgacgaaccttctggctccgaaatctccagcgattcacacgcccctctgcactctgtcacgaattcccctgaagtggcagtgaaaaagctcaacccgcagaaggaggaacaagtgcacctcgaaaataaggaaaatgaacctattgacagcgaagtgtccctggactataatatcatatttcattccgtgactgggcgctcagaggatccgatcaaagaaatcagtttgcacacaaaagagcacatgtatttagaaaacaagtcggtctttgagacaagcctcgattccgatgtaccactccaggccgcgacacacaagcccgaggtcattgtgaaagaaacatggctgcaacgggagaagcatgccgaattccagggccggtccacagagttctccggttccaaaacgagcctcgattctggggtgccccattattccgtcaccgagccccaagtcgccgtgaataagattaaccgcaaaaaacagtatgttctggaaaacaagaacgacaaatgttcggggtctgaaatcattcttgacagcaatgttcctcctcagtcaatgacggatcagcctcaacttgcattcctgaaggagaagcacgtgaacctgaaggataaaaactcaaaaagtggagactcaaaaattactttcgacagcgagcaactgcaggaggctgtcaagaaaatcgaccaatggaaagaagaagtaatcgggttgaaaaataagataaatgagccctccacttacaagcttatccaccaccctgacgtatcagttcagtccgtggctgatcagcctaaagtggccatcaaacacgtgaacctgggcaatgaaaatcatatgtacctcgaagtgaagaacagtcagtacagctgtagtgaaatgaatctggatagtgggtttcttggccaatcaatagtaaaccggccacagatcactatccttgaacaggaacacattgaattggagggaaagcacaaccagtgttgtgggagtgaggtttctttcgactctgacgatcctctccagtcagtggctgaccggctcagggagaccgtgaaggaaatctctctgtggaaggatgaggaggtcgacacagaagatcgaagaaatgaggctaagggcttcgagattatgtacgacagtgacgtgctgcaaccagtggccgggcaacctgaagaggtggtcaaggaggtctctctctggaaggagcacgtggacctcgaaaataaaatcgtcaagccgacagactcccgaattaactttgattctcatgaacctctccagtcagtcactaataaaataccgggggcgaacaaggagattaacctgctgagggaggaacacgtttgtctagacgacaaaggttatgtgccctcagacagtgagattatctatgtctctaacatcccactgcaaagtgtgataaagcagcctcatattctcgaggaggaacatgcctccctggaagataagtctagcaactcttactctcccgaagagagcagcgatagcaacgatagcttccaggctgctgccgacgagttgcagaagcccgtgaaagaaatcaacctctggaaggaagaccacatctacctcgaggataaatcctacaagttgggtgacttcgacgtttcgtacgcttctcacatccccgttcagtttgttaccgatcagtcctccgtacctgtcaaagaaattaacctccagaagaaagaccacaacgatctggagaacaagaactgtgaagtatgtggctccgagattaagtgtcacagctgtgtccatctgcagagtgaagtagaccagccgcaggtgagctacaaagaagcggacctgcagaaggaggagcacgtggttatggaggagaaaacggaccagccatctgactccgaaatgatgtatgattctgatgtgcccttccaaatcgtggtaaatcagttccccggatctgtgaaagagacccacttacctaaggtagtgcttgtggacctagtgcccggagactccgactacgaggtgatctccgacgatatcccactgcagctggttaccgacccaccacagctgaccgtcaaggatattagctgcatcaataccgagtgcattgacatcgaggataaatcctgcgatttttttgggagtgaagtacggtgtaactgtaaggctagcacgcctagcatgacaaatcagtgcaaggaaacattcaaaattatcaatagaaagaaggactatatcatccttggcgaacctagttgtcagagctgtggaagcgaaatgaactttaacgtggatgctagcgaccagtctatgacctatgaatctcagggacctgatgaaaagatggtaaagtatatcgactcagaggataagtcttgtgggtataatggcagcaagggtaaattcaacttggaagacactagtcatcggactacccacagactccagaaagcccataaggaggcatctcttcgaaaagatccgcgtaacgctggactaaaaggcaagtcctgtcagtccagtgcttcagcagtggactttggcgcaagcagcaagagtgcgctgcataggcgggccgacaagaagaagcgctctaaattgaagcatagggatttggaagtgagttgcgaaccagacggcttcgaaatgaatttccaatgcgcacctccgctgccgagtgacacagaccagccccaggagaccgttaagaaacggcacccctgcaaaaaggtctcaagcgacctgaaggagaaaaaccatgactctcagtcatcatcagttctaaaagtggatagcgtccggaatctgaagaaggccaaagacgtgattgaagataaccctgacgagcctgtgctagaggccctaccacacgtgcccccctccttcgtagggaaaacttggagtcagattatgagagaggacgatatcaagatcaatgctctggtaaaagagtttagagagggtcggtttcattgctatttcgatgacgactgtgagacaaaaaaggtgtcgtccaaggggaaaaagaaggtgacatgggctgatctccaaggaaaggaagacaccgcaccaactcaagccgtaagcgagtccgatgatattgtgtgcggcatttccgatattgatgatttgtccgtagcgctggataaaccatgtcacaggcacccacctgcagaacgccctcccaaacagaaaggccgcgttgcttctcaatgccagaccgccaagattagccactcgactcagacctcttgcaaaaactaccccgtgatgaagcggaagattatcaggcaggaagaggacccccccaaatctaaatgtagcaggctgcaggacgacaggaaaacgaaaaagaaagtgaagattgggaccgttgagttcccagcctcctgtaccaaggtcttaaagcccatgcagccgaaggctcttgtctgcgtcctttcttccctaaatatcaagttgaaggagggggaaggactcccttttccgaaaatgagacaccattcctgggataatgacattcggtttatctgtaagtacaagcgaaacatcttcgattactatgagccactaatcaagcagattgttatatcccctccgctgtctgtcattgtccccgagttcgaaagacgcaattgggtgaagattcactttaatcgctcaaaccagaacagttctgcaggggacaatgacgcagacggacaagggtcggcttctgcaccactgatggccgtgcctgccagatatggatttaatagccatcaggggactagcgacagcagtttatttctggaggaatctaaagtcctccacgcccgagagctgccaaaaaagagaaacttccagctaacattcctgaatcatgacgtggttaagatctcaccaaagtctgtgagaaacaaactgctggagagtcagtcaaagaaaaaaatccacgggaagcgagtgacgaccagctctaacaagctgggctttcctaaaaaggtgtacaaaccgattattctccaacagaagccgaggaaagcatccgagaagcaaagcatatggatccgaaccaaaccgagcgacattattagaaaatacatttcaaagtacagcgtgtttttgcggcaccgatatcagtctcggtctgcgttcctgggcaggtacctgaaaaaaaagaaaagtgttgtttctagactgaaaaaggccaaacgcacagcaaaggtgctgctgaacagttcagtgccacccgctggcgcggaggagctttcctcggctatggccaatccgccgccaaagcggccagttcgagcatcttgtcgtgtggcaagaagaagaaagaaaactgacgagtcttaccatgggaggcagaagggaccttctacccctgtgagagcttatgatctccgatcctcatcatgccttcaacagcgggagcgcatgatgacgaggttagccaataagttgaggggcaatgaggttaaatag

SEQ ID NO: 206582 - DNA, 7064 bp, Artificial Sequence
  derived and/or modified sequence
atgcagaaaagacagggctactgctcatactgcagagtccagtataacaatctggagcagcacctcttctctgcccaacaccgatccttgactaggcagtcacggagacaaatctgtacatcctccctgatggaacggtttctgcaggatgtgctccaacatcatccctatcattgccaagagtctagcagcacccaggacgagacccacgtcaacactggatcgtcatcagaagtggtccatttagatgatgccttttcagaagaagaagaagaagatgaagacaaagttgaggacgaagatgctacagaagaaagaccttctgaagtctctgagcctatagaagagctacactcccggcctcataagagccaggaggggactcaagaagtctctgttaggccatccgtgatccagaagttagaaaaggggcaacagcagcctctggagttcgttcataaaattggggcatctgttcgtaagtgcaaccttgtcgatattggccaggccaccaataaccgatccaatctggtgcgaccgcctgtcatctgcaacgctccagcctcatgtctgcccgagtcaagcaatgacaggcccgttaccgctaacacaacttcattacctcctgccgctcacttagattctgtgagcaagtgcgatcccaacaaagtagagaaatacctagaacagcccgatggcgcttcaagaaaccccgtccctagtagtcatgtggaaactaccagcttcagctaccaaaagcacaaggagtctaacaggaaatctctgcggatgaattcggacaagctagtgttatggaaggatgtgaaaagtcaaggaaaaactttatcagcaggtctgaagtttcacgaacgtatggggacaaagggctctttaagagtgaaatctcccagcaaactggcggtgaatcccaataagacagatatgcccagcaacaaggggatctttgaggacactatcgccaaaaatcacgaagagtttttttctaatatggactgtacccaggaggaaaagcacctcgtatttaataagactgccttctgggagcagaaatgcagcgtctccagcgagatgaagtttgactgtatcagcctgcaatctgcctccgatcagcctcaggaaacagcccaggatttatctctttggaaagaagaacaaattgaccaggaagacaattacgagtcccgcggatcagaaatgtcattcgattgcagttcatcctttcacagtttgaccgaccaaagcaaggtcagtgccaaggaagtgaacctctccaaggaggttaggaccgacgttcagtacaagaataacaagtcatacgtgtccaagatcagttctgactgcgatgatattcttcaccttgtgacaaatcagtcccagatgattgttaaggaaatctctctgcaaaacgcgcgtcacattagtttggtcgaccagtcctacgagagttcctcttccgagacaaacttcgattgcgacgctagtccgcagtccaccagtgactatcctcaacagtccgtgaccgaagtcaacctgccaaaggaagtacacattggtctcgtagataagaactacgggtctagctcctctgaagtctctgccgatagtgtgttcccacttcagagcgtggttgaccgccctccagtagccgtaactgaaacaaaactgcgaaaaaaagcacacactagcctcgtagataactatggcagttcctgtagcgaaacctccttcgattgcgacgtttctctggaatcagtcgtcgaccaccctcagctgacagtcaaaggtcgaaatctcaaggggaggcaggtccacctgaagcataaaaagcggaagccctcctccgccaaagcacatctggattgcgatgtgagcctagggactgtcgcagacgaaagtcagagggcagtggagaagattaacctgctgaaggaaaagaacgcagaccttatggatatgaattgtgagtctcacggcccagagatgggctttcaggcagacgcccagctggccgaccagtcacaggttgcggagattgagaggcaaaaagttgatgtggacctggagaacaaatccgtgcagagttcccgctcttcactttcttccgacagccccgcaagcctgtaccatagcgcccacgatgaaccccaagaagccctcgatgaggttaatcttaaggagctgaatattgatatggaagttaggtcctacgactgctcatcttcagaacttacttttgacagcgacccgccactgttgtctgtgacagagcagtcgcatctggacgcggagggtaaagagcggcacatcgacctggaggatgagagttgtgagtccgacagttccgagattactttcgacagcgacatacctctgtacagtgtgattgaccagccagaggtggctgtgtatgaagaggagacggtcgatctggagagcaaatctaacgagtcttgcgtctcagaaatcacattcgatagcgatatcccactgcattcgggaaacgatcaccctgaagttgctgtcaaggaggtaattcagaaggaagagtacattcatcttgaacgaaaaaatgatgaacctagtgggtccgagatcagcagcgactctcacgccccacttcacagcgtgacgaacagtcctgaagttgcagtgaagaagttgaatccacaaaaggaggagcaggtgcacctggaaaacaaggagaatgaacccatcgattcagaagtgtcactggactataacattatctttcatagcgtcacaggtagaagcgaggaccctatcaaagaaatttctctgcacacgaaggagcatatgtacttagaaaacaaaagcgtctttgagacttctttggactcggatgtgcctcttcaggccgctacccacaagcccgaggtcatcgttaaagagacttggttacagagggagaaacacgctgagttccaaggcaggtcaacagagttcagcgggagtaaaacgtcccttgattccggtgtgcctcattattccgttactgagcctcaggtggccgtcaacaagataaataggaagaagcagtacgtgttagagaacaagaatgacaagtgcagcgggtccgagatcattctcgacagcaatgttcccccacagtccatgaccgatcagccccaactcgccttcttgaaagaaaagcacgttaacctgaaagataagaatagcaagtctggagattccaaaattacattcgactccgagcagcttcaggaggccgtgaagaagatagaccagtggaaagaggaggtgatcggccttaaaaataagataaatgagccatcaacatataagcttatccaccatcctgacgtaagcgtccagtcagtggccgatcaacccaaagtcgcaattaaacacgtaaacctcggcaacgagaatcatatgtacttggaagtcaagaatagccaatactcatgctcagagatgaatctggattcgggcttcctgggacagtccatcgtcaaccgccctcagatcacgatcctggaacaagagcatatcgagctggagggaaaacacaatcagtgctgcggatctgaagtatcattcgactcggatgatcccctacaatccgtcgcagataggctgcgcgaaactgtcaaagaaataagcctctggaaggatgaggaggtggacactgaagacaggcgaaacgaagccaaggggtttgagattatgtatgatagcgacgtcctgcagcctgttgcgggtcaaccggaggaggtggtgaaagaagtgagcctgtggaaggagcacgttgacctcgagaacaaaatagtcaagccaaccgacagccgcattaatttcgactctcatgagcctctgcaatctgtcacaaacaagataccgggtgctaacaaggaaatcaatctgctacgcgaagaacacgtctgcctcgacgataaagggtatgtcccgtcagattctgaaattatttatgtgtctaatatacctcttcagagcgttataaaacaaccacacatactcgaggaggagcatgcgagtttagaggacaaaagctcaaattcctacagtcctgaggaaagcagcgactctaatgactcctttcaggccgcagcagacgaattacagaaacccgtgaaggaaattaatctttggaaagaggatcacatttacctcgaagacaagtcttacaagctgggcgattttgatgtctcttacgcctcccacattcctgtccagttcgtgacagatcagtcctctgtgccggtcaaagagatcaacttacagaaaaaggatcacaacgatctcgagaacaagaactgcgaggtgtgtggaagtgaaatcaagtgtcactcctgcgtgcacctccagagtgaggtcgatcagccacaagtgagctacaaagaggcagacctgcagaaagaagaacacgtggtcatggaggagaaaaccgaccagcctagcgatagcgagatgatgtacgactctgacgtgccgttccaaattgtggtcaaccaatttccgggatcagtaaaagagacgcacctgcccaaagtcgtcttggtcgacctggttcccggagattccgattacgaagtgataagcgatgatataccgttgcagctggtgacagatccgcctcagttaactgtcaaagacatctcctgcatcaatacagaatgtatcgacatcgaagataaatcttgcgattttttcggcagtgaagtgcgatgtaattgcaaggcaagcaccccgagcatgaccaatcagtgtaaagaaacttttaaaatcattaataggaaaaaagattacatcatcctgggtgagccgagctgtcagtcttgcggctcagaaatgaatttcaatgtcgatgcttcagatcagagtatgacatatgagtcacagggacccgacgagaagatggtgaagtacatcgactctgaggacaagtcttgcggttataacggatcaaaaggcaagtttaatcttgaggatacctcacatagaacgactcaccgcctgcaaaaggcacataaggaggcgtctttacgcaaggacccccgtaacgccggactcaagggaaaatcctgccaatccagcgccagcgccgtggatttcggggcttcaagtaagtctgcactgcatagacgcgcagacaagaaaaaaaggtctaaattgaaacatcgcgacctggaagtctcatgcgagcctgacggatttgaaatgaattttcaatgtgctcctcctctgccatcagatactgatcagcctcaggagacggtcaaaaagcgacacccctgcaagaaggtctctagcgatttaaaggagaagaatcacgattctcaaagttcttccgtgctcaaagtggattctgtgagaaatcttaagaaggctaaggatgtgatagaagataaccccgacgagccagtgctggaagcgctccctcatgtacccccttcctttgttgggaagacttggagccagatcatgagggaagatgacatcaaaatcaacgcccttgtgaaggagttccgggagggacgcttccactgctactttgatgacgactgtgagaccaagaaagtctcgagcaagggcaagaaaaaagttacgtgggcagacctgcaggggaaagaggataccgcccctacacaggcagtcagtgaaagtgatgacattgtgtgcggcatttcagatatcgatgacttaagcgttgcccttgataaaccctgccacaggcatccacctgcagagcggcctcccaaacaaaaggggagggttgcgagtcagtgccagaccgccaaaatctctcactccacccagacaagttgtaaaaactatccagtgatgaaacggaagataattcgccaggaagaggacccacccaaatccaagtgtagtcgcctgcaggatgacagaaagactaagaagaaggtaaaaatcgggactgtagagttccccgcatcgtgcactaaagtgctcaaacctatgcagcccaaggcactggtctgcgtgctctccagccttaatattaaactcaaagaaggcgagggtctcccttttccaaaaatgcggcaccacagctgggataacgatatcaggttcatctgcaaatacaagaggaatatctttgattactacgagcctctgatcaagcaaatcgttatcagccctcctctgtccgtgatagttcccgagttcgagcggaggaactgggtcaaaattcacttcaatcgctctaatcagaatagtagcgccggagataatgatgccgacgggcaagggtcggcatccgcacctctgatggcagtgcccgcacgatacggttttaatagtcaccagggcacatccgacagctctctgtttttggaggaaagcaaggtcctgcacgctagagagttacccaaaaagaggaacttccagttgacatttctgaatcacgacgttgtgaaaatctcccctaaatctgtcaggaacaaactgctggaaagtcagagcaagaagaagatccacggaaagagagtgactacttcatccaacaaactcggatttcctaagaaggtgtacaaacctattatcctccagcagaaacccagaaaagcctccgagaagcaaagtatctggatccgtactaagccctcagacatcatcagaaaatacattagcaaatatagcgtgttcctgcgccaccgctaccaaagcaggtccgcgttcctcggccgatacctgaagaagaaaaagagtgttgtgagccgactgaaaaaggcgaagagaactgcaaaggttctgcttaacagctccgtgcccccagccggagctgaagagttaagttctgccatggctaaccctcccccaaagaggcccgtccgagcctcatgtcgtgtggctcgccgacggaagaaaacagacgagtcataccatggccgtcagaaaggtccttcaacaccggtacgggcttacgacctccgcagttcctcatgtcttcagcaacgtgagcgtatgatgacacgattagccaacaaacttagaggcaatgaggttaaata

SEQ ID NO: 206583 - DNA, 10282 bp, Artificial Sequence
  derived and/or modified sequence
aaacctccatcagggttgcaacgccacgttgccttggatgcctgcgtgagtggagtcgcgactcggggcccgcgtcctgagagacgcgctcccgcgccgcttctcgcctccggaccgcaggggccgaagtcgcctatttctggctccgcgggcagcggggccgtggcgctcggacggtctgggattcgggcgccgccgcggaaccggaataagaagggagagcgcccggctcggtcctcggtctccaccgcggcccggaaggaatccgggcagcctccgcggagatacttgccagaactaatacagctgatgaaatacctgaccttttctgctccagcttgagtattcaaagacagtagccatctgacttcagttatttattcaagatgcagaaaagacaaggatattgcagttattgccgtgtgcagtataataacctggaacagcatttgttcagtgctcagcacaggagtttgaccagacagagtagacgtcaaatatgtaccagtagtttgatggaacgtttcttacaggatgtactgcagcaccacccatatcattgtcaagagagcagttcaacacaagatgagacacatgtgaatactgggtcatcgtctgaagtggtgcatttggatgatgctttttctgaagaagaggaagaggatgaggataaggttgaggatgaggatgctaccgaagagagaccatccgaggtttcagaacctattgaagagttacattccagacctcataaatctcaggaaggcacgcaggaggtttcagttcgaccatcagttattcaaaaactggagaagggacagcagcagcccttggagtttgttcataaaattggggccagtgtgagaaaatgtaacctagtagatattggtcaggctacaaataatagaagcaacttggtacgccccccagtgatttgtaatgctcctgctagttgtttacctgaaagctctaacgatagaccagttacagctaatacaactagtttaccaccagcagctcatttggattcagttagcaaatgtgacccaaacaaagttgagaaatatcttgaacagccagatggggcctctagaaatcctgtgccatcatcccatgtagaaactacttcattttcgtatcagaaacataaagaatcaaataggaaatctttacgcatgaattcagataagttggttttgtggaaagatgtaaaatctcagggtaaaactttatcagctggcttgaaattccatgaacgcatgggtactaagggctccttaagagttaaatctccttccaaattagcagtaaacccgaataaaactgacatgccttctaataaaggaatctttgaagatactattgcaaagaaccatgaggaattcttttctaacatggattgtacccaagaagaaaagcatttggtttttaacaagacagccttttgggaacagaagtgctcagtgagttctgaaatgaagtttgattgtatctctcttcagtcagcatctgatcagccccaagagactgcacaagacttaagtctttggaaggaggagcaaattgaccaagaagataactatgagtctagaggttcagaaatgagttttgattgcagttcctcttttcattcactgactgaccaatctaaagtgagtgccaaagaagtaaacctttccaaggaagtacgtactgatgtacagtataagaataataaatcttatgtttctaaaataagttctgattgtgatgacattcttcacttggttaccaaccaatcccaaatgattgttaaagaaataagtcttcagaatgcaaggcatattagcctggttgaccaaagctatgaatctagtagttctgaaacgaattttgattgtgatgcttcacctcagtccactagtgactacccccaacaatctgtaacagaagtaaaccttcctaaggaagtgcacattggtttggttgataagaactatggttccagtagctctgaagtaagtgctgattctgttttcccactgcagtcagtggttgacagacccccagtggctgtcacagaaacaaaacttcggaagaaggctcataccagcttggttgataactatggatcgagttgttctgaaacaagttttgattgtgatgtttctcttgagtcagtagttgatcatccccaactgactgtcaaaggaagaaacctgaaaggtagacaagtccacctaaaacataagaagcgtaaacccagtagtgctaaagcacatcttgattgtgatgtctcacttgggacagttgcagatgaatcccagagggctgttgaaaagataaatcttctgaaggagaagaatgctgaccttatggatatgaactgtgaatcccatggtcctgaaatgggttttcaggctgatgctcaattagctgaccagtctcaagtagccgaaatagagcgtcagaaagtggatgttgaccttgagaataagagtgttcagtctagccgttcttctctgagttctgattctccggcttctctttatcattcagctcatgatgagcctcaagaagctttggatgaagtaaatcttaaagagttaaatattgacatggaagttaggagctatgattgctccagctctgagttgacttttgattctgacccgcctcttctgtcagttactgagcagtctcatctggatgctgaaggaaaagaacggcacattgacctggaagatgagagctgtgagtcagatagttctgaaataacttttgattctgatattcctctttattcagtaattgaccaacctgaagtagctgtttatgaggaagaaactgttgatctggaaagtaaaagtaatgaatcttgtgtctctgaaataacttttgattctgatattcctcttcattcaggaaatgatcaccctgaagtagctgttaaagaagtaattcagaaagaagagtacattcacttagaaaggaagaatgatgaacccagtggttctgaaataagttcggattcccatgcccctcttcattcagtgactaattctcccgaagtagctgttaaaaagctaaatcctcaaaaagaagagcaggtacacttagaaaataaggaaaatgaacctattgattctgaagtaagtttggattataatatcatttttcattcagtgactggacgttctgaagatcccattaaagaaataagccttcacacaaaagagcacatgtacttagaaaataagagtgtttttgaaacaagtttggattctgatgtccctcttcaggcagcgactcacaaacctgaagtaattgtcaaagaaacatggcttcaaagagaaaagcacgctgaattccaaggtagaagtactgaattcagtggttcaaaaacaagtttagattctggtgtccctcattattcagtaactgaacctcaagtagctgttaacaaaataaacagaaagaagcaatatgttctagaaaacaagaatgataaatgtagtggttctgaaataattttggattctaatgttccacctcagtcaatgactgaccaacctcaactagcttttttgaaggaaaaacatgttaatctgaaggacaaaaacagtaaatcaggtgattctaaaataacttttgattctgaacaacttcaggaagcggttaaaaaaatagaccaatggaaggaagaggttattggcctgaaaaataagattaatgaacctagtacttataaattaatacatcatcctgatgtttctgtccaatctgtggctgatcaacccaaagtagctattaaacatgtgaaccttgggaatgaaaaccatatgtacttggaagttaagaacagccaatatagttgttcagaaatgaatttggattctggtttcttgggtcagtcaatagtcaatcgacctcaaataactattttggagcaggagcacattgaactagaaggtaagcacaatcaatgttgtggttctgaagtaagttttgattctgatgaccctcttcagtcagtggctgaccggctgagagaaaccgttaaagaaataagcctttggaaggatgaagaagttgacacggaagataggagaaatgaagctaagggttttgaaattatgtatgattctgatgttcttcagccagtggctggccaacctgaagaagtagttaaggaggtcagtctttggaaagagcatgttgacttggaaaataagattgtcaaacctacagattccagaataaattttgattctcatgaaccccttcagtccgtaactaataaaattccaggggcgaataaagaaataaatcttttgagggaggaacatgtttgtctggatgataagggctatgtgcccagtgattctgaaataatttatgtttcaaatatccctcttcagtcagtgataaaacaaccacacattttggaagaggagcatgccagtctggaagataagagcagtaattcttatagtcctgaagaaagttctgattccaatgactcttttcaggcagcagcagatgagcttcaaaaacctgtcaaagaaataaatctttggaaggaagaccatatttacctggaagataagagctataaattaggtgattttgatgtaagttatgcttctcatattcctgttcagtttgtgactgatcaatcttctgtacctgtcaaagaaataaacttgcaaaagaaggatcataatgatctagaaaataagaactgtgaagtctgtggttctgaaataaaatgtcattcttgtgttcatcttcagtcagaagttgaccaacctcaagtgtcttacaaagaggcagaccttcagaaggaagagcatgttgtcatggaagaaaagaccgatcaacctagtgattcagaaatgatgtatgattctgatgttccttttcaaatagtagttaaccaatttccaggatcagtcaaagaaacccaccttccaaaggtggtacttgtggatctggtgcccggtgatagtgattatgaagtaatttcagatgatattccccttcagttagtgactgacccacctcagttgactgtcaaagatatcagctgtataaatacagaatgtattgatatagaagataagagctgtgacttttttggttctgaagtcagatgtaattgtaaagcctctactccctcaatgacaaaccaatgcaaagagactttcaaaataataaaccggaagaaggactatattattctgggagagccaagttgtcaatcttgtggttctgaaatgaattttaatgttgatgcctctgatcagtccatgacttacgagtcacaaggacctgatgagaaaatggtgaaatatattgattcagaagataagagctgtggatataatggttctaaaggaaaatttaatttggaagacacttctcatcgaacgactcaccgactgcagaaagctcacaaagaagccagtcttcggaaggatccaagaaatgctggcctaaaaggtaagagctgtcagtctagtgcttctgcagtggattttggtgcctcttccaagtcagcgctccatcgaagggctgataaaaaaaaacgttcgaagctaaaacatagagatctagaagtgagctgtgaaccggatggttttgagatgaattttcagtgtgctccccctcttccatctgatactgatcagcctcaagaaactgttaagaaaagacacccttgtaagaaggtatcttctgacttgaaagaaaagaaccatgattcccagtcaagctctgttctcaaggttgattctgtaaggaacctgaaaaaagcaaaggatgtcatagaggataatcctgatgaaccagttcttgaagccttgcctcatgtacctccttcatttgtggggaaaacatggtctcagataatgagagaagatgacataaaaattaatgctctggtgaaggagtttagggaaggtcgtttccactgttactttgatgatgactgtgagaccaaaaaagtttcttcgaaggggaaaaaaaaggttacctgggctgacttgcaaggtaaggaggacactgcaccaactcaagctgtgtcagagagtgatgatattgtctgtggtatttcagatattgatgacttgtcagtggccttagataaaccatgccatcgtcatcctccagcagagaggcctcctaagcaaaaggggcgtgtggcttctcaatgccagacagcgaaaatcagccatagtactcagaccagttgtaagaattacccagtgatgaaaagaaaaataattagacaagaggaagacccaccaaaaagtaagtgttcacgtttacaggatgacagaaaaaccaaaaagaaagtcaaaattgggacagttgaatttcctgcatcatgtactaaagttttgaagcctatgcaacccaaagccttagtctgtgttctttcttctttaaatattaaactgaaagagggtgaaggccttcctttccctaaaatgaggcaccatagttgggataatgatattcggtttatatgcaaatataaacggaatatctttgattattatgagcccttgattaagcaaattgtaattagtcctcccctgagtgtaatagtaccagagtttgagaggcgtaactgggttaaaattcattttaataggagcaaccaaaactccagtgcaggagataatgatgctgatggacaaggctctgcttcagcgcctttaatggcagtgccggcaagatatggatttaattcacatcagggaaccagtgactcttctctgtttctggaagaatcaaaggttctgcatgctcgtgagcttccaaagaaaagaaatttccagctaacatttttaaatcatgatgttgtcaaaatctctccaaaatcagttagaaataagcttttggaaagtcaaagtaaaaagaaaattcatggaaagagggtgacaactagtagtaataagctaggttttcccaaaaaggtttataaaccaattattctccagcaaaaacccagaaaagcttcagagaaacagtcaatttggattcggaccaaaccaagtgatatcattagaaagtatatttcgaaatactctgtctttttacgtcatagatatcagtccaggagcgcttttcttggaaggtatctgaagaagaaaaaatctgttgtcagtaggctaaagaaggcgaagagaacagctaaagtgcttttgaactcttcagttccaccagctggtgccgaagagctgtcaagcgctatggcaaatcctcctccaaagcgacctgtgcgggcttcttgccgcgttgcaagaaggaggaagaagactgatgaaagctaccatggccgacagaaaggtccttctacacctgtgagagcatatgatctgagaagctcatcttgtttacaacaacgtgagagaatgatgactcggctagcaaacaaactgagaggtaatgaggtaaaatagaagttggttttgtgttcaggctagttgaggattcagtacttcagttgaaatatatttggtactttgtgcacacagctttcccagctttggtgagaaaactaatcttgaactattttgctataaatattatttttcagaatttttatattcatttaaaattagtgtttagagtcctttcattttaagattcagaaacagcctttgtccaacattttctgtagaagaacttcatcttaatttatgtcacaaaataatttagcaccgtatatagaattttgttcctcaaatcatatccctcttattttttatgattatctctctcatgccagcaaatttaacattgtgagaatgaatatagcaaacttattaaaaagaaggaattataatgaattatgtcaacttttgaatggggttgacttaaatgaatacaaacaaaatataagttttctttctttttaaagcattccagaaaatgagattccataatctttaatacagtttttaaaaactggtgattttttttatgcatagcacaaactcctcctgcttcatttaaattggatctgcaagtctctaacttttatcatttggacacatgcacacatacagtctctaggttttttgggttagccttattagatcttaaaggggaaaataattttgcccatgtgtttaggcattcccccccttttttttaaccacctttactctcttctacatgaagagttggtggcttaatatgaaaatccaggttattttgtggccttatcccctaaaaatattttaggcattaccatatcagtttttatttttatgtttatttattattattattttttgagacagagtctcactgtcttgcccaggctggagtgcagtggcctgaacttagctcaccgcaacctccacctcccgggttcaagcaattctcctgcctaagcctctcgagtagctgggactacaggcgtgcgccaccatgcccggctaatttttgtatttttagtagagttgggggtttcactatgttggccaggctggtctcaaactcctgaccttgtggtccacccgcctcagcctcccaaagtgctgggattacagtcatgagccaccatgcccagcctaccatatcagtttttaataacttgaactgaaattattggcttggtaatatttgggcaggccattaattctcattagaaaattacttaatatttcaaaaaattgaataaaactggtaatctttgtggaggcccattttgcaagtggaaacctgtatttatacattagtttgtctttaactatttgttaacagattttaacagttcaaatgaaagatgttaacgagatgcagtttgagtctgggatactcagaatagatccagaacctttattcagggacactggttgagttggtacagatgcattcagttgtcattcattcgtgttaagccaagatcctggatcttctatcattaatgttaagaggaaacatgaattacaactatattgtatgactgccatattttattgaaactaaggtcaatgttgaaccatatcttgatttcagaatttaaaatgtgttaccttagaaataatgaaatatagtgtaacagttggtttctaaatgtggttttatttcaggggccattatttaacctgtgtgtatgctatgatggagttcttttgtgatttctttacttctaaatttaaatagtaattatgtttaaaaacaaatgtttttgtctttagttgcaaagcagcatatatctcatttccttcaaccttgcctcctcatacacaaatatattttcatttcttaaaagatcactgggccagtagttcaaaataatcctccaattttaatttaggaacaaagctttgtcctactgactaggaagtaaacaaacagctgatatataagatatttgtgggtattggtgtcttttttccctatggaatagacacatagttcccttaaatattattaatagacattctacagtctttcagtgtaagtttaaaagcaagagatcaaatgaaaatgtgtactatgtacctatgatgtgtcatatcgtgattacatcatgcagagagaacagttcctgtaattcaagtaattaaaatttcaagttgtaaaaatgttaccattttcacattggaagcccttctaagtaccattttcattgggggcagggagaaggtttatatttaaattttatattaccagacataaaagtacagtgcagtactgatgattttgtttaaagtttttgaaatgttttgtttactaagttcttgtaatcattattttagacaagcttgaaaacttgaaattgttgaaacttataatttaaattaaattggaaattactttcagaatttggtagtatacaagatgtgcccctttgtctaaataaatgttggcttaatttgcagaatagataaaacaattgatgtttttgtgtgttcaagaatgcattaaattcttttaatagtaaaaagtcaaattacgaccataatgagtattttaatcttgttcttgttcagtattttgcgtagatttttattgtaattgtcctgagttctacagtatgtgaacaatatcgtgtgaagtgtgtttttgcatttgtgcatttaaattatttatgtaactagggctgtgagtaacactttttttttttttttttggttaaagaaaagctatatttaaatattcaaataattatatatttccatgtaaaactaatgtgaagactaatgtattttttatattgcagtgtaaaagctaaacttgtttttgatgttatcaagataaaatttattaaaccttg

SEQ ID NO: 206584 - protein, 419 aa, Artificial Sequence
  derived and/or modified sequence
MAKEGVEKAEETEQMIEKEAGKEPAEGGGGDGSHRLGDAQEMRAVVLAGFGGLNKLRLFRKAMPEPQDGELKIRVKACGLNFIDLMVRQGNIDNPPKTPLVPGFECSGIVEALGDSVKGYEIGDRVMAFVNYNAWAEVVCTPVEFVYKIPDDMSFSEAAAFPMNFVTAYVMLFEVANLREGMSVLVHSAGGGVGQAVAQLCSTVPNVTVFGTASTFKHEAIKDSVTHLFDRNADYVQEVKRISAEGVDIVLDCLCGDNTGKGLSLLKPLGTYILYGSSNMVTGETKSFFSFAKSWWQVEKVNPIKLYEENKVIAGFSLLNLLFKQGRAGLIRGVVEKLIGLYNQKKIKPVVDSLWALEEVKEAMQRIHDRGNIGKLILDVEKTPTPLMANDSTETSEAGEEEEDHEGDSENKERMPFIQ

SEQ ID NO: 206585 - DNA, 1260 bp, Artificial Sequence
  derived and/or modified sequence
atggccaaggagggcgtggagaaggccgaggagaccgagcagatgatcgagaaggaggccggcaaggagcccgccgagggcggcggcggcgacggcagccacagactgggcgacgcccaggagatgagagccgtggtgctggccggcttcggcggcctgaacaagctgagactgttcagaaaggccatgcccgagccccaggacggcgagctgaagatcagagtgaaggcctgcggcctgaacttcatcgacctgatggtgagacagggcaacatcgacaacccccccaagacccccctggtgcccggcttcgagtgcagcggcatcgtggaggccctgggcgacagcgtgaagggctacgagatcggcgacagagtgatggccttcgtgaactacaacgcctgggccgaggtggtgtgcacccccgtggagttcgtgtacaagatccccgacgacatgagcttcagcgaggccgccgccttccccatgaacttcgtgaccgcctacgtgatgctgttcgaggtggccaacctgagagagggcatgagcgtgctggtgcacagcgccggcggcggcgtgggccaggccgtggcccagctgtgcagcaccgtgcccaacgtgaccgtgttcggcaccgccagcaccttcaagcacgaggccatcaaggacagcgtgacccacctgttcgacagaaacgccgactacgtgcaggaggtgaagagaatcagcgccgagggcgtggacatcgtgctggactgcctgtgcggcgacaacaccggcaagggcctgagcctgctgaagcccctgggcacctacatcctgtacggcagcagcaacatggtgaccggcgagaccaagagcttcttcagcttcgccaagagctggtggcaggtggagaaggtgaaccccatcaagctgtacgaggagaacaaggtgatcgccggcttcagcctgctgaacctgctgttcaagcagggcagagccggcctgatcagaggcgtggtggagaagctgatcggcctgtacaaccagaagaagatcaagcccgtggtggacagcctgtgggccctggaggaggtgaaggaggccatgcagagaatccacgacagaggcaacatcggcaagctgatcctggacgtggagaagacccccacccccctgatggccaacgacagcaccgagaccagcgaggccggcgaggaggaggaggaccacgagggcgacagcgagaacaaggagagaatgcccttcatccagtag

SEQ ID NO: 206586 - DNA, 1260 bp, Artificial Sequence
  derived and/or modified sequence
atggcaaaagagggagtggaaaaggccgaagagaccgagcaaatgattgagaaagaagccggcaaggaacctgctgagggtggaggcggtgatggatcgcacaggctcggtgacgcccaagaaatgagggcggttgtgctggccggcttcggtggccttaacaaattgcggttgtttcgcaaggcaatgcctgagcctcaggatggagagctgaagattcgggtcaaagcttgcggcctgaacttcatcgatctgatggtgagacaaggaaacatagacaatccgcccaaaaccccactggttccgggcttcgagtgttccgggatcgttgaagcactgggtgacagcgttaaggggtacgaaatcggggatcgcgtcatggcctttgtcaactacaatgcctgggccgaggtagtgtgtacacccgtggaattcgtttacaaaatccctgacgacatgtcttttagcgaagccgccgctttccccatgaactttgtgacggcctatgtgatgctctttgaagtagcaaacttgcgcgaggggatgtctgttcttgtacacagcgcgggcgggggggtcgggcaagctgtggcgcagctgtgtagcacagtgcctaacgttacagtcttcggcactgcctcaacttttaagcatgaggctattaaggactcagtcactcacctattcgacagaaacgcagactacgtacaagaagtgaaacgcattagtgctgagggagtggacatcgtgctggactgcctctgcggcgacaacactggaaagggcctgtccctcctgaaaccgctgggcacatacattctttacggctcatcaaacatggtgacaggggaaacaaaatcgttcttttcgttcgccaagagttggtggcaggtggaaaaggtgaacccgatcaagctgtacgaagaaaataaggttattgccggcttcagtctgcttaaccttctttttaaacaggggagagccgggctcatacgcggcgtggtcgagaaattaatcggcctctataaccagaagaaaattaagcctgttgtggattccctgtgggccctggaggaggtcaaggaggccatgcagaggattcatgatcggggcaacatcggtaaactgatcctggacgttgagaagaccccgacacctctgatggccaatgacagtaccgagacaagtgaggccggtgaggaggaagaggaccacgagggggactctgaaaacaaggagcgcatgcctttcattcagtag

SEQ ID NO: 206587 - DNA, 1260 bp, Artificial Sequence
  derived and/or modified sequence
atggccaaggagggcgtggagaaggccgaggagacagagcagatgattgagaaggaggccggcaaggagcctgctgagggcggcggcggagatggcagccaccggctgggagatgcccaggagatgagagctgtggtgctggccggctttggaggcctgaacaagctgcggctcttcaggaaggccatgcctgagccccaggatggagagctgaagatccgggtgaaggcctgtggcctgaacttcatcgacctgatggtgcggcagggcaacatcgacaacccccccaagacccccctggtgcccggctttgaatgttctggaattgtggaggccctgggggacagcgtgaagggctatgagatcggggacagagtgatggcctttgtgaactacaatgcctgggccgaggtggtgtgcacccctgtggagtttgtgtacaagatcccagatgacatgtccttcagcgaggccgccgccttccccatgaactttgtgacagcctacgtgatgctgtttgaggtggccaacctgcgggagggcatgtctgtgctggtgcacagcgctgggggcggcgtgggccaggccgtggcccagctgtgcagcacagtgcccaacgtgacagtgtttggaacagccagcaccttcaagcatgaggccatcaaggacagcgtgacccacctgtttgacagaaatgctgactatgtgcaggaggtgaagaggatctctgctgagggcgtggacatcgtgctggactgcctgtgtggggacaacacaggcaagggcctgagcctgctgaagcccctgggcacctacatcctgtatggcagcagcaacatggtgactggagagaccaagagcttcttctcctttgccaagtcctggtggcaggtggagaaggtgaaccccatcaagctgtatgaggagaacaaggtgattgctggcttcagcctgctgaacctgctcttcaagcagggccgggccggcctcatccggggcgtggtggagaagctgattggcctgtacaaccagaagaagatcaagcctgtggtggacagcctgtgggccctggaggaggtgaaggaggccatgcagagaattcatgaccggggcaacatcggcaagctgatcctggatgtggagaagacccccacccccctgatggccaatgacagcacagagaccagcgaggccggggaggaggaggaggaccatgaaggagacagcgagaacaaggagaggatgcccttcatccagtag

SEQ ID NO: 206588 - DNA, 1260 bp, Artificial Sequence
  derived and/or modified sequence
atggccaaggagggcgtggagaaggccgaggagaccgagcagatgatcgagaaagaggcaggcaaagagcccgccgaaggcgggggcggtgacggctcgcaccgactgggcgacgcccaggagatgcgagccgtggttctcgccggcttcgggggtttaaataagctccgtctgtttaggaaggccatgcctgagccacaggatggcgaactaaagatacgcgtgaaagcctgtggcctgaatttcatcgacctgatggttagacaaggcaatatagataatccgccgaaaaccccactggtgcctggctttgagtgctctgggattgttgaggcactaggcgattccgttaaaggatatgagataggcgacagagtaatggcctttgtcaactataacgcttgggcagaagttgtgtgtactccggtcgaatttgtatataagattccggacgacatgtccttttccgaggctgcagcgttccccatgaacttcgtgacagcctacgtgatgctcttcgaggtcgctaatcttcgagagggaatgagtgtgttggttcactccgccggcgggggggtcggccaggcggtggctcagctctgcagcacagtcccaaacgttacagtatttggcaccgcttccactttcaagcatgaagcaattaaagattctgtgacccatctattcgataggaatgccgactatgtgcaggaggtgaagcgaatttctgccgagggagtagatatcgttctggactgtctttgcggagataacactgggaagggactctccctccttaagcctcttgggacatacatcttgtacggcagcagcaacatggtgacaggagagaccaagtcatttttcagcttcgcaaagtcctggtggcaggtggagaaggtgaaccctatcaaactgtatgaagagaacaaagtgatcgctggtttctcacttttaaatttgctgttcaaacaggggcgggcggggctgatccgaggagttgtcgaaaaattgatcgggttgtataatcagaagaaaataaaacctgtagttgactccctatgggcactcgaagaagttaaggaggccatgcagaggatccacgaccgcggaaacattgggaagctaatcctcgatgtagagaaaacaccaacacccctgatggccaatgattctaccgagacatccgaggcgggggaggaagaggaggaccatgagggcgacagtgaaaacaaagagcgcatgcccttcatccagtag

SEQ ID NO: 206589 - DNA, 1260 bp, Artificial Sequence
  derived and/or modified sequence
atggccaaagagggcgtggaaaaggcggaagaaaccgagcagatgatcgagaaggaggctggaaaggagccagcggagggtggcggaggggatggttcacatcgcctgggcgacgctcaggaaatgcgcgctgtcgttctggcaggatttggtggcctcaataagttgcgactcttccgaaaggcaatgcctgaaccgcaggacggcgagctgaagatccgagttaaagcttgtgggctgaacttcatcgacttgatggtccgtcagggcaatattgacaatccacccaagacaccactggtgcctggttttgagtgctctgggattgtggaagctctcggcgacagcgtgaaaggctacgagataggtgacagggtgatggccttcgtgaactataacgcctgggccgaggtcgtatgtactccagtcgaatttgtatataaaatacccgatgacatgtccttctcagaggctgcagcattccctatgaatttcgtcacagcctacgtgatgctgttcgaagtggccaacctcagggagggaatgagcgtgcttgtgcactcggctggcggaggcgtcggccaagctgtggcccaattgtgtagtaccgtgccaaacgttactgtgttcggcactgcctcaacttttaaacatgaagccattaaggattcagtgacacatctgttcgaccgaaacgccgattatgtccaggaggtgaaacggatctccgcagaaggagtggacattgttctcgactgtctgtgcggcgataacacaggaaaagggttaagcctgctcaagcctctcggaacctacattctctacggaagcagcaatatggtgacaggggaaaccaaatcttttttttcatttgctaaaagctggtggcaggtggagaaagtcaacccaatcaagctatatgaagagaataaagtgattgcaggcttcagtctcctcaatctgctgtttaagcaaggacgtgccggattaatcagaggagtggtcgagaagctgattggcttatataaccaaaagaagatcaaaccagtggtcgacagtctgtgggccctcgaggaagtgaaagaagccatgcaaagaattcacgatcgtgggaatattgggaaattaatcctggacgttgagaagactcctacacctttgatggcgaatgacagcacggaaacctcagaggcaggcgaagaggaggaagatcacgagggcgactccgagaataaggaacgaatgccctttattcaatag

SEQ ID NO: 206590 - DNA, 3768 bp, Artificial Sequence
  derived and/or modified sequence
attcaacaggaggaacccgcgggagaggagccccactcccccagcgccgcagccaccgcagccaccgcagcccgtgcgccccgcgccctcgagcgccatggccaaggaaggcgtggagaaggcggaggagacggagcaaatgatcgagaaggaggcaggcaaggagccggcggagggcggcggcggcgacggctcgcaccgcctcggggacgcccaggagatgcgcgcggtggtgctggctggcttcggggggctcaacaagctgcggctcttcaggaaggccatgcccgagcctcaggacggcgagctcaagatccgcgtcaaagcctgtggattaaacttcattgacttgatggtgcgacaagggaatattgacaaccctcccaagactcccctggtgccaggatttgagtgttctgggattgttgaagctctgggggacagcgtgaaaggatatgagattggagaccgtgtcatggcatttgtcaattacaatgcctgggcagaggtggtctgcacaccagtggagtttgtctacaagatcccggatgacatgagcttctccgaggctgctgcattccccatgaacttcgtcacagcctatgtgatgctgtttgaagttgccaacctccgggaagggatgtctgtgctcgtgcactcagctggtgggggcgtgggtcaagctgtggctcagctgtgttccactgtccccaacgtgactgtctttggaacagcctctactttcaagcatgaagcaatcaaagactctgtgacccacctctttgacagaaatgcagactacgtgcaagaagttaaaagaatctctgctgaaggtgtggacatcgttttggattgcctctgtggggacaacactggaaaaggtctcagtcttctcaaacccctgggaacctacattttatatggctcatccaacatggtaactggagagaccaagagcttcttcagctttgcaaaatcatggtggcaggtggagaaggtgaaccccatcaagctgtatgaggagaacaaagtcatcgcggggttttcccttttaaatctgctcttcaaacaaggccgggcgggcctcattcggggagtggtggaaaaactcatagggctctacaaccagaagaagatcaagcctgtggtggactccttgtgggctctggaggaggtgaaggaggccatgcagcggattcacgaccgagggaacattggcaagttaattctggatgtagaaaagaccccaactccactgatggccaatgacagcacagagaccagtgaagcaggggaagaggaggaggaccacgagggagacagcgagaacaaggagcggatgccctttatccagtaactgaggacccaggtgggagaatgtgaaggatggtttggaagatgaggacccggctgagaaaactcttctgtgccccagtgaacaaatgctgtagtccagtgcgtgtcgtgtttgtctgcagtcagctgagctaaaaagctgttgatcactgttgttttttgaagtgccaatcccatgccatgcagtattatgtccctctcctatctgtgtattacacattcccctctcccctgtatcaaaaccatccatctgtgggttcttcttgacagttctagaacagccttgcaaattaatacaagtcccaggcccaatgcctaagagaccagacgtgggcaaagacaagtttggatggaaaggtgttatcacagagccctgtccagctcctagaattcctcaggccagtgacacttttttgctgctggccacccatgcctctgatgagaacacttgccaatttggccagcagaaagagagtaggccggatgttttcatgagcccacaaatttagaaactctcctagtagtactttttctctctccatttaagagacaactacggtcaaaagtttgagccattctcttctaccccttcagtgtctgaccctttcactggctcttatctgtaaacacagggaggcaggtatggatttttcacagtagacaatgggtcaacagcatgagtttgaggacctgctgtgaagatttctcctccaaaatacatctcatgggcaggattcttcctgctccatatctgtttcaattttaagaaagcaccacatacaagacacattcagaagtcattcctgagcattgctggtgtttgcacacttgccacctgcattaccaattctgtaaatttcaattcctggtggaaagtgaccactttgaccatggatttcccaaagaagagttcctttgcagaccataggtggaaaagtcaatgagcatctccttccttgccaaagcatgtcccaacatgtaacaaactctagggatacaaaaggtttatattcagcatctgatgtcagatgtacagttcctcccctcccatatataaaccccggtgtagaatctgcagcgccctgctcttcggaaaccaaggaacaagccacctgctcacacaccttgttcaacttttcagctcctaaggaaccccacccccatgcaatttgactgtgcttgagaggtgaatacagttaccttcgagaaacagagggagctcctcaccccgtccttccagtccttttggctaaaatgcttaactatcactcacaaacaaatgtggagataccaggagctcatttgattcataccccaactttgtgttctgaaaaacatcagagggattttacattgcccagtttctccaccaacaagccttagggtggacccaaccctttccgcaagtggtaggaacgaatgcatcttagcaattacctgatttccaaagtccttttgtagcaaatgtcacctcattcgtggtctttttacctatcctaagcttatgatgatgagttatgtatgccaaatacttatctgaagagtttctcctcattgtgaatgtgtatgtaaaatatgaagacaagaaagggtgctttcatctgaggaaccaaggggtgagagtatcccaaaggaggacaccagcatcatcttttcttcgtactccaggacccaccaatattccagttctgggtcatttagagagataatggggcgtttattcccctattacctttgctaagtgctatattattggctgtttctcccgtaaccatgctgaaaagggggtcttagggagaactgtcatccaagtggcattcctagtaagttgggtagaaatgacattttccagagctgaaggagtgaagagcccttggccatactagggctctccttcccccggggagtgggaactcagccacattcagaattcacatcgcctttgttatgtccagaggagaggcataaaaaggcactctcccccaccacccctaccaaatctgggtttggtttggttttatttaactagcaaagttaatccagtaatcgcaaattactccagatggttaaagaaaaccctttcagaatacagaacgagaaaactagagtttgaccaataagaccaatttctgccatgaagaaccgggggacgcaagttaattgtttaacgtactctcattttaagcaccttctttcctgtctcttgattgttttttctgaaggaagtgtaaagaatgtctcagtctgccttaaaggaactgtgaaggcttctctgtaatttaagcttgatagaagtgaactgaaacattgtctaatgtctttgtggctttagagcttttgttatattgtgcctataaagcaaattatgtttacataaaaatataaataaagtattcagcatagcaaaacctc

SEQ ID NO: 206591 - protein, 1215 aa, Artificial Sequence
  derived and/or modified sequence
MAERGQQPPPAKRLCCRPGGGGGGGGSSGGGGGAGGGYSSACRPGPRAGGAAAAAACGGGAALGLLPPGKTQSPESLLDIAARRVAEKWPFQRVEERFERIPEPVQRRIVYWSFPRSEREICMYSSFNTGGGAAGGPGDDSGGGGGAGGGGGGGSSSSPAATSAAATSAAAAAAAAAAAAAAAAGAGAPSVGAAGAADGGDETRLPFRRGIALLESGCVDNVLQVGFHLSGTVTEPAIQSEPETVCNVAISFDRCKITSVTCSCGNKDIFYCAHVVALSLYRIRKPDQVKLHLPISETLFQMNRDQLQKFVQYLITVHHTEVLPTAQKLADEILSQNSEINQVHGAPDPTAGASIDDENCWHLDEEQVQEQVKLFLSQGGYHGSGKQLNLLFAKVREMLKMRDSNGARMLTLITEQFMADPRLSLWRQQGTAMTDKYRQLWDELGALWMCIVLNPHCKLEQKASWLKQLKKWNSVDVCPWEDGNHGSELPNLTNALPQGANANQDSSNRPHRTVFTRAIEACDLHWQDSHLQHIISSDLYTNYCYHDDTENSLFDSRGWPLWHEHVPTACARVDALRSHGYPREALRLAIAIVNTLRRQQQKQLEMFRTQKKELPHKNITSITNLEGWVGHPLDPVGTLFSSLMEACRIDDENLSGFSDFTENMGQCKSLEYQHLPAHKFLEEGESYLTLAVEVALIGLGQQRIMPDGLYTQEKVCRNEEQLISKLQEIELDDTLVKIFRKQAVFLLEAGPYSGLGEIIHRESVPMHTFAKYLFTSLLPHDAELAYKIALRAMRLLVLESTAPSGDLTRPHHIASVVPNRYPRWFTLSHIESQQCELASTMLTAAKGDVRRLETVLESIQKNIHSSSHIFKLAQDAFKIATLMDSLPDITLLKVSLELGLQVMRMTLSTLNWRRREMVRWLVTCATEVGVYALDSIMQTWFTLFTPTEATSIVATTVMSNSTIVRLHLDCHQQEKLASSARTLALQCAMKDPQNCALSALTLCEKDHIAFETAYQIVLDAATTGMSYTQLFTIARYMEHRGYPMRAYKLATLAMTHLNLSYNQDTHPAINDVLWACALSHSLGKNELAAIIPLVVKSVKCATVLSDILRRCTLTTPGMVGLHGRRNSGKLMSLDKAPLRQLLDATIGAYINTTHSRLTHISPRHYSEFIEFLSKARETFLMAHDGHIQFTQFIDNLKQIYKGKKKLMMLVRERFG

SEQ ID NO: 206592 - DNA, 3648 bp, Artificial Sequence
  derived and/or modified sequence
atggccgagagaggccagcagcccccccccgccaagagactgtgctgcagacccggcggcggcggcggcggcggcggcagcagcggcggcggcggcggcgccggcggcggctacagcagcgcctgcagacccggccccagagccggcggcgccgccgccgccgccgcctgcggcggcggcgccgccctgggcctgctgccccccggcaagacccagagccccgagagcctgctggacatcgccgccagaagagtggccgagaagtggcccttccagagagtggaggagagattcgagagaatccccgagcccgtgcagagaagaatcgtgtactggagcttccccagaagcgagagagagatctgcatgtacagcagcttcaacaccggcggcggcgccgccggcggccccggcgacgacagcggcggcggcggcggcgccggcggcggcggcggcggcggcagcagcagcagccccgccgccaccagcgccgccgccaccagcgccgccgccgccgccgccgccgccgccgccgccgccgccgccgccgccggcgccggcgcccccagcgtgggcgccgccggcgccgccgacggcggcgacgagaccagactgcccttcagaagaggcatcgccctgctggagagcggctgcgtggacaacgtgctgcaggtgggcttccacctgagcggcaccgtgaccgagcccgccatccagagcgagcccgagaccgtgtgcaacgtggccatcagcttcgacagatgcaagatcaccagcgtgacctgcagctgcggcaacaaggacatcttctactgcgcccacgtggtggccctgagcctgtacagaatcagaaagcccgaccaggtgaagctgcacctgcccatcagcgagaccctgttccagatgaacagagaccagctgcagaagttcgtgcagtacctgatcaccgtgcaccacaccgaggtgctgcccaccgcccagaagctggccgacgagatcctgagccagaacagcgagatcaaccaggtgcacggcgcccccgaccccaccgccggcgccagcatcgacgacgagaactgctggcacctggacgaggagcaggtgcaggagcaggtgaagctgttcctgagccagggcggctaccacggcagcggcaagcagctgaacctgctgttcgccaaggtgagagagatgctgaagatgagagacagcaacggcgccagaatgctgaccctgatcaccgagcagttcatggccgaccccagactgagcctgtggagacagcagggcaccgccatgaccgacaagtacagacagctgtgggacgagctgggcgccctgtggatgtgcatcgtgctgaacccccactgcaagctggagcagaaggccagctggctgaagcagctgaagaagtggaacagcgtggacgtgtgcccctgggaggacggcaaccacggcagcgagctgcccaacctgaccaacgccctgccccagggcgccaacgccaaccaggacagcagcaacagaccccacagaaccgtgttcaccagagccatcgaggcctgcgacctgcactggcaggacagccacctgcagcacatcatcagcagcgacctgtacaccaactactgctaccacgacgacaccgagaacagcctgttcgacagcagaggctggcccctgtggcacgagcacgtgcccaccgcctgcgccagagtggacgccctgagaagccacggctaccccagagaggccctgagactggccatcgccatcgtgaacaccctgagaagacagcagcagaagcagctggagatgttcagaacccagaagaaggagctgccccacaagaacatcaccagcatcaccaacctggagggctgggtgggccaccccctggaccccgtgggcaccctgttcagcagcctgatggaggcctgcagaatcgacgacgagaacctgagcggcttcagcgacttcaccgagaacatgggccagtgcaagagcctggagtaccagcacctgcccgcccacaagttcctggaggagggcgagagctacctgaccctggccgtggaggtggccctgatcggcctgggccagcagagaatcatgcccgacggcctgtacacccaggagaaggtgtgcagaaacgaggagcagctgatcagcaagctgcaggagatcgagctggacgacaccctggtgaagatcttcagaaagcaggccgtgttcctgctggaggccggcccctacagcggcctgggcgagatcatccacagagagagcgtgcccatgcacaccttcgccaagtacctgttcaccagcctgctgccccacgacgccgagctggcctacaagatcgccctgagagccatgagactgctggtgctggagagcaccgcccccagcggcgacctgaccagaccccaccacatcgccagcgtggtgcccaacagataccccagatggttcaccctgagccacatcgagagccagcagtgcgagctggccagcaccatgctgaccgccgccaagggcgacgtgagaagactggagaccgtgctggagagcatccagaagaacatccacagcagcagccacatcttcaagctggcccaggacgccttcaagatcgccaccctgatggacagcctgcccgacatcaccctgctgaaggtgagcctggagctgggcctgcaggtgatgagaatgaccctgagcaccctgaactggagaagaagagagatggtgagatggctggtgacctgcgccaccgaggtgggcgtgtacgccctggacagcatcatgcagacctggttcaccctgttcacccccaccgaggccaccagcatcgtggccaccaccgtgatgagcaacagcaccatcgtgagactgcacctggactgccaccagcaggagaagctggccagcagcgccagaaccctggccctgcagtgcgccatgaaggacccccagaactgcgccctgagcgccctgaccctgtgcgagaaggaccacatcgccttcgagaccgcctaccagatcgtgctggacgccgccaccaccggcatgagctacacccagctgttcaccatcgccagatacatggagcacagaggctaccccatgagagcctacaagctggccaccctggccatgacccacctgaacctgagctacaaccaggacacccaccccgccatcaacgacgtgctgtgggcctgcgccctgagccacagcctgggcaagaacgagctggccgccatcatccccctggtggtgaagagcgtgaagtgcgccaccgtgctgagcgacatcctgagaagatgcaccctgaccacccccggcatggtgggcctgcacggcagaagaaacagcggcaagctgatgagcctggacaaggcccccctgagacagctgctggacgccaccatcggcgcctacatcaacaccacccacagcagactgacccacatcagccccagacactacagcgagttcatcgagttcctgagcaaggccagagagaccttcctgatggcccacgacggccacatccagttcacccagttcatcgacaacctgaagcagatctacaagggcaagaagaagctgatgatgctggtgagagagagattcggctag

SEQ ID NO: 206593 - DNA, 3648 bp, Artificial Sequence
  derived and/or modified sequence
atggcagagcgggggcagcagcctccaccggccaaacgtctgtgctgtcgccctgggggtggaggtgggggtggagggtcttctgggggaggaggaggtgcaggtggtggttattctagcgcctgcaggccaggccctcgggccggtggcgctgcagcagccgcagcatgtggaggtggcgccgccttgggcctgctgccccctgggaaaacacagtctcccgagagtttgctggacatagccgcgcgccgagtcgcagagaaatggccattccaacgggtagaggaacgtttcgaacggatccccgagccggttcagcgccgaattgtttattggtcatttccccgttcagagagagagatttgcatgtattccagttttaacaccgggggaggagccgctgggggcccaggagatgattccggcgggggcggcggagcaggtggtggaggaggagggggctcatcttcctcccctgctgcaacgtctgccgccgcaacttccgcagccgccgccgccgctgccgctgccgctgctgctgccgcagccgcgggagccggggctccttcagtgggagccgctggagctgctgacggcggtgatgagacacgcctgcccttcagacggggcattgcgctgctagagtccgggtgtgtggataatgtactgcaggtgggcttccatttgagtgggaccgtcactgaaccagcaattcagagtgagcccgagaccgtttgcaacgtcgctatatcatttgaccgatgtaagattaccagcgtgacctgctcatgtggtaataaggacatcttttactgcgcacatgtggtcgcgttatccctctatcgcatcagaaaaccggatcaagtcaagttacatcttccaatatctgaaacactgtttcagatgaaccgtgaccagctgcaaaagttcgtccaatatctaatcactgtccaccatactgaggtactaccaacggcacagaagctggctgacgagatcctgtctcaaaattccgagattaaccaagttcatggcgccccggatcccactgccggagcttcaattgacgacgagaactgctggcatctggacgaggagcaagtgcaggagcaggtgaagctctttctttcacagggcggctaccacggtagtggcaagcaactcaatttgctttttgctaaggtccgcgaaatgttgaagatgagagattcaaacggtgcccgcatgctcaccttaatcaccgagcagttcatggcggacccacggttgtccctctggcgacagcagggcaccgccatgacagataagtacaggcaattatgggacgagctgggggccctctggatgtgcatcgtcttaaatccacactgtaagctcgagcagaaggccagctggctgaagcagctgaaaaagtggaactcagtcgatgtttgcccatgggaagacggaaatcatggatcagagttacctaatctcaccaacgcgctaccccaaggggctaacgctaaccaggatagtagcaatagaccccaccgcaccgtatttacacgggcaatcgaggcctgcgatctgcactggcaggactcccacctgcagcacatcatatcctctgacctgtacaccaattattgctaccacgatgacacagaaaactcactgttcgactctagggggtggccattatggcacgagcatgtcccaactgcctgcgctagagtcgatgcccttagaagtcatggatatccacgcgaagcactgagactcgccatcgcgatagtaaatacgctgcgacgacagcaacagaagcagctggagatgttccgaacgcaaaagaaggagctgccacacaaaaatattacatcaatcaccaacttggaggggtgggttgggcaccccctggatccagtcgggacactttttagttctctcatggaggcttgccgcatagacgacgaaaatctctctggatttagcgattttacggaaaacatgggccaatgcaaatccctggaatatcagcacctacctgcccataagttcctcgaggaaggcgaatcatatctgacattggcagtggaggtggcactgatcgggcttggccagcagcggatcatgccagatgggctgtacactcaggaaaaggtgtgtaggaacgaagaacagctcatttccaaactgcaggaaatcgaattggacgacaccctcgtaaaaatctttcggaaacaggcagtgtttctcctggaagctggtccatacagtggattaggggaaataatacatcgggagtctgtaccaatgcatacatttgctaaatatctctttacatccctcctgccccatgacgcagaactggcctacaagattgccctacgcgccatgagacttctggtgttagagagtacagccccctccggtgatctgacgcgtccacatcatatcgctagtgttgttcccaatcgctatcccagatggtttacgctctcccatatcgagagccagcagtgcgagctggcgagtactatgctcactgccgccaaaggtgacgtgagaaggctcgagaccgttctagagtccatccagaaaaacattcatagctcttcccacatattcaaactggcacaggacgcctttaagattgctacgctgatggactcgctccccgatatcaccctgctcaaggtgagcctggagctgggcttgcaggtgatgcgcatgaccctttccactctgaattggaggcggagagagatggtacgatggctcgtgacatgcgctaccgaggtcggtgtgtatgcactggacagtataatgcagacctggttcacccttttcacccccaccgaggccacaagcatcgtggctactacggtcatgtcaaacagcactattgtaaggctgcacctggactgtcatcagcaagaaaagctcgcctcttcagctaggacgttagccctgcagtgtgccatgaaggaccctcagaattgtgctctgagtgctctcaccctgtgtgaaaaagaccatatcgcatttgagacagcctaccagattgttctggatgcagcgacaacaggaatgtcctacactcaactgttcactatagcacgatatatggaacacagagggtatcccatgcgagcctacaagctcgccactctggccatgacccatctcaacctgagctacaatcaagatacacatccagctatcaatgacgtcctgtgggcctgtgctctgagccactctctgggaaagaatgaactggcggctatcattcccctcgtcgtaaagtcggttaaatgcgccactgtgctgtccgacatcctgagacgatgtacattgacaacacctggaatggtgggactgcacggcaggcgcaactcggggaaactgatgtcactggacaaagcgcctttaagacagctgctcgatgccactatcggggcctatatcaacaccacccattctaggctgactcatattagcccacgtcactattccgagttcatcgaatttctgagtaaagccagggagacatttctgatggcgcatgatggacatattcaattcacccagtttatagataaccttaagcaaatctataaaggcaaaaaaaaactgatgatgctggtcagagaaagatttggctag

SEQ ID NO: 206594 - DNA, 3648 bp, Artificial Sequence
  derived and/or modified sequence
atggccgagcggggccagcagcccccaccagccaagaggctgtgctgcaggcctgggggcggcggcggcggcggcggcagcagcggcggcggcggcggggccggcggcggctacagcagcgcctgccggcccggcccccgggccggcggcgctgctgctgctgctgcctgtggcggcggggccgccctgggcctgctgcccccaggcaagacccagagccctgagagcctgctggacattgctgccaggagagtggccgagaagtggcccttccagagggtggaggagagatttgagcgcatccctgagcctgtgcagaggagaattgtgtactggagcttccccaggtctgagcgggagatctgcatgtacagcagcttcaacacaggaggaggagctgctgggggccctggagatgattctgggggcggcggcggggccggcggcggcggcggcggcggcagcagcagcagccctgctgccaccagcgctgctgccaccagcgctgctgctgctgctgctgctgctgctgctgctgctgctgctgctgctggggccggggcccccagcgtgggcgccgccggggctgctgatggaggagatgagacccggctgcccttccggcggggcatcgccctgctggagagcggctgtgtggacaacgtgctgcaggtgggcttccacctgagcggcaccgtgacagagcccgccatccagagcgagcctgagaccgtgtgcaatgtggccatcagctttgaccgctgcaagatcacctctgtgacctgcagctgtggcaacaaggacatcttctactgtgcccacgtggtggccctgagcctgtaccgcatcaggaagccagaccaggtgaagctgcacctgcccatcagcgagaccctcttccagatgaacagagaccagctgcagaagtttgtgcagtacctgatcaccgtgcaccacacagaggtgctgcccacagcccagaagctggctgatgagatcctgagccagaacagcgagatcaaccaggtgcacggggccccagaccccacagctggggccagcattgatgatgagaactgctggcacctggatgaggagcaggtgcaggagcaggtgaagctgttcctgagccagggcggctaccacggcagcggcaagcagctgaacctgctgtttgccaaggtgcgggagatgctgaagatgagggacagcaatggagccaggatgctgaccctcatcacagagcagttcatggctgacccccggctgagcctgtggaggcagcagggcacagccatgacagacaagtaccggcagctgtgggatgagctgggcgccctgtggatgtgcatcgtgctgaacccccactgcaagctggagcagaaggcctcctggctgaagcagctgaagaagtggaacagcgtggatgtgtgcccctgggaggatggcaaccacggcagcgagctgcccaacctgaccaatgccctgccccagggcgccaatgccaaccaggacagcagcaaccggccccacaggacagtgttcacccgggccatcgaggcctgtgacctgcactggcaggacagccacctgcagcacatcatcagcagtgacctgtacaccaactactgctaccatgatgacacagagaacagcctgtttgacagccggggctggcccctgtggcatgaacatgtgcccacagcctgtgcccgggtggatgccctgcggagccacggctacccccgggaggccctgcggctggccatcgccatcgtgaacaccctgcggcggcagcagcagaagcagctggagatgttccgcacccagaagaaggagctgccccacaagaacatcaccagcatcaccaacctggagggctgggtgggccaccccctggaccctgtgggcaccctcttcagcagcctgatggaggcctgcagaattgatgatgagaacctgagcggcttcagtgacttcacagagaacatgggccagtgcaagagcctggagtaccagcacctgcctgcccacaagttcctggaggagggggagagctacctgaccctggccgtggaggtggccctgattggcctgggccagcagaggatcatgccagatggcctgtacacccaggagaaggtgtgcagaaatgaggagcagctgatcagcaagctgcaggagattgagctggatgacaccctggtgaagatcttcaggaagcaggccgtgttcctgctggaggccggcccctacagcggcctgggggagatcatccaccgggagagcgtgcccatgcacacctttgccaagtacctgttcaccagcctgctgccccatgatgctgagctggcctacaagatcgccctgcgggccatgaggctgctggtgctggagagcacagcccccagcggggacctgacccggccccaccacatcgcctctgtggtgcccaaccgctacccccgctggttcaccctgagccacatcgagagccagcagtgtgagctggccagcaccatgctgacagctgccaagggagatgtgcggcggctggagaccgtgctggagagcatccagaagaacatccacagcagcagccacatcttcaagctggcccaggatgccttcaagatcgccaccctgatggacagcctgcctgacatcaccctgctgaaggtgtccctggagctgggcctgcaggtgatgaggatgaccctgagcaccctgaactggaggcggcgggagatggtgcgctggctggtgacctgtgccacagaggtgggcgtgtatgccctggacagcatcatgcagacctggttcaccctcttcacccccacagaggccaccagcatcgtggccaccaccgtgatgagcaacagcaccatcgtgcggctgcacctggactgccaccagcaggagaagctggccagcagcgcccggaccctggccctgcagtgtgccatgaaggacccccagaactgtgccctgagcgccctgaccctgtgtgagaaggaccacatcgcctttgaaacagcctaccagatcgtgctggatgctgccaccaccggcatgagctacacccagctgttcaccatcgcccgctacatggagcaccggggctaccccatgagggcctacaagctggccaccctggccatgacccacctgaacctgagctacaaccaggacacccacccagccatcaatgatgtgctgtgggcctgtgccctgagccacagcctgggcaagaatgagctggccgccatcatccccctggtggtgaagtctgtgaagtgtgccaccgtgctgagtgacatcctgcggcgctgcaccctgaccaccccaggcatggtgggcctgcacggcagaagaaattctgggaagctgatgagcctggacaaggcccccctgcggcagctgctggatgccaccatcggggcctacatcaacaccacccacagccggctgacccacatcagccccaggcactacagcgagttcatcgagttcctgagcaaggcccgggagaccttcctgatggcccatgatggccacatccagttcacccagttcatcgacaacctgaagcagatctacaagggcaagaagaagctgatgatgctggtgcgggagcgcttcggctag

SEQ ID NO: 206595 - DNA, 3648 bp, Artificial Sequence
  derived and/or modified sequence
atggccgagcggggccagcagcccccccccgccaagcggctgtgctgtagacccggcggcggcggaggcggcggcggcagtagcggtggtggcggcggggcagggggaggatactctagtgcgtgcaggcctggccccagggctgggggcgccgccgcagccgccgcctgtggcggcggcgcagccctgggcttgctcccccctggtaagacgcaatccccggagagtctgctcgacatagcagctagaagggtcgcagagaagtggccgtttcagagggttgaagaacgctttgagagaataccagagcccgtacagcgaaggatcgtgtactggtcttttccaaggtccgaaagggaaatttgtatgtacagtagcttcaatacagggggaggtgctgccggcggccccggtgacgactcaggtggcggaggaggagctggcggcgggggtgggggcggttcatcctcctcacccgccgcaaccagtgccgcggctacgtccgctgccgccgcggccgcagcggcagctgcagcagcagcggccgctgccggtgctggggcaccatccgtgggtgcggccggtgccgccgacggtggcgacgagactaggctgccatttcgcagaggtattgcgctcctggagtctgggtgtgtggataacgtactccaggtaggctttcacttgtccggaacagtaaccgaaccagcaatccagtcagagccagaaacagtgtgtaatgttgcgattagctttgaccggtgcaagatcacatcagttacctgttcctgcgggaataaggatatcttctattgtgcccacgtcgtcgccctgagtctgtacaggatccgaaagcctgaccaagtgaaactgcatctgcccatatccgaaactttgtttcagatgaaccgtgatcagttgcagaagttcgttcaatatttgattaccgttcaccacacagaggttttaccaactgcccagaaacttgctgacgagatcctctcccagaactccgagatcaatcaagtgcatggagctcccgaccctaccgccggcgctagtatcgacgatgaaaactgctggcacttggatgaggagcaggttcaggaacaagttaagctcttcctgagccaaggtggataccatggcagcgggaagcagctcaatctgttgtttgccaaggtgagggagatgcttaaaatgagggacagcaatggtgcacggatgctaacgctgattaccgaacagtttatggccgatccccgcctttctctctggcggcagcagggtaccgctatgacagataagtacaggcaactgtgggacgagctgggggcattatggatgtgcatagttttgaacccgcattgcaaattggaacagaaagcaagctggctgaaacagctcaagaaatggaatagcgttgacgtgtgtccgtgggaggatggaaatcacggttctgagctgcccaatctcacaaatgctttaccccaaggagccaacgcaaaccaggatagcagtaatcgacctcacaggacggtcttcacaagagctatcgaggcctgtgatcttcactggcaggactcacatcttcagcacattatttcgtcggacctttacaccaactattgttaccatgatgacacagaaaattcccttttcgattctaggggatggccactatggcatgagcacgtgccaacagcctgcgcgcgggtcgatgcactgagatcgcacggatacccacgtgaggcactgagacttgcgattgccatagtcaacacccttcgtcggcagcagcagaagcaactggagatgtttcggactcagaaaaaggagctgccacacaagaacattacatctatcaccaatctggaggggtgggtaggccaccccttggaccccgtggggaccctgttctcctcactaatggaagcatgtcgcatcgacgatgaaaacttatcaggcttctctgattttacggagaacatggggcagtgtaagtccctcgaataccagcatctccccgcacataagtttttagaggagggcgagagctatctgacacttgccgtggaagtcgccctgatcggcctcggccagcaaaggattatgcctgatggcctgtatacgcaggagaaagtgtgccgtaacgaggagcagttaatcagtaagttgcaggagatagaactggatgacaccctggtcaagatttttcgaaagcaggccgtgttccttctggaagccggcccctactctgggctgggcgagattatccacagagaatcggtccctatgcacactttcgctaagtatctctttacctctctgctaccccacgacgccgagcttgcatacaagatcgccctccgcgccatgcgtctgttagtattagagtctactgcacccagcggcgacctcactagaccacaccatatcgcttccgtcgtgccaaacaggtacccccgatggtttaccctgtcgcacattgagtcgcagcagtgtgagcttgcaagcaccatgcttacagcggctaaaggcgatgtccgacgcctcgaaaccgtgcttgagagtattcagaagaatatccattcatcttcacatatctttaagctggctcaggacgctttcaagatcgccacgctgatggactccctacccgacataactcttctgaaggtgtccttggagcttggactgcaagtcatgcggatgacgttgtccactctgaactggaggagacgcgaaatggtgcgttggcttgtgacctgcgccactgaagtcggagtctacgccctcgactcgatcatgcaaacctggtttacactgttcaccccgaccgaagccacgtctatagttgctacaacagttatgtctaactctacaatcgtccgcctgcatcttgattgtcaccagcaggaaaagctcgctagtagtgcccgcaccctcgccctgcagtgcgcaatgaaggacccacaaaactgtgcactgtctgcccttaccctgtgtgagaaagaccacatcgctttcgaaaccgcttaccagatcgtgctggatgctgcaaccactggcatgtcgtatacgcaactgtttactatcgctcgatacatggagcacagggggtaccccatgcgtgcctacaaacttgctacacttgctatgacacacctgaacctgtcttataatcaagacacccatcctgctattaacgatgtgttgtgggcgtgtgcacttagtcacagcttaggaaaaaatgagctggcggcaataattccactcgttgtcaaatccgttaaatgtgccaccgtgctgtctgacattctgaggagatgtacactgacaaccccaggcatggtagggctacatggtagaaggaactccggaaaactgatgtccctcgataaagctcctcttcggcagctcctggatgccaccatcggcgcttacataaacacaacccatagccgactgacgcacatttctcctagacattatagcgagtttatagaattcctgagtaaggcccgggagaccttccttatggctcacgatggacacattcaattcacacagttcatcgacaacctgaagcaaatctataagggcaagaagaagttgatgatgcttgtcagggagagatttgggtag

SEQ ID NO: 206596 - DNA, 3648 bp, Artificial Sequence
  derived and/or modified sequence
atggctgaaaggggtcagcagccaccgccagccaagcgcctttgttgtaggcccggagggggagggggaggtgggggatcaagtggcggtggcggtggagcgggaggaggctactcaagtgcctgtagacccggacccagggccggaggagcagcagcagccgctgcatgcggcggaggggctgcactaggcctcctgccaccaggtaaaacccagagccccgagagtctgttggatattgcagcgagacgagtcgccgagaaatggcctttccaaagggtggaagaaagatttgagcgaattcccgaacctgtacagagaagaatcgtgtactggagtttcccaagatccgagagggagatttgcatgtattcttcctttaacactggaggcggtgctgctggcggacccggagacgacagtggaggcggaggcggagcaggtggaggaggagggggtgggagtagcagctccccagcagcaacctcagccgcagcaacctctgccgctgcagctgcagctgccgctgcagccgctgctgctgccgctgctggggcaggagctccaagcgttggtgccgcaggggcagctgatggcggagatgagactcgacttccatttaggcgtgggattgctctcttagagtctggttgtgtagataatgtgctgcaggtcggatttcatctaagtgggacagttactgagcctgcgatccagtccgagcctgagaccgtctgtaacgtggctattagctttgaccgttgtaaaatcacctcagtgacctgctcctgtggcaacaaagacatcttctattgcgcccacgtggtggccctgagcctgtacaggattcggaagcctgaccaggtgaagctgcacttacccataagcgagaccctgttccagatgaaccgggaccaactccagaaattcgtccaatatttaatcacggttcaccatactgaagtgctcccaacggcccagaaactcgcggacgaaatactctcgcaaaacagcgagattaaccaggtgcacggtgcccctgaccctactgctggcgctagcatcgacgacgagaactgctggcatttggacgaggagcaggtgcaggagcaggtgaaactcttcctcagccaagggggttaccatggatccgggaagcaactgaaccttctgttcgccaaggtgagggaaatgttgaaaatgagagactccaatggtgcaagaatgctgaccctgattaccgaacagttcatggcggaccctcgactgagcctgtggagacagcagggcacagctatgaccgataagtatagacagctgtgggatgaactgggcgcactgtggatgtgtatagtcctaaatccacactgtaagcttgaacagaaggccagctggctcaaacagctgaagaagtggaattcagtggatgtctgtccttgggaggacggaaatcacggttcggaactgcctaacctgacaaacgctctcccacagggcgcaaacgcaaaccaagattctagtaatcgaccccaccgcaccgtgttcacccgggctatagaggcatgtgacttacattggcaggacagccatctgcagcacatcatctccagcgacctgtacactaactactgttatcacgatgatacagaaaatagccttttcgatagcaggggttggcctttatggcacgagcatgtcccaacggcctgtgcaagggtggacgccctgcgatcacatgggtacccacgagaggctctgaggcttgctattgcaatcgttaacacacttcgtcggcagcagcagaagcaattggagatgttccggacccagaagaaagaactccctcacaagaacatcactagtattaccaatttggaagggtgggtgggccatccactcgaccctgtgggcacattattttcttctcttatggaggcctgccggatcgacgacgagaatctctctggtttctctgattttacggagaacatgggacaatgcaagtcacttgagtatcagcatctccctgctcataagtttctggaagaaggagaaagctacctgacactcgccgtggaagttgctctcatagggctgggacagcagaggattatgccagatggtctttacacgcaggaaaaggtgtgcagaaatgaggagcagttgatctctaagctgcaggaaattgaactggatgacaccctggtgaaaatctttcgcaaacaagctgtattcctgctggaagccggaccatactctggtttgggtgagatcatccaccgggagtccgtgcctatgcatacctttgccaaatatttgttcacctccttgcttcctcacgatgcagaactggcctataagattgccctccgtgctatgagactactcgtgctggaaagtacagctccctccggggacctaacgcggccacatcacatcgcgtctgtcgtgcccaatcgctacccaaggtggttcacactcagccatatagagtcccaacaatgcgagttggcgagtacaatgctgactgccgcaaagggcgatgtccggcgactggagaccgtgctcgaatcgatccaaaagaatatccatagctcttcacatattttcaaactggcacaggacgcgttcaagattgcaaccttaatggattccctccccgacatcacactgctgaaagtttctctggagctgggtcttcaggtgatgcggatgaccctgagtacacttaattggcggagaagagagatggtacgttggctggtgacatgtgccaccgaagtgggggtatacgctctcgacagcatcatgcagacatggtttacattgttcacaccaacggaagcaacaagcattgtggcgaccacagtgatgagtaactcaaccatagtccgactccatttggattgtcatcagcaggagaagctggctagctcggccaggacgctcgctctgcagtgcgccatgaaggatcctcagaactgtgccctgtctgccctgaccttgtgcgaaaaagaccatatagctttcgaaacggcgtatcaaatcgtcttagatgctgctactacaggtatgtcctatacccagcttttcacaattgcacgctacatggaacatcgcggttaccccatgcgcgcttataaactcgcaacccttgcgatgacgcatctgaacctgagctacaaccaggacacacatcctgccatcaatgacgtgctgtgggcatgtgctctatctcactccctcggaaaaaacgagcttgccgcaatcatcccgttagtggtgaaaagtgtgaagtgcgctacagtcctgtctgatattttacgcaggtgtacactgaccacaccaggtatggttggccttcatggtaggcgcaactccggcaaactgatgagcctcgataaagccccattgaggcaactgctggatgcaactatcggagcctatattaacacaacccactctagactgacccacatttcccccagacactactctgaattcatcgagttcctgagcaaggctcgcgaaacatttctgatggcccacgacggccatatacagttcacacagtttattgacaatctgaaacagatttacaaggggaagaagaaattgatgatgctggtccgcgaacggttcggctag

SEQ ID NO: 206597 - DNA, 5501 bp, Artificial Sequence
  derived and/or modified sequence
atggcggagcgcggacagcagcctcctcccgcgaaacggctttgctgccggccgggcggcggcggcggcggcgggggcagcagcggcggcggcggcggcgcgggtggcggctacagctctgcctgtcggccaggcccgcgggcgggtggcgcggcggcggcggcggcgtgcgggggcggcgcggcgctggggttgctgccgccgggcaagacccagagccccgagtcgctgctggacatcgcggcgcgcagggtggcggagaagtggccgttccagcgcgtggaggagcgctttgagcgcatcccggagccggtgcagcgccgcatagtctattggtccttcccccgcagcgagcgggagatctgcatgtactcgtccttcaacaccggcggcggcgccgcgggcggccccggcgacgacagcggtggcggcggcggcgcgggcggcggcggcggcggcggctcctcgtcttccccggccgcaacctcggcggccgcaacctcggccgccgccgccgctgccgccgccgccgccgccgccgccgccgccgcgggggccggggccccgtcggtgggggctgccggggcggcggacggcggcgacgagacgcggctgcctttccgccggggcatcgcgctgttggaaagcggctgcgtagacaacgtcctgcaagtcggtttccacttgagcggcacagtgacagaacctgcaatacaatcggagccagaaactgtttgcaacgtggccatcagctttgatcgttgcaagattacctcagtgacctgcagctgtggaaacaaggacatattttattgtgcccatgttgtggcactgtctttataccgcatccgcaagccagatcaggtcaaactgcatcttcctatttcagagactctctttcaaatgaatagagaccaactgcaaaagtttgtacagtatttgatcacagtgcaccacacagaagttttgccaactgctcaaaaattagcagatgaaattctttcccaaaattcagaaatcaaccaagttcatggtgctcctgatccaacagcaggtgctagtatagatgatgaaaactgctggcacttagatgaagagcaggttcaagaacaggttaaactgttcctttcccagggcgggtaccacggatcagggaagcagcttaatttgctctttgcaaaggtgcgggagatgttaaagatgagggactccaatggggcccgcatgttgaccttgataacagagcaattcatggctgaccctcgcctgtcactttggcggcaacaaggcactgcaatgactgacaaatacaggcagctctgggatgagctgggtgctctgtggatgtgtatagttttaaacccccactgcaagttggagcaaaaggccagttggctaaaacagctgaagaaatggaatagtgttgatgtctgtccatgggaagatggaaatcatggcagtgaattacccaacttaaccaatgctctgcctcagggtgcaaatgccaaccaagattcatcgaacaggccacatcggacagtgttcacccgagccatcgaggcatgcgatctccactggcaggatagccacttgcagcacattatcagcagtgacctatacaccaactactgttaccatgacgacactgaaaactccctcttcgactcccgcgggtggcccctctggcatgaacatgttcctacagcctgtgcaagagtggacgcattacgttctcatgggtaccccagagaagcactgagactagcaatagctattgttaatacattaagacgacagcagcagaaacagttggaaatgttccgaacccaaaaaaaagagctaccccataaaaacataacctcgataaccaatctggagggctgggttggacatcccctggaccctgtgggcactctcttcagtagccttatggaagcctgccgcattgatgatgagaacctctctgggttctcagattttacagagaatatgggacagtgcaagtctctggaataccagcatctacctgcacacaaattcttagaagaaggggaatcctatttaacgctggctgtggaagtagccctgatagggctaggacagcagcgtatcatgcctgatgggctgtacacacaagagaaagtttgccggaatgaggagcagctcatttctaagcttcaggaaattgaattggatgacacactggtgaaaatttttcgcaagcaagcagtcttcctattagaagccggaccatatagtggtttaggtgaaataatccatcgggagagcgttccaatgcacacatttgccaagtatctcttcacctctctcctacctcacgatgctgaattggcatacaaaattgcactgagagcaatgcggttactagtattggaatctactgctccatcaggagacctcacccgcccacaccacattgcatcagttgttcccaaccgctaccctcgctggttcactctaagccacattgagtcccagcagtgtgagctggcatccaccatgctaactgcagccaaaggcgatgttcggaggctggaaacagtattagaatccatccagaaaaacattcactcctcatcacacatcttcaagcttgcccaagatgcatttaaaatagcaactctcatggacagtttgccagacatcactcttttgaaagtgtctctggagctgggcctgcaggttatgcgaatgacactgtcaaccttaaattggcgacggcgggagatggtgaggtggctggtaacgtgtgctactgaagtcggggtttatgccctggacagcatcatgcagacctggtttacactctttactcccaccgaggccacaagtatagttgcaactaccgtgatgtccaacagcaccatcgtccgcctccacctggactgccaccagcaggaaaagctggccagcagcgcccggacacttgcactgcagtgtgccatgaaggatccacagaactgtgccctctctgcgctaaccctttgtgaaaaggatcacatagcttttgagacggcgtaccaaattgttctcgacgctgctacgactggcatgagctatacacagctctttacaatagcacggtacatggagcaccgcgggtaccccatgagggcctacaagctggccaccctggccatgacccatctcaacctgagctacaatcaggacacacaccctgccattaatgatgttttgtgggcctgtgcgcttagccactcccttggtaaaaatgagcttgcagctataatacctctggtggtcaagagtgtcaagtgtgcaacggtactgtcagacattttgcgcagatgcactctgaccactcctggcatggtgggacttcatgggaggaggaactctggtaagctcatgtcactggacaaagcccccttgaggcaactcttggatgccacgatcggggcctacatcaacacaacgcactcacggctcacacacatcagtcctcggcactatagtgagtttatagagttcctcagcaaagcccgagagaccttcttaatggcgcatgatggacacattcagtttacacagtttattgacaacctgaaacaaatctacaaaggcaaaaagaaactgatgatgttggttcgggagaggtttggttgatagatcttgtatgaatggggtggggggtggggatgggagggatggtttgtttttacttgagcctgcctttgtaccctttttaacttaaagaacagagccacaccggtattatatgtgtatagttatattgcgtttgcagactaaattgtcatgttgtgaaagtttgtgtgttttttattttttccctatttctttctttcctttattttattattttttttaattttttttttctggttttgtatgagagagaggttaaaaaggtttggtttacactgagtatatgttgtcaagtggcaaaagtccacatagctctcctgttttctgtatacgttcacagcctcaaaaaaaataattgaaatggctttaaaaaccaaacaaaacacctccatcctgtgataagtacctcgaatggattcagctttactcctttgtaactcatctttacattttcagcatatttaaacaaaccaacaaaatgaaatactaatagtaaaaaggctgacccatgtggctttgcagtgctgttcgtccagaagcatggcacacgatgcttgtgcatgtggaaacttagcgactgtcaacatacattctcagggatttatccaaaaaaattaaaaaaagaatgagagcatttattgtactgtatatatattatagtatatgtctgaatattgaaaatataacattaactaatttataaaaaatattctatgtaatgcaaaatacttgaagctgcagtagcttggttttaaacaaaaacaaaaaaaaaactgagagaaaacctatcagaaggactaaaagtacgccttgcttcagggttggctcaggtggtgaacttcatgctgggcatctatgcagagccaccttttggattgcatggttggactgagatctattgggagaaattatatatgtatatatatttatacaacttatgtatacatatatatatgtatacacacagacacacacacacaccaccaacaaccaccactacaccacacatgcttataacaggcactagaataaagagggacaacaaaatacacagccagagcagcaagccttagcattaagaatatacaatatgccggaattggggttcgtgcctcctagcctaggaaacttaaaagaaatatccttttgacacaaaacacaaaatgttttccaaaacaattgacataatgatacattacgcctttgcagtgagctaataataagctaacctttgtgcacaaataacattatatatattatatatctattctgcataggtattttgactttgtgcaggacagaaagttgtgtaggtatgactgttctacttttcagttttctttttttttaatatattttattttctctagaaattactcaaacaaaagcagccttctatcttgccttgtcttaatgctttaaaataaccaaactggagatctaactaccaaactgttcattatattattaaataccaactttggttacagtatagtgtctttactttagctgatggttctgtaaccttgtgctttttaaagcaatttttatgttttggtgcaaaagttgtccagtgtctcttgttcccttcactagagaacatgcttagaggtatgtttgtaggtatttttgtttagaagaactatttcatgcgctccattttatttattataataggtaaaaagaaaaaaaaaggttgtaattcatcacccatgtaaacatgctcatgaagttgaaagtaattaagatttgatacactgatatcaatttatttatgtaactaaatcactgttttataaacttgttaatgatcaacaatttttgttttgattaaaattagttttttgaaagtt

SEQ ID NO: 206598 - protein, 957 aa, Artificial Sequence
  derived and/or modified sequence
MSLVSQNSRRRRRRVAKATAHNSSWGEMQAPNAPGLPADVPGSDVPQGPSDSQILQGLCASEGPSTSVLPTSAEGPSTFVPPTISEASSASGQPTISEGPGTSVLPTPSEGLSTSGPPTISKGLCTSVTLAASEGRNTSRPPTSSEEPSTSVPPTASEVPSTSLPPTPGEGTSTSVPPTAYEGPSTSVVPTPDEGPSTSVLPTPGEGPGTSVPLAATEGLSTSVQATPDEGPSTSVPPTATEGLSTPVPPTRDEGPSTSVPATPGEGPSTSVLPAASDGQSISLVPTRGKGSSTSVPPTATEGLSTSVQPTAGEGSSTSVPPTPGGGLSTSVPPTATEELSTSVPPTPGEGPSTSVLPIPGEGLSTSVPPTASDGSDTSVPPTPGEGASTLVQPTAPDGPGSSVLPNPGEGPSTLFSSSASVDRNPSKCSLVLPSPRVTKASVDSDSEGPKGAEGPIEFEVLRDCESPNSISIMGLNTSRVAITLKPQDPMEQNVAELLQFLLVKDQSKYPIRESEMREYIVKEYRNQFPEILRRAAAHLECIFRFELRELDPEAHTYILLNKLGPVPFEGLEESPNGPKMGLLMMILGQIFLNGNQAKEAEIWEMLWRMGVQRERRLSIFGNPKRLLSVEFVWQRYLDYRPVTDCKPVEYEFFWGPRSHLETTKMKILKFMAKIYNKDPMDWPEKYNEALEEDAARAFAEGWQALPHFRRPFFEEAAAEVPSPDSEVSSYSSKYAPHSWPESRLESKARKLVQLFLLMDSTKLPIPKKGILYYIGRECSKVFPDLLNRAARTLNHVYGTELVVLDPRNHSYTLYNRREMEETEEIVDSPNRPGNNFLMQVLSFIFIMGNHARESAVWAFLRGLGVQAGRKHVITCRYLSQRYIDSLRVPDSDPVQYEFVWGPRARLETSKMKALRYVARIHRKEPQDWPQQYREAMEDEANRADVGHRQIFVHNFR

SEQ ID NO: 206599 - DNA, 2874 bp, Artificial Sequence
  derived and/or modified sequence
atgtcattagtatcacagaatagccgccgcaggcggcgaagggtggccaaggccacggcgcataactccagctggggtgagatgcaggccccaaacgcaccaggcctgccggccgacgtgccgggtagtgacgtccctcaaggcccctccgacagccagattttacagggactgtgtgcctctgaaggaccctccacctcggtcctccctactagcgctgagggcccatctacctttgtccctccgaccattagcgaggcctcttccgccagcggacagccgacaatctcagaagggcccggcacctcggtgcttcctaccccctctgagggcctgtcaacctctggaccccccactatatctaagggtctctgtacttctgtcactctcgccgcatccgagggaagaaatacgtcaaggccgcccacaagttctgaggagccttcaacatcagtacctcctaccgcaagtgaagtgccaagtactagtctgcctccaactccaggggaggggactagtacaagcgtcccccctacagcatatgagggacccagtaccagcgtggtgcctacccccgacgaggggccatccacctccgtgctgcctacaccaggcgagggtccaggcaccagtgtcccgctggccgctactgagggcctgtccaccagtgtgcaggcaacccctgacgaggggccatcaacttcagtccccccgactgccaccgagggcctcagcacacccgtgccacctactcgcgatgaaggacccagtacctcagttcccgctactcccggcgaggggccgagcacttccgtgctgcccgcagcctccgatggccagtcaatatcactcgtccctacacgcggcaagggatccagtacttctgtaccacccacagcgaccgaaggactttctaccagcgtgcagcccacagccggggaaggtagctccacaagcgtcccaccgacacctgggggaggactgtcgacctcggttccacctaccgcgaccgaagaactgtcaacttccgtccctccaacacccggagaggggccttccacttcagtgttgcctatacccggagagggtctttccacatcagtgcccccaactgcctctgatggctcagacactagcgttccgcctaccccgggggagggtgcatctaccctggttcaacccactgctcctgacggccctggaagttccgtactccccaaccccggagaggggccaagcactttgttttccagctctgcgagcgttgaccgaaacccgtctaaatgctctctggttctgccttcccccagagtcactaaagcctctgtcgattccgactcagagggtccaaaaggcgccgagggtcccatcgaatttgaagtcctgcgggattgcgagtcgccgaactctatctccattatggggcttaacacaagcagggtagcaattactttaaagccccaagaccctatggaacaaaacgttgccgaattactgcagttcttgctggtaaaggatcagagtaaataccccattagggaatctgagatgcgggagtacatcgtgaaggaatacaggaaccaattcccagaaatcttacggagagccgcagcccaccttgagtgtatcttcaggtttgagctgagggagctagaccctgaagcacacacctatatactgctgaataaactcggccccgtgcctttcgaggggctggaggagagccccaacggcccaaagatgggtttactgatgatgattctaggacagatctttttaaacggaaaccaggccaaggaggccgagatttgggaaatgctctggaggatgggagtacagcgggaacgccgactgtccatttttggcaaccctaaaagactccttagtgtggaattcgtctggcaaagatatctcgattacaggcccgtgaccgactgtaaacccgttgaatacgaattcttctggggtccccgctcacacctggagacgaccaagatgaagatcttgaagttcatggcaaagatctacaataaggaccccatggattggcctgagaaatacaatgaggcgctcgaggaagatgccgcacgcgccttcgctgaggggtggcaggccctgccacacttccggcggccatttttcgaggaagctgctgcagaagtgcctagtcctgactccgaagtgagttcttactcctccaagtatgcgcctcacagttggccagaatccaggctggagtctaaggccaggaagttagttcaactgttcctgttaatggactctactaagctgcctatacccaaaaagggtattctgtactatattgggcgagagtgctccaaagtgttccctgacctgctgaatcgtgctgcccgcacccttaaccacgtgtacggaacagagttggtagtcctcgacccccgaaaccactcctacaccttatacaatcgcagggagatggaggaaaccgaggaaattgtggacagcccaaatagacccggcaacaatttcctcatgcaggtactgagtttcattttcatcatggggaaccatgctagggaatcagccgtctgggctttccttagaggactaggcgtacaagcgggaaggaagcatgttatcacatgccgatatctctcccagcgttacatcgattccctgcgtgtaccagatagcgatcccgtccagtatgagttcgtatggggaccccgggcacgactggagacatccaaaatgaaggcccttagatatgtcgcccgcatacatagaaaagagccacaggattggccccagcaatatcgcgaggccatggaagatgaggccaaccgcgccgacgtcgggcatagacagatcttcgttcacaactttcgttag

SEQ ID NO: 206600 - DNA, 2874 bp, Artificial Sequence
  derived and/or modified sequence
atgagcctggtgtcccagaacagcagaagaagaagaagaagagtggccaaggccacagcccacaacagctcctggggcgagatgcaggccccaaatgcccctggcctgcctgcagatgtgcccggcagtgatgtgccccagggccccagcgacagccagatcctgcagggcctgtgtgccagcgagggccccagcacctctgtgctgcccaccagcgctgagggccccagcacctttgtgccccccaccatcagcgaggccagcagcgccagcggccagcccaccatcagcgagggccctggcacctctgtgctgcccaccccatctgagggcctgagcaccagcggcccccccaccatcagcaagggcctgtgcacctctgtgaccctggccgccagcgagggcaggaacaccagcaggcctcccaccagcagcgaggagcccagcacctctgtgcccccaacagccagcgaggtgcccagcaccagcctgccccccaccccaggagagggcaccagcacctctgtgcccccaacagcctatgagggccccagcacctctgtggtgcccaccccagatgagggccccagcacctctgtgctgcccaccccaggagagggccctggcacctctgtgcccctggccgccacagagggcctgagcacctctgtgcaggccaccccagatgagggccccagcacctctgtgcccccaacagccacagagggcctgagcacccctgtgccccccaccagagatgagggccccagcacctctgtgcctgccaccccaggagagggccccagcacctctgtgctgcctgctgccagtgatggccagagcatcagcctggtgcccacccggggcaagggcagcagcacctctgtgcccccaacagccacagagggcctgagcacctctgtgcagcccacagctggggagggcagcagcacctctgtgccccccacccctgggggcggcctgagcacctctgtgcccccaacagccacagaggagctgagcacctctgtgccccccaccccaggagagggccccagcacctctgtgctgcccatccctggagagggcctgagcacctctgtgcccccaacagccagtgatggcagtgacacctctgtgccccccaccccaggagagggcgccagcaccctggtgcagcccacagccccagatggccctggcagctctgtgctgcccaaccctggagagggccccagcaccctcttcagcagcagcgcctctgtggacaggaaccccagcaagtgcagcctggtgctgcccagcccccgggtgaccaaggcctctgtggacagcgacagcgagggccccaagggagctgagggccccattgaatttgaggtgctgcgggactgtgagagccccaacagcatcagcatcatgggcctgaacaccagccgggtggccatcaccctgaagccccaggaccccatggagcagaatgtggccgagctgctgcagttcctgctggtgaaggaccagagcaagtaccccatccgggagagcgagatgagggagtacatcgtgaaggagtacagaaaccagtttcctgagatcctgcggcgggctgctgcccacctggagtgcatcttccgctttgagctgcgggagctggaccctgaggcccacacctacatcctgctgaacaagctgggccctgtgccctttgagggcctggaggagagccccaacggccccaagatgggcctgctgatgatgatcctgggccagatcttcctgaatggaaaccaggccaaggaggccgagatctgggagatgctgtggaggatgggcgtgcagcgggagcggcggctgagcatctttggaaaccccaagaggctgctgtctgtggagtttgtgtggcagcgctacctggactacagacctgtgacagactgcaagcctgtggagtatgagttcttctggggccccaggagccacctggagaccaccaagatgaagatcctgaagttcatggccaagatctacaacaaggaccccatggactggccagagaagtacaatgaggccctggaggaggatgctgcccgggcctttgctgagggctggcaggccctgccccacttccggcggcccttctttgaggaggccgctgctgaggtgcccagcccagacagcgaggtgagcagctacagcagcaaatatgccccccacagctggccagagagccggctggagagcaaggccaggaagctggtgcagctgttcctgctgatggacagcaccaagctgcccatccccaagaagggcatcctgtactacatcggccgggagtgcagcaaggtgtttcctgacctgctgaacagagctgcccggaccctgaaccacgtgtatggaacagagctggtggtgctggaccccaggaaccacagctacaccctgtacaacagaagagagatggaggagacagaggagatcgtggacagccccaacagacctggcaacaacttcctgatgcaggtgctgtccttcatcttcatcatgggcaaccacgcccgggagagcgctgtgtgggccttcctgcggggcctgggcgtgcaggccggcaggaagcacgtgatcacctgccgctacctgagccagcgctacatcgacagcctgcgggtgcctgacagcgaccctgtgcagtatgaatttgtgtggggcccccgggcccggctggagaccagcaagatgaaggccctgcgctacgtggcccgcatccacaggaaggagccccaggactggccccagcagtaccgggaggccatggaggatgaggccaacagagcagatgtgggccaccggcagatctttgtgcacaacttcagatag

SEQ ID NO: 206601 - DNA, 3699 bp, Artificial Sequence
  derived and/or modified sequence
agagccagtctgcgcctgcgcggactgcggcagagggcggggtgtgagaagcagagtacagtgagactagcattcactgctggccagtgcctgcctttttcaccacctctaatttcagcttcagcagttgcttggaactttggttctggcagcagcagcaacatcattaccgctagcggcagttttgtgccgaggcacctacacacctcccgtcctctctgccagatcgcgggcctgtcggtgtctgctcctacacgccaacgccggtgggcaggaccatgtctctggtaagccagaattcgcgccgccgccgccgccgcgttgcaaaggctactgcgcacaacagcagctggggcgaaatgcaggcccctaatgcccccggtctccccgctgatgtgccaggctcagacgtcccccagggtcccagcgattcccagatcctccagggcctctgcgcctctgagggcccaagcacctccgttctgcccacctccgctgagggcccaagcacctttgtgccgcccaccatctctgaggcctcaagcgcctccgggcagcccaccatctctgagggacctggcacctccgtgctgcccacccccagtgagggcctaagcacctccgggcctcccaccatctctaaggggctgtgcacctctgtgacgcttgccgcctctgagggccggaacacctccaggccgcccacttcctctgaggaacctagcacctccgtgccgcccaccgcctctgaggtaccgagcacctccctgccgcccacccctggtgagggaacgagcacctccgtgccgcccacagcctatgagggaccaagcacctccgtggtgcccacccctgatgagggaccaagcacctccgtgctgcctacacctggtgagggaccaggcacctccgtgccgctcgccgccactgagggcctgagcacctccgtgcaggccactcctgatgagggaccgagcacctccgtgccgcccaccgccactgagggcctaagcacccccgtgccacccacccgtgatgagggaccgagcacctccgtgccggccactcctggtgagggaccgagcacctccgtgctgcccgccgcctctgacggacaaagcatctccttggtgcccacccgcggtaagggatcaagcacctccgtgccccccaccgccaccgagggcctgagcacctccgtgcagcccactgctggtgagggatcgagcacctccgtgccgcccacccctggtgggggactgagcacctccgtgccgcccaccgccactgaggagttgagcacctccgtgccgcccactcccggtgagggaccaagcacttccgtactgccaatccccggtgagggactgagcacctctgtgccgcccaccgcctctgatggatcggacacctccgtgccgcccactcctggtgagggcgcaagcaccttagtgcagcccaccgcccctgacggaccgggaagctccgtgctgcctaaccctggtgagggcccgagcacattgtttagctctagtgcttctgtggaccggaacccctccaagtgttcccttgttttgccaagccctagggtaaccaaggcctccgtggactcagattctgagggtcctaagggtgcagaaggccctatagaattcgaggtcctgagagactgtgagagccccaactccattagtattatgggcctcaatacttcccgggttgcaattaccctgaagccccaagaccctatggaacagaacgtagctgagctgttgcagttcctgctggtgaaggatcagagcaagtaccctatccgggagtctgaaatgcgggaatatattgttaaagaatatcgcaaccagtttcctgagatactcaggcgagcagcagcccacctggagtgcatttttaggtttgaattgagagaacttgaccctgaggcacacacctacattctgttaaacaaactgggacctgtgccctttgaagggttagaagagagcccaaatgggccaaagatgggcctcctgatgatgattctaggccaaatattcctgaatggcaaccaagccaaggaggctgagatttgggaaatgctctggaggatgggggtgcagcgggaaaggaggctttccatttttgggaacccaaagagacttctgtctgtggagtttgtatggcagcgttacttagactacaggccagtaactgactgtaaaccagtggagtatgagtttttctggggcccaagatcccacctagaaaccaccaagatgaaaattctgaagttcatggcgaaaatatataacaaagatcctatggattggccagagaaatacaacgaagctctggaagaagatgctgccagagcctttgctgagggttggcaggctctccctcactttaggaggcccttttttgaggaagctgctgcagaggtaccatcccctgattcagaggtttccagctattcctcaaaatatgccccacattcatggcctgagtcaagattggagagcaaggcaaggaagctggtgcagttatttctgcttatggattcaactaagctgcctataccaaagaaaggaattctgtactacattggccgagagtgcagcaaagtgttccctgacctcctgaatcgtgctgcccgcaccctgaaccatgtctatgggacagaactagtggtacttgatcccaggaatcactcctatactctgtacaaccgaagggagatggaagaaactgaggagatcgtagacagtccaaacaggcctggcaacaactttttgatgcaggtcctaagcttcatctttattatgggcaaccatgccagggagtctgcagtctgggcctttctgcggggcttaggggttcaagctgggagaaagcatgtgattacctgcagatacttgagtcagcgctatatagacagtttacgggttcctgacagtgatccagtgcaatatgagtttgtatggggtcctagagcccgtttggaaacctctaagatgaaagccttgcgatatgtggccagaatccacagaaaggaaccacaggactggccacagcagtacagggaggcaatggaagatgaggccaatagagctgatgttgggcacaggcaaatctttgttcacaacttcaggtagaggaatgcatggcagtcagaggggccttgcaaggaggggcctttgagcctcagttctcatgtattggggggtgggggtgggtacatattgtatttggtatttgtgttccagttatatttatgtcttttcatatttagttctggtgtggtgtctggaaatgtttcaactgttttaatatattgtctgattgggtaaatgtgattgaccacttgctgtctctgttgtattttggtatgagttttgatagctctataaaatgttttggaaatctttccatcttgttgcattatctagaaaagaatatagcatatagctatagatataggcttttccttgaaagcttgaaaaaaattcgccagtaaaataatctagcttaaagtgataaactaacaaacaaatataacaacaactgaaaaggcactctaaattgtggctggcttccctttctgtctgctattgtatgaagaatactgatgtttacctgtatttgctttgctgtactaaaatgtaatgaaaaataaaagattaataaatgaaacataatgct

SEQ ID NO: 206602 - DNA, 2874 bp, Artificial Sequence
  derived and/or modified sequence
atgagcctggtgagccagaacagccggcggcggcggcggcgggtggcaaaggctacggctcacaacagctcttggggagagatgcaagcaccaaacgcacccgggctgcccgccgatgtgcctgggtctgacgtgcctcagggaccaagcgactcccagatcctccagggactgtgcgcttccgaggggccttcaacctcagtcctgccaacatctgcagagggacctagcacatttgtgcccccaaccataagtgaggcgtcaagcgccagtggccagcccacaattagcgaagggccgggcaccagtgtattacctacccccagcgaaggattgtccacaagtgggcctcccactatcagcaagggtttgtgtacctctgtcactctggcagctagcgaaggccggaataccagtcgcccccccacgagttccgaggagccttctacctccgtgcctcccacagcgagcgaggtcccatctacaagtcttccccccacacctggggaaggcacatcaacctctgtgcccccgacagcttatgagggcccctcaacttcagtagttccaactcctgatgagggaccaagcactagtgttttgccaaccccaggagaagggccgggcacctcagtgcctttggccgcaactgagggactttcaacatcagttcaggcaaccccggatgaggggccctctacaagcgtacccccaacagctaccgagggccttagtactccagtgccccccacaagggatgaaggtccctcaacttctgtgcccgctactcctggtgagggaccaagcacgtcagttttgcctgcagcctcggatggtcagtccataagtctggttccaactcgcggtaagggaagtagtacaagtgtgccccctacagccactgaaggactatctactagtgtgcagccgaccgcgggtgaggggagcagcacaagcgtgccaccgacccccggtgggggactgtccacctccgtcccccccacggctactgaggagctgagcacctccgtcccccccacacccggggaaggacctagtacttcggtgttgccaatcccaggtgagggactctcgacatccgttccccctaccgcttcagatggcagcgataccagtgtgcctcctacacccggggaaggtgcgtcgacgctggtgcaaccgacagcacccgacggcccaggctccagtgtcctgccaaatcccggtgagggccctagtacattgttttcttcttccgccagcgtggatcggaaccctagcaaatgctccctggtgctgccaagtcccagagtgaccaaggcctccgtggattcggactctgagggcccgaaaggggctgaggggccaattgaatttgaggtacttcgggactgcgagagccctaattccatcagtatcatgggcctgaataccagtcgggtcgccatcactctcaaacctcaggaccccatggagcagaacgttgcggagctcttgcaattcctgctggtgaaagaccaatcaaaataccccatcagggagtccgaaatgcgtgagtacatcgtgaaggagtatcggaatcagttcccggagatcttacggagagcagcagcccacctcgagtgcattttccgcttcgagctgagggaactggatccagaggcccatacctacatcctcctcaataaattgggtcctgtcccattcgaaggactcgaagaaagcccgaacgggccaaaaatgggattgttgatgatgattttgggacagatcttcttgaacggtaaccaggccaaagaagctgaaatatgggaaatgctgtggcgtatgggcgttcagcgcgaaaggaggttaagtattttcggcaacccaaaacgcttgctcagcgtagagtttgtgtggcagcggtatctagattacagacctgtcactgattgcaagcccgtggagtacgagttcttctggggtccgcgatctcacctggagacgacaaagatgaaaatactcaaatttatggccaagatttataacaaagatccaatggactggccggagaagtacaatgaggcccttgaggaggacgctgcgagagcatttgcggagggatggcaagcgctgccccactttaggagacctttctttgaggaggctgccgctgaggtcccctctcccgactcagaagtttcctcttatagttcaaaatatgccccgcactcatggccagagtccagattggagagtaaggctcgcaaattggttcaactcttcctcctgatggatagtactaagctacctatccctaaaaagggcatcctctattatattggaagagagtgctccaaagtatttccggacctgcttaaccgcgctgcgagaaccctaaaccatgtttatggaacagaactagtcgtcttagaccctcgcaaccattcctacacgctctataatcgccgcgaaatggaagagactgaagaaatagttgatagccctaaccggcccggcaataactttctgatgcaagtactgagttttatcttcatcatgggcaatcatgcccgagaatccgcagtttgggcattcctgcgggggctgggagtccaggcaggccggaaacatgtaattacctgtagatacctgtctcagcgttatatcgatagcctgagagtgcccgactcggacccagttcagtacgaattcgtatggggtccccgtgctaggttggagacgagtaaaatgaaggcgctgaggtacgtggcccgcatccatagaaaggaacctcaggactggccccagcagtatcgcgaagcgatggaggatgaagcgaatcgtgccgacgtcggccatagacagatctttgttcacaacttcagatag

SEQ ID NO: 206603 - DNA, 2874 bp, Artificial Sequence
  derived and/or modified sequence
atgtccctggtgtctcaaaactcgagacgtagaagacgcagggtcgctaaggccactgctcacaatagctcctggggggagatgcaggcgccaaacgcccctggtcttccagccgacgtgcctggttcagacgtgccacagggacctagtgactcgcagattctccaggggttatgcgcatccgaggggccaagtacttcagtgttaccaacgtccgccgaaggaccttctacttttgtaccaccaactatctcagaggcttcttcggctagtgggcaaccgacaatcagcgaaggcccagggacgtcagtcctgccaacaccctctgaaggactctcaacgtctgggccacccacaataagcaaaggcttgtgtactagtgttacactagcagcttccgaaggaaggaacacaagtcgcccacccacgtcatctgaggagccctccacttcagttcctcctacggcctcagaggtgcctagcacgagtctcccccctactcccggtgaaggcacaagtacatcagtgcctcccacggcatatgaaggtccttccactagcgtggtgcctaccccagacgaaggccctagtactagtgtcctgccaactccaggcgagggtcccggaacaagtgtgccccttgccgctacagagggactctctacatctgtccaggccacacctgacgagggcccatcaactagcgtgccccctaccgccacggaaggtctaagtacacccgtcccacctacacgggatgagggaccctccacttccgtccctgcaaccccgggagagggaccaagcaccagcgtcttaccagccgcatctgatggtcagtccatcagcttggtgcctacccgaggaaaaggctcttctacatccgtgccaccgaccgccacagagggtctcagtacctcggtacagcccaccgcaggggagggcagtagtaccagtgtgccaccaacccctgggggaggcctgtccaccagcgtgccacccactgccacagaggagttgagcacgagtgtaccgcctacgccaggggaaggcccttctaccagtgtgcttcccatcccaggggaagggttatctaccagcgtgccaccaaccgcctctgacggatctgacacttccgtgccacctacaccaggtgagggcgctagcacactcgtacagcccaccgcacccgatgggcctggatcctcagttctgcctaacccaggagaggggcctagcactcttttctctagcagtgcatccgtggacagaaacccgagcaagtgttctctggttctaccgtctcctcgcgtgaccaaagcttccgtggacagcgatagtgagggacccaagggcgcagagggacccatagaattcgaggtgctcagagactgtgaatcacctaactcaatctccataatgggcctcaatacaagccgagtggcgattaccctcaaaccccaagacccaatggagcagaatgtcgcggagcttctgcagtttctgctggtgaaagaccaaagcaagtatccaattcgtgaatccgagatgcgcgagtatatagtgaaagaatacaggaaccagtttcctgagatacttcgcagggctgccgcacatctcgagtgtatattcaggttcgaacttcgggaattggatcccgaggcacatacttatattctactcaacaagctgggtccggtgccattcgaagggctcgaggagtcccccaatgggccaaaaatgggccttctaatgatgattctcggccagatctttcttaacggcaatcaggcaaaagaagcagaaatatgggagatgttatggcgtatgggagtgcagcgtgaacggcgactcagcatctttggcaatccaaaaagattgttaagtgtggagtttgtgtggcagcgatatctcgattacaggccagtgaccgattgcaagccagttgagtacgagttcttttggggaccacggtcccatctcgaaactaccaaaatgaagattctgaagttcatggccaagatttacaataaagacccaatggactggcccgaaaaatataatgaggctctcgaggaagatgccgctagagcctttgccgaaggatggcaggctttgccccattttcgccgtccttttttcgaagaggcagctgccgaggtgcccagtcccgacagcgaagtttcttcctactccagcaagtatgctccacactcctggcctgagtcacggctagaaagcaaagcacgcaaactggttcaattgtttctgcttatggactccaccaagcttccaatccctaagaaggggatactttactacattgggcgagaatgcagcaaagtatttcctgatcttcttaacagggcggctcgtacactcaatcacgtctatggaacggagttagtggtcctcgatcctagaaaccacagttatacgctgtacaaccgcagagaaatggaggagactgaggagatcgtggattctcccaaccggcctggaaataatttcctaatgcaggttttatcttttatcttcatcatggggaatcatgcccgagaaagtgctgtgtgggcattcttgaggggcctcggcgtacaggccggtcggaaacacgtgatcacctgcaggtatttgtcccagcggtatattgattctctgcgggtgcccgacagtgacccagtgcaatacgaatttgtctggggtccacgcgctcgactagaaacctccaaaatgaaagcgctcagatacgttgcccgaattcatagaaaggagccacaggattggccccagcagtatcgggaggccatggaagacgaggctaacagggcagatgtgggacatcgccagatcttcgttcacaacttcaggtag

SEQ ID NO: 206604 - DNA, 2874 bp, Artificial Sequence
  derived and/or modified sequence
atgagcctggtgagccagaacagcagaagaagaagaagaagagtggccaaggccaccgcccacaacagcagctggggcgagatgcaggcccccaacgcccccggcctgcccgccgacgtgcccggcagcgacgtgccccagggccccagcgacagccagatcctgcagggcctgtgcgccagcgagggccccagcaccagcgtgctgcccaccagcgccgagggccccagcaccttcgtgccccccaccatcagcgaggccagcagcgccagcggccagcccaccatcagcgagggccccggcaccagcgtgctgcccacccccagcgagggcctgagcaccagcggcccccccaccatcagcaagggcctgtgcaccagcgtgaccctggccgccagcgagggcagaaacaccagcagaccccccaccagcagcgaggagcccagcaccagcgtgccccccaccgccagcgaggtgcccagcaccagcctgccccccacccccggcgagggcaccagcaccagcgtgccccccaccgcctacgagggccccagcaccagcgtggtgcccacccccgacgagggccccagcaccagcgtgctgcccacccccggcgagggccccggcaccagcgtgcccctggccgccaccgagggcctgagcaccagcgtgcaggccacccccgacgagggccccagcaccagcgtgccccccaccgccaccgagggcctgagcacccccgtgccccccaccagagacgagggccccagcaccagcgtgcccgccacccccggcgagggccccagcaccagcgtgctgcccgccgccagcgacggccagagcatcagcctggtgcccaccagaggcaagggcagcagcaccagcgtgccccccaccgccaccgagggcctgagcaccagcgtgcagcccaccgccggcgagggcagcagcaccagcgtgccccccacccccggcggcggcctgagcaccagcgtgccccccaccgccaccgaggagctgagcaccagcgtgccccccacccccggcgagggccccagcaccagcgtgctgcccatccccggcgagggcctgagcaccagcgtgccccccaccgccagcgacggcagcgacaccagcgtgccccccacccccggcgagggcgccagcaccctggtgcagcccaccgcccccgacggccccggcagcagcgtgctgcccaaccccggcgagggccccagcaccctgttcagcagcagcgccagcgtggacagaaaccccagcaagtgcagcctggtgctgcccagccccagagtgaccaaggccagcgtggacagcgacagcgagggccccaagggcgccgagggccccatcgagttcgaggtgctgagagactgcgagagccccaacagcatcagcatcatgggcctgaacaccagcagagtggccatcaccctgaagccccaggaccccatggagcagaacgtggccgagctgctgcagttcctgctggtgaaggaccagagcaagtaccccatcagagagagcgagatgagagagtacatcgtgaaggagtacagaaaccagttccccgagatcctgagaagagccgccgcccacctggagtgcatcttcagattcgagctgagagagctggaccccgaggcccacacctacatcctgctgaacaagctgggccccgtgcccttcgagggcctggaggagagccccaacggccccaagatgggcctgctgatgatgatcctgggccagatcttcctgaacggcaaccaggccaaggaggccgagatctgggagatgctgtggagaatgggcgtgcagagagagagaagactgagcatcttcggcaaccccaagagactgctgagcgtggagttcgtgtggcagagatacctggactacagacccgtgaccgactgcaagcccgtggagtacgagttcttctggggccccagaagccacctggagaccaccaagatgaagatcctgaagttcatggccaagatctacaacaaggaccccatggactggcccgagaagtacaacgaggccctggaggaggacgccgccagagccttcgccgagggctggcaggccctgccccacttcagaagacccttcttcgaggaggccgccgccgaggtgcccagccccgacagcgaggtgagcagctacagcagcaagtacgccccccacagctggcccgagagcagactggagagcaaggccagaaagctggtgcagctgttcctgctgatggacagcaccaagctgcccatccccaagaagggcatcctgtactacatcggcagagagtgcagcaaggtgttccccgacctgctgaacagagccgccagaaccctgaaccacgtgtacggcaccgagctggtggtgctggaccccagaaaccacagctacaccctgtacaacagaagagagatggaggagaccgaggagatcgtggacagccccaacagacccggcaacaacttcctgatgcaggtgctgagcttcatcttcatcatgggcaaccacgccagagagagcgccgtgtgggccttcctgagaggcctgggcgtgcaggccggcagaaagcacgtgatcacctgcagatacctgagccagagatacatcgacagcctgagagtgcccgacagcgaccccgtgcagtacgagttcgtgtggggccccagagccagactggagaccagcaagatgaaggccctgagatacgtggccagaatccacagaaaggagccccaggactggccccagcagtacagagaggccatggaggacgaggccaacagagccgacgtgggccacagacagatcttcgtgcacaacttcagatag

SEQ ID NO: 206605 - protein, 2048 aa, Artificial Sequence
  derived and/or modified sequence
MSGRQRTLFQTWGSSISRSSGTPGCSSGTERPQSPGSSKAPLPAAAEAQLESDDDVLLVAAYEAERQLCLENGGFCTSAGALWIYPTNCPVRDYQLHISRAALFCNTLVCLPTGLGKTFIAAVVMYNFYRWFPSGKVVFMAPTKPLVTQQIEACYQVMGIPQSHMAEMTGSTQASTRKEIWCSKRVLFLTPQVMVNDLSRGACPAAEIKCLVIDEAHKALGNYAYCQVVRELVKYTNHFRILALSATPGSDIKAVQQVITNLLIGQIELRSEDSPDILTYSHERKVEKLIVPLGEELAAIQKTYIQILESFARSLIQRNVLMRRDIPNLTKYQIILARDQFRKNPSPNIVGIQQGIIEGEFAICISLYHGYELLQQMGMRSLYFFLCGIMDGTKGMTRSKNELGRNEDFMKLYNHLECMFARTRSTSANGISAIQQGDKNKKFVYSHPKLKKLEEVVIEHFKSWNAENTTEKKRDETRVMIFSSFRDSVQEIAEMLSQHQPIIRVMTFVGHASGKSTKGFTQKEQLEVVKQFRDGGYNTLVSTCVGEEGLDIGEVDLIICFDSQKSPIRLVQRMGRTGRKRQGRIVIILSEGREERIYNQSQSNKRSIYKAISSNRQVLHFYQRSPRMVPDGINPKLHKMFITHGVYEPEKPSRNLQRKSSIFSYRDGMRQSSLKKDWFLSEEEFKLWNRLYRLRDSDEIKEITLPQVQFSSLQNEENKPAQESTTGIHQLSLSEWRLWQDHPLPTHQVDHSDRCRHFIGLMQMIEGMRHEEGECSYELEVESYLQMEDVTSTFIAPRNESNNLASDTFITHKKSSFIKNINQGSSSSVIESDEECAEIVKQTHIKPTKIVSLKKKVSKEIKKDQLKKENNHGIIDSVDNDRNSTVENIFQEDLPNDKRTSDTDEIAATCTINENVIKEPCVLLTECQFTNKSTSSLAGNVLDSGYNSFNDEKSVSSNLFLPFEEELYIVRTDDQFYNCHSLTKEVLANVERFLSYSPPPLSGLSDLEYEIAKGTALENLLFLPCAEHLRSDKCTCLLSHSAVNSQQNLELNSLKCINYPSEKSCLYDIPNDNISDEPSLCDCDVHKHNQNENLVPNNRVQIHRSPAQNLVGENNHDVDNSDLPVLSTDQDESLLLFEDVNTEFDDVSLSPLNSKSESLPVSDKTAISETPLVSQFLISDELLLDNNSELQDQITRDANSFKSRDQRGVQEEKVKNHEDIFDCSRDLFSVTFDLGFCSPDSDDEILEHTSDSNRPLDDLYGRYLEIKEISDANYVSNQALIPRDHSKNFTSGTVIIPSNEDMQNPNYVHLPLSAAKNEELLSPGYSQFSLPVQKKVMSTPLSKSNTLNSFSKIRKEILKTPDSSKEKVNLQRFKEALNSTFDYSEFSLEKSKSSGPMYLHKSCHSVEDGQLLTSNESEDDEIFRRKVKRAKGNVLNSPEDQKNSEVDSPLHAVKKRRFPINRSELSSSDESENFPKPCSQLEDFKVCNGNARRGIKVPKRQSHLKHVARKFLDDEAELSEEDAEYVSSDENDESENEQDSSLLDFLNDETQLSQAINDSEMRAIYMKSLRSPMMNNKYKMIHKTHKNINIFSQIPEQDETYLEDSFCVDEEESCKGQSSEEEVCVDFNLITDDCFANSKKYKTRRAVMLKEMMEQNCAHSKKKLSRIILPDDSSEEENNVNDKRESNIAVNPSTVKKNKQQDHCLNSVPSGSSAQSKVRSTPRVNPLAKQSKQTSLNLKDTISEVSDFKPQNHNEVQSTTPPFTTVDSQKDCRKFPVPQKDGSALEDSSTSGASCSKSRPHLAGTHTSLRLPQEGKGTCILVGGHEITSGLEVISSLRAIHGLQVEVCPLNGCDYIVSNRMVVERRSQSEMLNSVNKNKFIEQIQHLQSMFERICVIVEKDREKTGDTSRMFRRTKSYDSLLTTLIGAGIRILFSSCQEETADLLKELSLVEQRKNVGIHVPTVVNSNKSEALQFYLSIPNISYITALNMCHQFSSVKRMANSSLQEISMYAQVTHQKAEEIYRYIHYVFDIQMLPNDLNQDRLKSDI

SEQ ID NO: 206606 - DNA, 7111 bp, Artificial Sequence
  derived and/or modified sequence
ggaaaccgatggggatcggaaccgtagcggttgagctgctgctgctacggatatctgacagaagccttcggtggttgtcggcctaatgagcggacggcaaagaacgctttttcagacgtggggctcaagtatctcccgatcatctgggactccgggttgcagctccggaactgagcgacctcagagccctggcagctccaaggcgcctttgccagcagcagcggaggctcagctggagtcggacgatgatgtgttgcttgtcgcggcgtacgaggctgagcggcagttgtgtctagagaatggcgggttctgcacctccgcgggcgccctgtggatttaccctaccaattgcccagtgcgggactaccagctgcacatttcccgggctgctctgttttgcaatacgctggtgtgtctgcctaccggactgggaaagacctttattgccgccgtggtcatgtacaatttctaccgctggttcccttcaggaaaggtggtcttcatggccccaacgaaacccttggtgacacagcagatcgaggcttgctaccaggtgatgggtatcccgcaatcccacatggccgaaatgacagggtctacacaagcttccaccaggaaggaaatatggtgcagtaagagagtgctttttcttacacctcaggtcatggtaaatgacctttctagaggagcttgtcccgctgctgaaataaagtgtttagttattgatgaagctcataaagctctcggaaactatgcttattgccaggttgtaagagaactagtcaaatatacaaatcactttagaatcttggctctaagtgccacaccaggtagtgatataaaggctgtgcaacaagttattactaacctgctaattgggcagatagagcttcgttctgaagattctccagatattttgacatattctcatgaaagaaaagttgaaaagcttattgttccgcttggtgaagaacttgcagccatccaaaagacctatatccagattttggaatcatttgctcgttctttgattcagaggaatgttttgatgagaagggatatcccaaatctaacaaaatatcagataattctggcaagagatcagtttaggaaaaacccatctccgaatattgtgggaatacaacaaggcataatcgagggagagtttgctatttgtattagtttatatcatggttatgaattattgcagcaaatgggaatgagatcattatatttcttcctttgtggaattatggatggaactaaagggatgacacggtcaaaaaatgaacttggccgaaatgaagacttcatgaaactctataatcatctagagtgtatgtttgcacgtacacgtagtacttcagcaaatggtatttctgctatccaacaaggagataaaaataaaaaatttgtttatagtcatccaaagttaaagaaattagaagaagttgtaattgaacacttcaagtcatggaatgctgaaaacactactgaaaagaaacgtgatgagacccgagttatgatcttctcttcatttcgagatagtgttcaagaaattgcagaaatgctttcacagcatcagccaattattagagtaatgacttttgtcggccatgcctcagggaaaagcacgaagggttttacccagaaggagcaactggaggtagtgaaacagtttcgtgacggtggttacaacacgctggtttctacctgtgtgggtgaagaaggtttggatataggagaagttgatcttataatatgttttgattcccagaagagcccaattcgtcttgtacaacgaatgggtagaactggccgtaaacgtcaaggcaggatagttattatcctttctgaaggacgagaggaacgtatttataatcagagtcagtccaacaaaagaagtatatataaagctatttcaagtaacaggcaggtccttcatttttaccaaagaagtccacgaatggttcctgatggaatcaacccaaaattacacaaaatgttcatcacacatggtgtctatgaaccagagaagccttctcggaacttgcagcgaaagtcatctatcttttcctatagggatggaatgaggcaaagtagcctaaagaaagattggttcttatcagaagaagaatttaaattatggaacagactttatagattaagggacagtgatgaaattaaagagataacattgcctcaagttcagttttcttctttacaaaatgaggaaaacaaaccagctcaagaatcaaccactggaattcatcaactctctctctctgaatggagactgtggcaagatcatcctttgcctacacatcaagttgatcactcagatcgatgccgccattttataggccttatgcaaatgatagagggaatgagacacgaagagggagaatgcagctatgaattggaagttgaatcttatttacaaatggaagatgttacctcaacatttattgctcccaggaatgaatctaataatcttgccagtgacacctttatcactcacaagaaatcgtcatttataaagaacataaatcaaggcagttcatcctcagtgatagaatctgatgaagaatgtgctgaaattgttaaacaaactcatatcaaacctactaaaattgtttctttaaagaaaaaagtgtctaaagaaataaaaaaagatcagcttaaaaaagaaaataatcacggtattatagattctgtagataatgacagaaattccactgttgaaaatatttttcaagaagacctaccaaatgataaaaggacatcagatacagatgaaattgctgccacatgtactattaatgaaaatgttattaaagaaccgtgtgtgttattaacagagtgtcagtttacaaataaatccactagttcacttgctggaaatgttttagattctggttataacagtttcaatgatgaaaaatctgtttcatctaacttatttcttccattcgaagaagagctttatattgttagaacagatgaccaattttataattgtcactcattgacaaaagaggtactagctaatgtagagagatttttatcttattctcctccgcctctcagtggactctcagacttggaatatgaaattgctaagggtactgcacttgagaatttgcttttcttaccctgtgcagagcatttacgaagtgataaatgcacctgtttgctgtcacattcagctgtgaattctcaacagaatttagaattgaattcacttaaatgtataaattatccatctgaaaaaagttgcctttatgatatacctaatgataatatttctgatgagccaagtctctgtgactgtgatgtacataaacataatcaaaatgaaaatttagtacctaacaatcgtgttcaaatacacagaagccctgcacagaatttagttggagagaacaatcatgatgttgataacagtgacctcccagtattgtccactgatcaagatgaaagtttgctgttatttgaagatgttaatacagagttcgacgatgtgagtctttcacccttgaacagtaaaagcgaatctttacctgtgtcagacaaaactgctattagtgaaacgcctctggtctctcagttcttaatttctgatgaacttttgttggacaataattctgaactccaagatcaaatcacccgtgatgctaatagttttaaatctcgtgatcagagaggtgtacaggaagaaaaagtgaagaatcatgaggatatttttgattgctctagggatttattttctgttacctttgatttaggattctgtagtccagattctgatgatgaaatattggaacatacatcagatagcaatagacctctagatgatctatatggaaggtatttggaaattaaggagataagtgatgcaaattatgtttcgaatcaagcactaataccaagagatcatagtaaaaattttactagtggaactgttattatcccatcaaatgaagatatgcagaatccaaattatgtacatttgccactgagtgcagcaaaaaatgaagaattgttatctcctggttattctcagttttctttaccagtgcaaaaaaaagttatgagtacaccactctctaaatcaaacacattgaactcattttctaagataagaaaggaaatacttaagacaccagattctagtaaggaaaaagtaaacctacaaagattcaaagaagcattgaattcaacttttgattattcagaattttctctagaaaagtctaaaagcagtggtccaatgtatctgcataaatcctgtcattctgttgaagatggacaattattaacaagtaacgaaagtgaagatgacgagattttccgaagaaaagttaaaagagcaaaaggaaatgttttaaactctcctgaggatcagaaaaatagtgaagttgattctccacttcatgctgtcaaaaagcgcagatttcctataaacagatcagaattatcatctagtgatgagagtgagaattttcccaaaccatgttcacaattagaagacttcaaggtttgtaacgggaatgccagaagaggcatcaaagtcccaaagagacagagtcacttaaagcatgtagctaggaagtttttagatgatgaagcagaactttctgaagaagatgcagaatatgtttcatcagatgaaaatgatgagtcagaaaatgaacaagattcctcattacttgactttttaaatgatgaaactcaactttcacaggctataaatgattctgaaatgagagctatttacatgaaatctttgcgtagtccaatgatgaacaataagtacaaaatgattcataagacacataaaaacataaacattttctcgcagattcctgaacaagatgaaacctatttagaggatagtttttgtgttgatgaagaggagtcttgcaaaggccaatcaagtgaagaagaagtttgtgttgattttaacttaataactgatgattgctttgcaaatagtaaaaagtataaaactcgacgtgcagtaatgctaaaagaaatgatggaacaaaattgtgcacattcaaaaaagaaattatccagaattattttaccagatgattcaagtgaggaggagaacaatgtaaatgataaaagagaatctaatattgcggttaacccaagcactgttaagaagaacaaacaacaggaccattgtttaaattcagtgccttctggatcttctgcgcagtccaaggtgcgttctactccaagagttaatccattagcaaagcagagcaaacagacatcgctgaatttaaaggatacaatttccgaagtctcagacttcaaacctcagaatcataatgaagtccagtctaccacaccacccttcactactgttgattcacagaaagactgtagaaaatttccagttccacagaaggatggtagtgctttggaggattctagcacttcaggggcatcctgttccaagtcaagaccacatttagctgggacacatacttctcttagacttccgcaggaaggaaaaggaacctgtattcttgtaggtggtcatgaaatcacttctggattagaagtaatttcttccctaagagcaattcatgggttgcaagtagaagtttgtcctcttaatggctgtgattacatcgtgagtaatcgcatggtggtggaaaggaggtctcaatctgagatgttaaatagtgtcaataagaacaagttcattgagcagatccagcacctgcagagtatgtttgaaagaatatgtgtgattgtggaaaaggacagagaaaaaacaggagacacatcaaggatgtttaggagaacaaagagctatgacagcctgctgactaccttaattggcgctggaatccgaattcttttcagttcctgccaagaagaaaccgcagatttgctaaaggaactgtctttagtggaacaaagaaagaatgttggtattcatgttccaacagtggtgaatagtaataaaagtgaggcactccagttttatttaagtattcccaatataagttatataactgcattaaatatgtgtcaccagttttcatctgtgaaaaggatggctaacagctcacttcaagaaatctccatgtatgcacaagtaactcatcagaaggctgaggagatctatagatatattcactatgtatttgacatacaaatgttaccaaatgatcttaaccaagatagactgaaatctgatatataatcaagctgctcaagatggggttttcaaagacctctcacaatattaaatgcacttcaataatcattgctgttttatgtttatttgtaaataagagaatattttatttaaatattttatattgtatacatttttatttatagattatagaaattattaaaaaagaaaaatctgatgttcagtgatcattttgactagattataaaactaatttttcttattaaataaaacaaggtttattaaaagtgttactaaggatagtttaagaaagtaaaagctaagctagagatatactttggaatgtttcccaaaattaaagttgtactgttgtgataaatagtaaagttgacatgtctatgactacagccaacttgtcgattttccctatgtgtagatagtatacttttaagtgtactgattctaaatacatgtacttggtaaggtgtgggtgatgggtgggttgtgagataaatgacccagtaactaggaaagtagaaaacttaactgaatgtttatctgaccaaaggtgtgtcccagttaagtactgtcaaatctattaatatgaactctgatatggtttggctgtgtccccaaccaaaatctcatcttgacttgtaatctgaattataatcccaatatattggggagggacctcctggaacgtgattagctcatgggggcggttcccccatgctgttctagtgatagttctcagaggatctgatggttttataagcttttcctctgttcactctgcagttctcttgcctactgccatgtggaaaaggaaacgtttgcttcccctccaccatgattgtaagttcccgaggcctccccagccatgcaggactgtgagtcaattaaacatcttttccttataaa

SEQ ID NO: 206607 - DNA, 6147 bp, Artificial Sequence
  derived and/or modified sequence
atgagtggccgccaaagaacgcttttccagacatgggggtctagcatctctaggagctccggaactcctggctgcagctccggtacggaacgcccacaatcgcccggctcgagcaaagcacccctacccgctgcagctgaagcacagttggagagcgatgatgacgtgctcctggtggcagcttacgaggccgagagacaactttgtctggagaatggaggcttctgtacatccgcgggagccctctggatatatcctaccaattgccccgttcgagattaccagctccacatctctcgtgctgccctgttttgcaacactctggtgtgtcttccaactggactgggtaaaacttttattgcagccgtggtgatgtacaatttctatcgatggttcccatccggtaaagtcgtgttcatggcaccaacaaagcctctcgttactcagcagattgaggcctgttaccaggtgatgggaattcctcagagccacatggcggagatgacggggagtacacaggcctctactcgcaaagagatttggtgctcaaaacgcgtgctcttcctgacaccacaggtgatggttaatgacttgtcacggggcgcctgccccgccgcagagattaaatgccttgtcatcgacgaagctcacaaagccctaggcaattacgcatactgccaggtagttcgggaactcgtgaagtacacaaatcatttccgtatcttggctctgtcagctacccctgggagtgacatcaaagcagttcagcaagtcataacgaatctgctgataggccagattgagctgagatccgaagacagtcccgacatccttacatactcccacgaaaggaaagtggagaaactcattgtgccgctgggagaggagttggcggccatccagaaaacctatattcagattctggagtccttcgcgcggtctcttatccaacgtaacgtgctgatgaggagggacatccctaacctgaccaaatatcagattatcctggccagggatcagtttcggaagaatccgtcgcccaatatcgtgggcatccaacagggtatcatcgagggcgaatttgccatctgtatctctctgtatcatggttacgaactgctccagcagatggggatgaggagcctctacttttttctatgtgggattatggacggcactaagggcatgactagatccaagaatgagcttggacgcaatgaagacttcatgaagctgtataaccatctggaatgcatgttcgcccgtacccgcagtacatctgcaaacgggatctcggccattcagcagggagataagaacaagaagtttgtttatagtcaccctaaacttaagaaactggaagaggtggtcatcgagcacttcaaatcttggaacgcggagaacacaactgagaagaaaagagacgaaacacgggtgatgatattctcttctttcagagacagtgtccaggaaattgcagagatgctttcgcagcaccagccgatcattagggtcatgacattcgtgggacatgcaagcggaaagagtacaaaggggttcacccagaaggagcaattagaggtggttaagcagtttcgagacggaggatataacacactggtgtcaacctgcgttggggaggaaggactagatattggcgaggtagaccttatcatttgtttcgactctcagaaatcacccatccggctggtccaacgaatgggcaggacgggacggaagaggcagggacggatcgttattattctgagcgagggtcgagaggagaggatatacaaccaaagccagtcaaataaacgatcaatatacaaagctattagctctaataggcaggtgctgcatttctaccaacggagtcccagaatggtacctgatggcataaatcctaagttgcacaaaatgttcattacccacggggtgtatgagcccgaaaaaccctctagaaacctgcagcgcaagagctcaatcttcagctaccgagatggaatgcgccaatccagcctgaagaaagattggtttctgagcgaagaggaatttaagctgtggaacagactctatcgattgagggactcggatgagatcaaagaaatcactctcccccaggtccagttctccagcctccagaatgaagagaacaaaccggcccaggagagtacaaccggcattcatcagcttagcctgagcgaatggcggctgtggcaggatcaccccttgcctacccatcaggtagatcactccgatcgttgcaggcattttatcggcctgatgcaaatgattgaggggatgagacatgaggagggtgaatgtagttatgagctggaagtggagtcttacctgcagatggaagatgtcacatctactttcatagcccccagaaatgagagcaacaacctggcttctgacacattcattacgcacaaaaagagttctttcattaagaatataaatcagggatcctcgagcagcgtgatagaaagtgatgaagaatgtgcagaaatcgtgaaacagacgcatattaagccgactaaaattgtgtccttgaagaaaaaagtcagcaaagaaataaagaaggatcagttaaaaaaagagaataaccacggcattatcgattcggtcgataacgataggaactctacagtcgagaatatatttcaggaggatctgcctaacgacaagaggacctctgacactgacgaaattgccgccacatgcaccatcaacgagaacgtgattaaggagccttgcgtattgctaacagagtgtcagttcacaaataagagcaccagtagtctggccggtaatgtgctggattccggctacaatagctttaacgatgagaagtcagtgtcctccaatctgttcctgcctttcgaagaggagctttacatcgtcaggacagacgaccagttctacaactgccacagccttaccaaggaggtcctggctaatgtggagcgctttttatcctactcgcctccgccactgagtggcctgtccgacctggagtacgaaattgcaaagggaactgccctagaaaatctgctgtttctgccatgcgccgaacatctaagatccgacaagtgcacatgcctgcttagccactctgccgtgaattctcagcagaacctcgaactgaatagtctgaaatgtatcaactacccttctgagaagtcctgtctttatgacattcctaatgacaacatctccgatgaaccgagcctgtgcgactgcgatgtgcataagcacaatcagaacgagaatttggtgcctaacaaccgcgtgcagattcatcgttcacccgcccagaacctcgttggcgaaaacaaccacgatgtcgataacagcgatctccctgtcttgtcaacagaccaggatgaatccctgctgctgttcgaggacgtgaacaccgaattcgatgatgtttcactgtcaccccttaactcaaagtcagagtccctacctgtttcagataagaccgctattagcgaaaccccactggtttctcaattcctgatctcagacgagctgctgttagataataatagcgaactgcaggaccaaatcacgcgtgacgccaacagcttcaagtcaagggaccagcgcggggtgcaggaagagaaagtcaaaaatcacgaagatattttcgattgctctcgggacctgttcagcgttactttcgatctgggattttgttctcccgattctgacgatgagattctcgagcataccagcgactctaatcgcccactcgatgacctgtacggccggtacctcgagattaaggagataagcgacgctaattatgtgtctaaccaggctttgatacccagagaccattcgaaaaattttaccagtggcaccgttattataccttcaaacgaagacatgcaaaatcctaattacgtacatcttcccctgagtgcggccaagaacgaggaactgctttcgcctggctattcccagttttctctccctgtccaaaagaaggtgatgtccacaccattatcaaagtcaaacaccctcaacagcttcagcaagatccgcaaggaaattctgaagacgcctgattcaagcaaagagaaagtgaatctgcagcgtttcaaagaggccttgaatagcactttcgactacagtgaattctccctggagaagagtaaaagcagcggacctatgtacttacataaatcctgccacagcgtcgaggacggacagctcctgaccagcaacgagagcgaagacgacgagatctttcgcagaaaggttaaaagagccaaagggaacgtcctgaattcgcctgaagatcaaaagaattctgaggtggactcgccgctccacgccgtaaagaaacgcagattccctatcaacagatcggaactgagcagctccgacgagtcagaaaattttccgaagccgtgttctcagctggaggactttaaagtctgcaacggcaatgccagaaggggaatcaaggtcccaaagaggcagtctcacctgaaacatgtagcacgcaagttcctggacgacgaagctgaattatcagaggaggatgctgaatatgtcagttctgacgagaatgatgagtccgaaaacgagcaagatagtagccttctggactttttgaacgacgagacacagttatcccaggcaatcaacgattcagagatgagagctatctacatgaaatcactccgatcccccatgatgaataacaagtataaaatgatccacaagactcacaaaaacattaacattttctctcagatcccagaacaggatgagacttacctggaagattcattctgcgtggacgaagaagagagctgcaaaggtcagtcttctgaggaggaggtgtgtgtggacttcaatcttattactgacgactgtttcgctaatagtaagaagtacaagacaagacgagccgtgatgctgaaagaaatgatggagcaaaattgcgcccattctaagaagaagctctctaggattatcttacctgatgatagttctgaagaggagaataacgtgaatgataagcgcgaatcaaacatagccgttaatccctcaacagtaaaaaagaataagcagcaggaccattgtttgaactcagttcctagcggcagctccgctcagtctaaggtccgcagcactcccagggtgaacccacttgccaagcaatccaagcaaacgagtctgaatctgaaagataccattagcgaggtgtcagatttcaaacctcagaatcacaatgaggtccagtcaaccactccacctttcaccactgtggatagccagaaggactgtcgaaagttcccggtgcctcagaaggatggctccgcactcgaagattcatccacttccggggcctcttgcagtaaaagtagaccacacttagcagggacgcatacatctctgcggttgccccaagagggaaagggcacctgcatactggtgggcggtcatgagattacttcgggtctagaggtcattagctccctgcgggccatccatgggctccaggttgaggtgtgcccgttgaacggctgcgactatatcgtcagtaacagaatggtggtcgaacggcgcagtcagtccgaaatgctgaattctgtgaataagaacaagttcatagagcagatccagcacctgcagtcaatgttcgagagaatatgtgtcattgtcgaaaaggaccgcgagaaaacgggcgacacctcaagaatgttccgccgaaccaagtcctatgatagtctcctcacaacgctcattggagcgggaatacgcatattatttagttcatgccaagaggaaacagcggacctgttgaaggagttgagcctggtcgaacaacgcaagaatgtcggtatacatgtgcctaccgtggtgaacagcaacaagagtgaagcactgcaattctatctctcaattcccaatatctcctacatcacagcactgaatatgtgccaccagttcagctcagtgaaacggatggcgaactcaagcctacaagaaatctcaatgtacgcccaggttactcatcagaaggcagaggaaatctatcgctacattcactatgtcttcgatatccagatgcttcctaatgacctcaaccaggacaggctgaaatccgacatttag

SEQ ID NO: 206608 - DNA, 6147 bp, Artificial Sequence
  derived and/or modified sequence
atgagcggccggcagaggaccctcttccagacctggggcagcagcatcagccgcagcagcggcaccccaggctgcagcagcggcacagagcggccccagagccctggcagcagcaaggcccccctgcctgctgctgctgaggcccagctggagagtgatgatgatgtgctgctggtggccgcctatgaggccgagcggcagctgtgcctggagaatggaggcttctgcaccagcgctggggccctgtggatctaccccaccaactgccctgtgcgggactaccagctgcacatcagcagagctgccctcttctgcaacaccctggtgtgcctgcccaccggcctgggcaagaccttcatcgctgctgtggtgatgtacaacttctaccgctggttccccagcggcaaggtggtgttcatggcccccaccaagcccctggtgacccagcagatcgaggcctgctaccaggtgatgggcatcccccagagccacatggccgagatgacaggcagcacccaggccagcaccaggaaggagatctggtgcagcaagagggtgctcttcctgaccccccaggtgatggtgaatgacctgagcagaggagcctgcccagctgctgagatcaagtgcctggtgattgatgaggcccacaaggccctgggcaactatgcctactgccaggtggtgcgggagctggtgaagtacaccaaccacttccgcatcctggccctgagcgccaccccaggcagtgacatcaaggctgtgcagcaggtgatcaccaacctgctgattggccagatcgagctgcggtctgaggacagcccagacatcctgacctacagccatgagaggaaggtggagaagctgattgtgcccctgggggaggagctggccgccatccagaagacctacatccagatcctggagagctttgcccggagcctcatccagagaaatgtgctgatgagaagagacatccccaacctgaccaagtaccagatcatcctggcccgggaccagttcaggaagaaccccagccccaacatcgtgggcatccagcagggcatcattgaaggagaatttgccatctgcatcagcctgtaccacggctatgagctgctgcagcagatgggcatgaggagcctgtacttcttcctgtgtggcatcatggatggcaccaagggcatgaccaggagcaagaatgagctgggcagaaatgaagacttcatgaagctgtacaaccacctggagtgcatgtttgcccggaccaggagcaccagcgccaacggcatcagcgccatccagcagggcgacaagaacaagaagtttgtgtacagccaccccaagctgaagaagctggaggaggtggtgattgagcacttcaagtcctggaatgctgagaacaccacagagaagaagagagatgagaccagggtgatgatcttcagcagcttccgggacagcgtgcaggagattgctgagatgctgagccagcaccagcccatcatccgggtgatgacctttgtgggccacgccagcggcaagagcaccaagggcttcacccagaaggagcagctggaggtggtgaagcagttcagagatggcggctacaacaccctggtgtccacctgtgtgggggaggagggcctggacatcggggaggtggacctgatcatctgctttgacagccagaagagccccatccggctggtgcagaggatgggccgcactggaaggaagaggcagggcagaattgtcatcatcctgtctgagggccgggaggagcgcatctacaaccagagccagagcaacaagaggagcatctacaaggccatcagcagcaaccggcaggtgctgcacttctaccagaggagccccaggatggtgcctgatggcatcaaccccaagctgcacaagatgttcatcacccacggcgtgtatgagcctgagaagcccagcaggaacctgcagaggaagagcagcatcttctcctacagagatggcatgaggcagagcagcctgaagaaggactggttcctgtctgaggaggagttcaagctgtggaacagactctaccgcctgcgggacagtgatgagatcaaggagatcaccctgccccaggtgcagttcagcagcctgcagaatgaggagaacaagccagcccaggagagcaccaccggcatccaccagctgagcctgtctgagtggaggctgtggcaggaccaccccctgcccacccaccaggtggaccacagcgaccgctgccgccacttcatcggcctgatgcagatgattgagggcatgagacatgaggagggggagtgcagctatgagctggaggtggagagctacctgcagatggaggatgtgaccagcaccttcatcgcccccagaaatgaaagcaacaacctggccagtgacaccttcatcacccacaagaagagcagcttcatcaagaacatcaaccagggcagcagcagcagcgtcatcgagagtgatgaagaatgtgccgagatcgtgaagcagacccacatcaagcccaccaagatcgtgtccctgaagaagaaggtgtccaaggagatcaagaaggaccagctgaagaaggagaacaaccacggcatcattgattctgtggacaatgacaggaacagcacagtggagaacatcttccaggaggacctgcccaatgacaagaggaccagtgacacagatgaaattgctgccacctgcaccatcaatgaaaatgtcatcaaggagccctgtgtgctgctgacagagtgccagttcaccaacaagagcaccagcagcctggccggaaatgtgctggacagcggctacaacagcttcaatgatgagaagtctgtgagcagcaacctcttcctgccctttgaggaggagctgtacatcgtgaggacagatgaccagttctacaactgccacagcctgaccaaggaggtgctggccaacgtggagcgcttcctgagctacagccccccacccctgagcggcctgagtgacctggagtatgaaattgccaagggcacagccctggagaacctgctcttcctgccctgtgccgagcacctgcggagtgacaagtgcacctgcctgctgagccacagcgctgtgaacagccagcagaacctggagctgaacagcctgaagtgcatcaactaccccagcgagaagagctgcctgtatgacatccccaatgacaacatcagtgatgagcccagcctgtgtgactgtgatgtgcacaagcacaaccagaatgaaaacctggtgcccaacaacagagtgcagatccacaggagccctgcccagaacctggtgggggagaacaaccatgatgtggacaacagcgacctgcctgtgctgagcacagaccaggatgagagcctgctgctgtttgaagatgtgaacacagaatttgatgatgtgtccctgagccccctgaacagcaagtctgagagcctgcctgtgtctgacaagacagccatcagcgagacccccctggtgtcccagttcctgatcagtgatgagctgctgctggacaacaacagcgagctgcaggaccagatcaccagagatgccaacagcttcaagagccgggaccagaggggcgtgcaggaggagaaggtgaagaaccacgaggacatctttgactgcagccgggacctcttctctgtgacctttgacctgggcttctgcagcccagacagtgatgatgagatcctggagcacaccagtgacagcaaccggcccctggatgacctgtatggccgctacctggagatcaaggagatcagtgatgccaactacgtgagcaaccaggccctgatcccccgggaccacagcaagaacttcaccagcggcaccgtcatcatccccagcaatgaagacatgcagaaccccaactacgtgcacctgcccctgtctgctgccaagaatgaggagctgctgagccctggctacagccagttcagcctgcctgtgcagaagaaggtgatgagcacccccctgagcaagagcaacaccctgaacagcttcagcaagatcaggaaggagatcctgaagaccccagacagcagcaaggagaaggtgaacctgcagcgcttcaaggaggccctgaacagcacctttgactacagcgagttcagcctggagaagagcaagagcagcggccccatgtacctgcacaagagctgccacagcgtggaggatggccagctgctgaccagcaatgaaagtgaagatgatgagatcttccggaggaaggtgaagagggccaagggaaatgtgctgaacagccctgaggaccagaagaacagcgaggtggacagccccctgcatgctgtgaagaagaggcgcttccccatcaacagaagtgagctgagcagcagtgatgaaagtgagaacttccccaagccctgcagccagctggaggacttcaaggtgtgcaatggaaatgcccggcggggcatcaaggtgcccaagaggcagagccacctgaagcacgtggccaggaagttcctggatgatgaggccgagctgtctgaagaagatgctgaatatgtgtccagtgatgaaaatgatgaaagtgaaaatgagcaggacagcagcctgctggacttcctgaatgatgagacccagctgagccaggccatcaatgattctgagatgagggccatctacatgaagagcctgcggagccccatgatgaacaacaagtacaagatgatccacaagacccacaagaacatcaacatcttcagccagatccctgagcaggatgagacctacctggaggacagcttctgtgtggatgaggaggagagctgcaagggccagagcagcgaggaggaggtgtgtgtggacttcaacctgatcacagatgactgctttgccaacagcaagaagtacaagacccggcgggctgtgatgctgaaggagatgatggagcagaactgtgcccacagcaagaagaagctgagccgcatcatcctgcctgatgacagcagcgaggaggagaacaacgtgaatgacaagcgggagagcaacattgctgtgaaccccagcacagtgaagaagaacaagcagcaggaccactgcctgaacagcgtgcccagcggcagcagcgcccagagcaaggtgcgcagcaccccccgggtgaaccccctggccaagcagagcaagcagaccagcctgaacctgaaggacaccatcagcgaggtgtctgacttcaagccccagaaccacaatgaggtgcagagcaccaccccacccttcaccaccgtggacagccagaaggactgcaggaagtttcctgtgccccagaaggatggcagcgccctggaggacagcagcaccagcggggccagctgcagcaagagccggccccacctggccggcacccacaccagcctgcggctgccccaggagggcaagggcacctgcatcctggtgggcggccacgagatcaccagcggcctggaggtgatcagcagcctgcgggccatccacggcctgcaggtggaggtgtgccccctgaatggctgtgactacatcgtgagcaacaggatggtggtggagaggaggagccagagcgagatgctgaacagcgtgaacaagaacaagttcatcgagcagatccagcacctgcagagcatgtttgagcgcatctgtgtgattgtggagaaggaccgggagaagacaggagacaccagcaggatgttccggaggaccaagagctatgacagcctgctgaccaccctcatcggggccggcatccgcatcctcttcagcagctgccaggaggagacagctgacctgctgaaggagctgagcctggtggagcagaggaagaatgtgggcatccacgtgcccaccgtggtgaacagcaacaagtctgaggccctgcagttctacctgagcatccccaacatctcctacatcacagccctgaacatgtgccaccagttcagctctgtgaagaggatggccaacagcagcctgcaggagatctccatgtatgcccaggtgacccaccagaaggccgaggagatctaccgctacatccactacgtgtttgacatccagatgctgcccaatgacctgaaccaggaccggctgaagagtgacatctag

SEQ ID NO: 206609 - DNA, 6147 bp, Artificial Sequence
  derived and/or modified sequence
atgagcggccggcagcggaccctgttccagacctggggcagcagcattagccggtctagcggcacccccggctgttcgagcgggacagagcgcccccagtctccaggaagttctaaagcccccctgcctgctgccgcggaagcccagctggagtccgatgatgacgtcctgttagtggccgcctatgaagccgaacgccagctctgccttgaaaacggcggcttttgtacttctgcaggcgcgttgtggatataccccaccaactgccccgttcgtgattaccaacttcatatcagccgtgctgcgttgttctgtaacaccctggtctgcctccccacaggcctgggcaaaacatttattgccgcagtcgtgatgtacaacttttaccgttggttcccttcaggcaaggtagtgttcatggcccccactaaaccactggtcacacaacagatcgaagcctgttatcaagtgatgggtataccacaaagccacatggctgagatgacggggagcactcaggctagtacacgaaaggaaatttggtgttccaagagggtcctgtttcttaccccacaggttatggtgaatgacctgtcccggggtgcctgccccgccgccgagattaaatgccttgttatcgatgaggctcacaaagcactcggcaactatgcatattgccaggtggtgagggagctagtaaaatacacaaatcatttccggatcctcgcattatccgcaaccccagggagcgacatcaaagcagtgcaacaggtcattacgaacctgctgattgggcagattgaacttcgaagcgaggactctccggatatccttacttactcacacgagcgtaaggttgagaaactgatcgtgcctctcggcgaggaactcgccgccattcaaaaaacctacattcagatcctggaaagcttcgcacgaagtctcatccagcggaacgtcttgatgagaagggatattcccaatctgacgaaatatcaaattatcctggcacgggaccaatttagaaagaatccgagtcccaacattgtcgggatccagcaggggatcatcgagggggaattcgccatctgcatcagtctttaccatgggtatgaactcttgcaacagatgggaatgaggagcctctacttcttcctctgtggcatcatggacggcacaaagggaatgacgcgctccaagaacgaactggggcgcaacgaagactttatgaagctctataatcacctcgaatgcatgttcgctagaactcggtccaccagcgctaatgggattagtgcaatccaacagggagataagaacaagaagttcgtctacagccatccaaaattaaagaaactcgaggaggttgtgatagagcactttaagagctggaacgcggagaatacaacagagaaaaagagggacgagacaagagtcatgatatttagttctttcagggattctgtccaggagatagcggagatgttatcacagcaccagccaattataagagtgatgactttcgtgggccatgcgtccggcaagagtacgaagggctttacccagaaagaacagctcgaggtggtcaaacagttcagagatggagggtacaacacactcgtgtcaacatgtgtgggggaagagggcctggatataggtgaggtagatctcattatctgcttcgacagccaaaaatcccctatccgattagtgcaacggatggggagaacaggccggaaacgacaggggaggatcgtgataattctctctgagggtcgcgaagaacggatctacaaccagtcacagagcaacaaacggagcatctataaagcgatcagctctaataggcaggtcctccatttctaccagagaagtccgcggatggtcccagacgggattaatcctaagttacataagatgtttattacacacggagtatatgagccagagaagccgtcgaggaacctccagagaaagagctctattttttcatatagagatggcatgcgccagagctcactcaaaaaagattggttcctatccgaagaagaattcaaactgtggaacaggctgtacagactgagagacagcgatgaaataaaggagattacgctcccacaggtacagttcagctcgctgcaaaatgaggagaacaaacccgcccaggaaagcaccaccgggatccaccagctgagtctaagcgagtggaggttgtggcaagaccacccactgcccacgcaccaagtagatcatagcgatagatgccgacatttcatcggcctgatgcagatgatagaaggcatgcgacatgaagagggggaatgttcgtacgaactagaggtagaatcttacctgcagatggaagatgtgacgtctacttttattgcccctcggaacgaatctaacaaccttgcctcggacacgtttattactcataaaaaatctagttttattaagaatatcaatcagggtagctcttccagcgtaatagagtccgacgaagagtgtgctgagattgttaaacagactcacatcaaacctaccaaaatcgtgagtctcaaaaaaaaggtgagcaaagagatcaaaaaggatcagctgaagaaggagaataaccacggcatcatcgattccgttgataacgaccgaaactccacggtggaaaacatttttcaagaggaccttcccaacgacaaacgcacttcagacacagacgagatcgccgctacctgtacaatcaacgagaacgtcataaaggagccgtgtgtactgctcactgaatgccagttcactaacaagtcaacctcgtctctggctgggaacgtgttggatagcggctacaatagtttcaatgatgagaaaagtgttagttcaaatttattcctgcctttcgaggaggagctctatattgtcaggaccgacgaccagttctataattgccactccttgactaaagaagttctggcaaatgttgagcggtttttatcatactctcccccacccctgtcaggtctctctgatctagagtacgaaattgctaaaggcacagctctcgagaatttattattccttccttgcgcagagcaccttagatctgataaatgtacttgtttgcttagccactccgccgtcaattcacaacaaaacctggagctcaattccctgaagtgtatcaactatcctagcgagaagtcatgtctgtacgacatacctaatgataatatcagcgatgaaccttccctttgcgactgcgatgtgcacaagcacaaccagaatgaaaatcttgtacctaataatagagttcagatacatcgcagcccagcacagaacttggtgggggaaaataaccatgatgtggacaacagcgatctgcccgtgctgagcacagatcaggatgagtctctgctgttattcgaagacgtcaacactgaatttgatgacgttagcctctccccactcaactcgaaaagtgagtccctgcccgtgtcagacaagacagcaatcagcgaaaccccactggtcagtcagtttcttatatctgacgagcttcttctggataataacagcgaactgcaggaccaaatcaccagggatgccaattcatttaaaagcagagaccagcgcggtgttcaagaagagaaggtgaagaaccacgaggatattttcgactgctctagagatctcttttcggtgacatttgatcttggcttctgtagtccagatagcgacgacgagatcctggaacacacttctgacagtaatcgtcctctcgatgatctgtacggaagatatctagaaatcaaagaaataagcgacgcgaactacgtcagcaatcaggccctcattccacgggaccactctaaaaattttacctcggggaccgtgattataccaagtaatgaggatatgcagaaccctaattatgtgcatctgccactgtctgcagctaagaatgaagaactgctctctccaggctatagtcaattcagcctgcccgtgcagaagaaggtgatgtcaacccctctgtctaagagcaatactctaaacagctttagcaaaatcagaaaagaaatcctgaaaaccccagatagtagcaaagagaaggtcaacttgcagaggttcaaagaggccttaaacagcaccttcgattattccgaattttccctggagaagtcaaaatcatccggccccatgtatctccacaaaagttgccacagtgtggaggacgggcagttgctgaccagtaatgagagtgaagacgacgaaatcttccggcgcaaggtgaaaagggctaaaggcaatgtcttgaatagtcctgaggatcagaagaatagcgaagtcgattctcccctccacgctgtgaagaaacggaggttcccaattaaccggtccgagctctctagtagcgacgagagtgagaatttccccaagccatgcagtcagcttgaggatttcaaagtttgcaacggtaatgcccggcggggtattaaagtgcccaagcgtcagtctcatctcaagcacgtcgctaggaagttcctggatgacgaggccgagctgtccgaggaagatgccgagtatgtgtcttccgatgaaaatgatgagagtgaaaatgagcaagactcatccctgctggattttttgaacgacgaaactcagttgtcacaggccattaatgattccgagatgcgggccatttacatgaaaagcttgcgctcaccgatgatgaacaacaaatacaaaatgattcacaagacacacaaaaacatcaacatcttctcacagatcccagagcaggacgaaacatacttagaggactcattttgtgtagatgaggaggagtcatgcaagggacaaagttcggaagaggaagtttgcgtggacttcaatctaattactgatgattgtttcgccaattctaagaaatataaaaccaggcgcgccgtgatgcttaaagagatgatggagcagaattgcgctcatagtaagaaaaagctctctcgtattattctccccgacgacagttcagaagaggaaaataacgtgaatgataagcgggaaagcaatatagctgttaatccaagcacagttaagaaaaacaagcagcaggatcactgcctgaacagcgtaccttctggctcaagcgcacagagcaaggttcgaagcactccccgggtcaatcctctcgcgaaacagagcaaacagacgtcgctcaatctgaaggatacaattagcgaggtctctgacttcaagcctcagaatcataacgaggtccaaagtaccaccccaccattcaccacagtggattcgcagaaagactgtagaaaattccccgtcccccaaaaggacggttctgccctggaggactcatccacctccggggcaagttgctctaaaagtcgcccccacctcgcaggcactcacacatccctacgcctgccccaggaaggcaaaggcacctgtattttggtgggcggccacgagattacttcagggttggaagtaattagcagcctccgagcaatacacggccttcaggtagaagtctgccccttgaacggttgcgactacattgtgagtaaccgtatggtagttgaacggcggtctcagagtgaaatgctgaactccgtgaataagaacaaattcatcgagcagattcaacacctgcagtccatgtttgagaggatttgcgtaatcgtggagaaggatcgcgaaaagacaggagacacttctagaatgttccggcgcaccaagtcatatgattcccttcttactactctaataggcgccggtattcgcattctcttcagttcctgccaggaagagacagcggacttgttgaaagagttatccctggttgagcagcgcaagaatgtggggatccacgtgcccaccgtggttaattctaataaaagtgaggctctgcagttctatctttccataccgaatatctcgtacatcaccgcattgaacatgtgtcatcagttctcatcagtgaaaagaatggcaaatagctctttacaagaaatcagcatgtatgcccaggttacccatcagaaggctgaagaaatctatagatacattcattacgtttttgacatccagatgttgcccaacgacctaaatcaggacaggctgaagtccgacatttag

SEQ ID NO: 206610 - DNA, 6146 bp, Artificial Sequence
  derived and/or modified sequence
atgtctggtcgacagcgaacactctttcaaacttggggaagttcaatcagcagatcttcggggacacctggctgtagtagcggcaccgagagaccccaatccccaggtagttcaaaagccccactgccggcagccgctgaggcacaactcgaaagtgacgacgatgtcttgctggttgcagcttatgaggccgaacgccagctgtgtttagaaaacgggggattctgcaccagcgctggagcattgtggatctacccaaccaattgtcctgtgagggattatcaattacatatatcccgcgcagcgctgttctgtaacacattggtgtgcttgcccaccggcctaggcaagacctttatagccgcagtggtaatgtacaatttttatcggtggttccccagcggaaaggtcgtcttcatggctccgactaaacccctggttacccagcaaatcgaggcatgctaccaagtcatgggtattccccagagccatatggctgagatgacagggagcacccaggcgtcgacgagaaaagagatttggtgcagcaagagagtcctgttcctgacaccccaggtcatggtgaatgacctttccagaggggcatgccctgctgccgagattaaatgtttagtgattgacgaggcgcataaggctcttggcaattatgcttactgccaggtggtgagagagttagtcaaatacactaatcacttccgtatacttgccctctcagccacacctgggagcgatattaaggccgtgcagcaggtcatcaccaatttgcttatcggacaaatagaactgagaagcgaggactcacctgacattctcacgtactctcatgagcgtaaggtggagaaactgatcgtgccactaggcgaggaactcgcagctatccagaagacctacatccagattctagagtctttcgcacgctccctgatccaacggaacgtccttatgcggcgagatattccaaacctcacaaaatatcaaatcattctggcccgagaccagtttagaaaaaatccttcacctaacatcgtgggcatccagcaagggatcatcgagggggaattcgcaatttgcatctcgctgtaccatgggtacgagctgctgcagcaaatggggatgcggtctctctactttttcctatgcgggatcatggatggaacgaagggcatgacacgctcaaagaacgagttaggccgaaatgaggattttatgaaactgtataatcacctggaatgtatgttcgccagaacgcggagtaccagcgccaacggtatttctgccatccagcagggtgacaagaacaaaaaatttgtgtactctcaccccaagctgaaaaagttagaagaggtggtcattgagcatttcaaaagttggaacgcggagaataccacagagaaaaagcgcgacgaaacaagggtgatgattttttcctcatttcgcgatagcgtccaggaaatcgcagaaatgctgtctcagcatcagccaattattagagtaatgacgttcgtgggtcacgccagtgggaagtcaacaaagggttttacacagaaagaacagctcgaggtggtcaaacaatttagagatggcggatataacaccttggtctcaacttgtgtgggtgaagagggcctagacattggcgaagtcgatctgattatttgttttgattctcagaagagcccaattcgcctggtgcaacgcatgggtcggactgggcgaaagagacaaggacgcattgtcattattctgagtgagggacgtgaggagcgaatttacaatcagagccagagtaataaacggagcatctacaaggcaatttccagtaatagacaggtgctccacttctatcagcgctccccacgcatggtgcccgacggcataaatcccaaattgcacaaaatgtttataacccatggcgtttatgagcctgagaagccgagcagaaaccttcagcgtaaatcaagcatcttctcttatcgggacgggatgcgtcagtcaagtcttaagaaggactggtttttgagcgaggaggaatttaagctttggaataggctgtatcggttaagagactccgatgagatcaaggaaattaccctgccacaggtgcagttttctagcctccaaaatgaggaaaataaacccgctcaggaaagtacgactggtatccaccagctgtccctgtccgaatggagactgtggcaggaccatcccctccccactcaccaggtagatcactccgacagatgtcgccactttattgggctgatgcagatgattgagggaatgcgccacgaggaaggagagtgctcttacgagctcgaggtggagtcttatctgcagatggaggacgtgacatcaacattcatcgccccaagaaacgaaagtaacaacctggcttccgacacttttattacccataagaagagcagtttcatcaaaaacattaaccagggctcatcgtcctcggtaatcgaatctgatgaggagtgcgcagaaatcgtgaaacaaacacacattaagcctaccaagattgtcagcttaaaaaagaaggtcagcaaagagatcaagaaagaccaactcaagaaggagaacaatcatggcatcattgatagcgtggataacgaccggaactccacagtggagaatatttttcaggaggacctacctaacgacaaacgaacttccgatactgacgaaatagccgcaacttgtaccattaatgaaaatgtgattaaggagccttgtgtattactgaccgaatgccagttcaccaataaatccacatccagcttggccggtaatgtgcttgactccggctacaacagctttaacgacgagaaatcagtgtcatctaatctctttcttcctttcgaggaggaactctatattgtaagaaccgacgatcagttttacaactgtcactctctgaccaaggaagtgttggctaatgtggagagattcttatcttactcccctccaccacttagcggactttcggatctggagtatgagattgcgaagggcactgcgcttgaaaacttactttttctcccctgcgctgagcatctcagatccgacaagtgtacctgtctattgtcccactcggccgtcaattcccagcaaaatctggaattgaattccttgaaatgtataaattatccgagcgagaaatcgtgtttgtacgacattccaaatgacaacattagcgacgagccctcactctgtgactgcgacgttcataagcacaatcagaatgaaaacctagttcctaacaaccgggtacagatccaccgatcccctgcgcagaacctggtgggcgaaaacaatcacgacgttgataactctgacctccctgtcctgtccactgaccaggacgaaagcctactgctgtttgaagacgtcaacactgaatttgacgatgtttccctttctccattgaactcaaaatccgaaagtctgccggtgagcgataagacagcaatcagtgaaactcccctggtgtcacagttcctcattagtgatgaactgctcttagataacaacagcgagctgcaggatcaaataacaagggacgctaattcctttaaatcaagagaccagcggggagttcaagaggaaaaggtaaagaaccatgaagacattttcgactgctctcgcgacctgttttccgtgactttcgacctggggttctgtagcccagacagtgatgatgaaattctggagcatacaagcgatagcaaccggcctttggatgacctgtacggaagatacctggaaattaaggaaatttctgacgcaaactacgtgtccaaccaggctttgatcccacgcgaccactctaagaatttcacctcgggcaccgtgatcatcccttccaatgaagatatgcagaatcccaattacgtccacctgcccctaagcgctgctaagaatgaagagctgctcagtccagggtactcccagttctccttacccgtgcagaaaaaggtcatgagcacccccttgtcaaagtccaatactttgaatagtttcagtaagatcagaaaggaaatcctcaaaacccccgatagctccaaggaaaaagtcaacttgcagagattcaaggaagccctcaacagcaccttcgactattccgaattcagcctggaaaagtcaaaatcttccggcccaatgtacttacacaagtcttgtcattcagtagaagacggccaactgctcaccagtaacgaaagtgaagacgacgaaatattcaggcgcaaggtgaaaagagctaagggcaacgtgctgaacagccccgaggaccaaaaaaattccgaagtcgattccccactgcatgccgtgaaaaagcgacggtttcccataaataggagtgagctgagcagcagcgacgagtctgagaatttcccgaaaccatgcagccagctggaggattttaaggtgtgtaacggtaacgcccgacgtggaatcaaggtccctaaacgccaaagtcatctcaagcacgtggcaaggaaatttttggatgatgaggccgaactgtcagaggaagacgccgaatatgttagttcagacgaaaacgacgaatcagagaatgagcaagatagttcgctgctggacttcctcaacgatgaaacacaactctctcaggccattaacgattccgagatgagagcaatttatatgaagtctctccggagtcccatgatgaataacaaatacaagatgatccataaaacccataagaacattaacatcttttcccagattcccgagcaagacgagacctacctggaagacagtttctgtgtggatgaggaagaatcctgcaagggtcagtcctctgaggaggaggtttgcgttgacttcaatcttattacagacgactgctttgccaattctaagaagtataagacccgccgtgccgtcatgttaaaggagatgatggaacaaaattgtgcacactcaaaaaagaagttgtcacgcataatactgccggacgattcctctgaagaggagaacaatgtgaatgataaaagagaaagcaatatcgccgtgaacccttcgaccgttaagaagaataagcagcaggatcattgtcttaacagtgtcccctctgggtcttccgcacagtccaaggttcgctcaacccccagagttaacccacttgcaaagcagagcaaacagacctccctgaacctcaaagacacaatttctgaagtctctgattttaagcctcaaaatcataatgaagtacagtctacgaccccgcctttcaccacagttgactctcagaaggattgcagaaagttccccgttccccaaaaggatggatccgcactggaggattcctccacgtcaggcgcaagctgcagcaagtccaggccacacctggctggaactcatacttccttgagactacctcaagagggaaagggcacctgcatcctggtcgggggacacgagatcacgtctggactggaagtgataagctctctcagggctatacatggactgcaggttgaagtctgccccctgaatggctgtgactatattgtttctaatcgaatggttgtggagagacggagccaaagcgaaatgctgaacagcgtgaacaagaataaattcatcgagcagattcagcatctgcagtccatgtttgagcgcatctgcgtgatcgtagaaaaagaccgggaaaagactggagacacgagcaggatgttccgcaggaccaaaagctacgattcacttctgaccaccttaatcggtgcaggaatcaggatcctgttcagcagctgccaggaggaaacagcagacttgttgaaggagctgagcctcgtcgagcagcgtaaaaacgtggggatacatgtacctactgtggtaaattcaaacaagagtgaggctctacaattctatctctccatccctaatatatcttacatcactgctctcaatatgtgccaccagtttagttccgtcaagaggatggccaattcgagcctccaggaaatttctatgtacgcccaggttacgcatcagaaagctgaagagatctacaggtatattcactatgtctttgatatccagatgctccctaatgacctgaaccaggaccgtttgaaaagcgacatata

SEQ ID NO: 206611 - DNA, 6147 bp, Artificial Sequence
  derived and/or modified sequence
atgagcggcagacagagaaccctgttccagacctggggcagcagcatcagcagaagcagcggcacccccggctgcagcagcggcaccgagagaccccagagccccggcagcagcaaggcccccctgcccgccgccgccgaggcccagctggagagcgacgacgacgtgctgctggtggccgcctacgaggccgagagacagctgtgcctggagaacggcggcttctgcaccagcgccggcgccctgtggatctaccccaccaactgccccgtgagagactaccagctgcacatcagcagagccgccctgttctgcaacaccctggtgtgcctgcccaccggcctgggcaagaccttcatcgccgccgtggtgatgtacaacttctacagatggttccccagcggcaaggtggtgttcatggcccccaccaagcccctggtgacccagcagatcgaggcctgctaccaggtgatgggcatcccccagagccacatggccgagatgaccggcagcacccaggccagcaccagaaaggagatctggtgcagcaagagagtgctgttcctgaccccccaggtgatggtgaacgacctgagcagaggcgcctgccccgccgccgagatcaagtgcctggtgatcgacgaggcccacaaggccctgggcaactacgcctactgccaggtggtgagagagctggtgaagtacaccaaccacttcagaatcctggccctgagcgccacccccggcagcgacatcaaggccgtgcagcaggtgatcaccaacctgctgatcggccagatcgagctgagaagcgaggacagccccgacatcctgacctacagccacgagagaaaggtggagaagctgatcgtgcccctgggcgaggagctggccgccatccagaagacctacatccagatcctggagagcttcgccagaagcctgatccagagaaacgtgctgatgagaagagacatccccaacctgaccaagtaccagatcatcctggccagagaccagttcagaaagaaccccagccccaacatcgtgggcatccagcagggcatcatcgagggcgagttcgccatctgcatcagcctgtaccacggctacgagctgctgcagcagatgggcatgagaagcctgtacttcttcctgtgcggcatcatggacggcaccaagggcatgaccagaagcaagaacgagctgggcagaaacgaggacttcatgaagctgtacaaccacctggagtgcatgttcgccagaaccagaagcaccagcgccaacggcatcagcgccatccagcagggcgacaagaacaagaagttcgtgtacagccaccccaagctgaagaagctggaggaggtggtgatcgagcacttcaagagctggaacgccgagaacaccaccgagaagaagagagacgagaccagagtgatgatcttcagcagcttcagagacagcgtgcaggagatcgccgagatgctgagccagcaccagcccatcatcagagtgatgaccttcgtgggccacgccagcggcaagagcaccaagggcttcacccagaaggagcagctggaggtggtgaagcagttcagagacggcggctacaacaccctggtgagcacctgcgtgggcgaggagggcctggacatcggcgaggtggacctgatcatctgcttcgacagccagaagagccccatcagactggtgcagagaatgggcagaaccggcagaaagagacagggcagaatcgtgatcatcctgagcgagggcagagaggagagaatctacaaccagagccagagcaacaagagaagcatctacaaggccatcagcagcaacagacaggtgctgcacttctaccagagaagccccagaatggtgcccgacggcatcaaccccaagctgcacaagatgttcatcacccacggcgtgtacgagcccgagaagcccagcagaaacctgcagagaaagagcagcatcttcagctacagagacggcatgagacagagcagcctgaagaaggactggttcctgagcgaggaggagttcaagctgtggaacagactgtacagactgagagacagcgacgagatcaaggagatcaccctgccccaggtgcagttcagcagcctgcagaacgaggagaacaagcccgcccaggagagcaccaccggcatccaccagctgagcctgagcgagtggagactgtggcaggaccaccccctgcccacccaccaggtggaccacagcgacagatgcagacacttcatcggcctgatgcagatgatcgagggcatgagacacgaggagggcgagtgcagctacgagctggaggtggagagctacctgcagatggaggacgtgaccagcaccttcatcgcccccagaaacgagagcaacaacctggccagcgacaccttcatcacccacaagaagagcagcttcatcaagaacatcaaccagggcagcagcagcagcgtgatcgagagcgacgaggagtgcgccgagatcgtgaagcagacccacatcaagcccaccaagatcgtgagcctgaagaagaaggtgagcaaggagatcaagaaggaccagctgaagaaggagaacaaccacggcatcatcgacagcgtggacaacgacagaaacagcaccgtggagaacatcttccaggaggacctgcccaacgacaagagaaccagcgacaccgacgagatcgccgccacctgcaccatcaacgagaacgtgatcaaggagccctgcgtgctgctgaccgagtgccagttcaccaacaagagcaccagcagcctggccggcaacgtgctggacagcggctacaacagcttcaacgacgagaagagcgtgagcagcaacctgttcctgcccttcgaggaggagctgtacatcgtgagaaccgacgaccagttctacaactgccacagcctgaccaaggaggtgctggccaacgtggagagattcctgagctacagccccccccccctgagcggcctgagcgacctggagtacgagatcgccaagggcaccgccctggagaacctgctgttcctgccctgcgccgagcacctgagaagcgacaagtgcacctgcctgctgagccacagcgccgtgaacagccagcagaacctggagctgaacagcctgaagtgcatcaactaccccagcgagaagagctgcctgtacgacatccccaacgacaacatcagcgacgagcccagcctgtgcgactgcgacgtgcacaagcacaaccagaacgagaacctggtgcccaacaacagagtgcagatccacagaagccccgcccagaacctggtgggcgagaacaaccacgacgtggacaacagcgacctgcccgtgctgagcaccgaccaggacgagagcctgctgctgttcgaggacgtgaacaccgagttcgacgacgtgagcctgagccccctgaacagcaagagcgagagcctgcccgtgagcgacaagaccgccatcagcgagacccccctggtgagccagttcctgatcagcgacgagctgctgctggacaacaacagcgagctgcaggaccagatcaccagagacgccaacagcttcaagagcagagaccagagaggcgtgcaggaggagaaggtgaagaaccacgaggacatcttcgactgcagcagagacctgttcagcgtgaccttcgacctgggcttctgcagccccgacagcgacgacgagatcctggagcacaccagcgacagcaacagacccctggacgacctgtacggcagatacctggagatcaaggagatcagcgacgccaactacgtgagcaaccaggccctgatccccagagaccacagcaagaacttcaccagcggcaccgtgatcatccccagcaacgaggacatgcagaaccccaactacgtgcacctgcccctgagcgccgccaagaacgaggagctgctgagccccggctacagccagttcagcctgcccgtgcagaagaaggtgatgagcacccccctgagcaagagcaacaccctgaacagcttcagcaagatcagaaaggagatcctgaagacccccgacagcagcaaggagaaggtgaacctgcagagattcaaggaggccctgaacagcaccttcgactacagcgagttcagcctggagaagagcaagagcagcggccccatgtacctgcacaagagctgccacagcgtggaggacggccagctgctgaccagcaacgagagcgaggacgacgagatcttcagaagaaaggtgaagagagccaagggcaacgtgctgaacagccccgaggaccagaagaacagcgaggtggacagccccctgcacgccgtgaagaagagaagattccccatcaacagaagcgagctgagcagcagcgacgagagcgagaacttccccaagccctgcagccagctggaggacttcaaggtgtgcaacggcaacgccagaagaggcatcaaggtgcccaagagacagagccacctgaagcacgtggccagaaagttcctggacgacgaggccgagctgagcgaggaggacgccgagtacgtgagcagcgacgagaacgacgagagcgagaacgagcaggacagcagcctgctggacttcctgaacgacgagacccagctgagccaggccatcaacgacagcgagatgagagccatctacatgaagagcctgagaagccccatgatgaacaacaagtacaagatgatccacaagacccacaagaacatcaacatcttcagccagatccccgagcaggacgagacctacctggaggacagcttctgcgtggacgaggaggagagctgcaagggccagagcagcgaggaggaggtgtgcgtggacttcaacctgatcaccgacgactgcttcgccaacagcaagaagtacaagaccagaagagccgtgatgctgaaggagatgatggagcagaactgcgcccacagcaagaagaagctgagcagaatcatcctgcccgacgacagcagcgaggaggagaacaacgtgaacgacaagagagagagcaacatcgccgtgaaccccagcaccgtgaagaagaacaagcagcaggaccactgcctgaacagcgtgcccagcggcagcagcgcccagagcaaggtgagaagcacccccagagtgaaccccctggccaagcagagcaagcagaccagcctgaacctgaaggacaccatcagcgaggtgagcgacttcaagccccagaaccacaacgaggtgcagagcaccaccccccccttcaccaccgtggacagccagaaggactgcagaaagttccccgtgccccagaaggacggcagcgccctggaggacagcagcaccagcggcgccagctgcagcaagagcagaccccacctggccggcacccacaccagcctgagactgccccaggagggcaagggcacctgcatcctggtgggcggccacgagatcaccagcggcctggaggtgatcagcagcctgagagccatccacggcctgcaggtggaggtgtgccccctgaacggctgcgactacatcgtgagcaacagaatggtggtggagagaagaagccagagcgagatgctgaacagcgtgaacaagaacaagttcatcgagcagatccagcacctgcagagcatgttcgagagaatctgcgtgatcgtggagaaggacagagagaagaccggcgacaccagcagaatgttcagaagaaccaagagctacgacagcctgctgaccaccctgatcggcgccggcatcagaatcctgttcagcagctgccaggaggagaccgccgacctgctgaaggagctgagcctggtggagcagagaaagaacgtgggcatccacgtgcccaccgtggtgaacagcaacaagagcgaggccctgcagttctacctgagcatccccaacatcagctacatcaccgccctgaacatgtgccaccagttcagcagcgtgaagagaatggccaacagcagcctgcaggagatcagcatgtacgcccaggtgacccaccagaaggccgaggagatctacagatacatccactacgtgttcgacatccagatgctgcccaacgacctgaaccaggacagactgaagagcgacatctag

SEQ ID NO: 206612 - protein, 101 aa, Artificial Sequence
  derived and/or modified sequence
MFSKFTSILQHAVEALAPSLPLQEDFVYHWKAITHYYIETSDDKAPVTDTNIPSHLEQMLDILVQEENERESGETGPCMEYLLHHKILETLYTLGKADVSS

SEQ ID NO: 206613 - protein, 765 aa, Artificial Sequence
  derived and/or modified sequence
MFSKFTSILQHAVEALAPSLPLQEDFVYHWKAITHYYIETSDDKAPVTDTNIPSHLEQMLDILVQEENERESGETGPCMEYLLHHKILETLYTLGKADCPPGMKQQVLVFYTKLLGRIRQPLLPHINVHRPVQKLIRLCGEVLATPTENEEIQFLCIVCAKLKQDPYLVNFFLENKMKSLASKGVPNVISEDTLKGQDSLSTDTGQSRQPEELSGATGMEQTELEDEPPHQMDHLSTSLDNLSVTSLPEASVVCPNQDYNLVNSLLNLTRSPDGRIAVKACEGLMLLVSLPEPAAAKCLTQSTCLCELLTDRLASLYKALPQSVDPLDIETVEAINWGLDSYSHKEDASAFPGKRALISFLSWFDYCDQLIKEAQKTAAVALAKAVHERFFIGVMEPQLMQTSEMGILTSTALLHRIVRQVTSDVLLQEMVFFILGEQREPETLAEISRHPLRHRLIEHCDHISDEISIMTLRMFEHLLQKPNEHILYNLVLRNLEERNYTEYKPLCPEDKDVVENGLIAGAVDLEEDPLFTDISPENTLPNQEWLSSSPPATPDHPKNDGKTEVHKIVNSFLCLVPDDAKSSYHVEGTGYDTYLRDAHRQFRDYCAICLRWEWPGSPKALEKCNLEAAFFEGHFLKVLFDRMGRILDQPYDVNLQVTSVLSRLSLFPHPHIHEYLLDPYVNLAPGCRSLFSVIVRVVGDLMLRIQRIQDFTPKLLLVRKRLLGLEPEGPIIDHITLLEGVIVLEEFCKELAAIAFVKYHASSTP

SEQ ID NO: 206614 - protein, 83 aa, Artificial Sequence
  derived and/or modified sequence
LSLFPHPHIHEYLLDPYVNLAPGCRSLFSVIVRVVGDLMLRIQRIQDFTPKLLLVRKRLLGLEPEGPISDLEPVEALTVSSIC

SEQ ID NO: 206615 - DNA, 2298 bp, Artificial Sequence
  derived and/or modified sequence
atgttcagcaagttcaccagcatcctgcagcacgccgtggaggccctggcccccagcctgcccctgcaggaggacttcgtgtaccactggaaggccatcacccactactacatcgagaccagcgacgacaaggcccccgtgaccgacaccaacatccccagccacctggagcagatgctggacatcctggtgcaggaggagaacgagagagagagcggcgagaccggcccctgcatggagtacctgctgcaccacaagatcctggagaccctgtacaccctgggcaaggccgactgcccccccggcatgaagcagcaggtgctggtgttctacaccaagctgctgggcagaatcagacagcccctgctgccccacatcaacgtgcacagacccgtgcagaagctgatcagactgtgcggcgaggtgctggccacccccaccgagaacgaggagatccagttcctgtgcatcgtgtgcgccaagctgaagcaggacccctacctggtgaacttcttcctggagaacaagatgaagagcctggccagcaagggcgtgcccaacgtgatcagcgaggacaccctgaagggccaggacagcctgagcaccgacaccggccagagcagacagcccgaggagctgagcggcgccaccggcatggagcagaccgagctggaggacgagcccccccaccagatggaccacctgagcaccagcctggacaacctgagcgtgaccagcctgcccgaggccagcgtggtgtgccccaaccaggactacaacctggtgaacagcctgctgaacctgaccagaagccccgacggcagaatcgccgtgaaggcctgcgagggcctgatgctgctggtgagcctgcccgagcccgccgccgccaagtgcctgacccagagcacctgcctgtgcgagctgctgaccgacagactggccagcctgtacaaggccctgccccagagcgtggaccccctggacatcgagaccgtggaggccatcaactggggcctggacagctacagccacaaggaggacgccagcgccttccccggcaagagagccctgatcagcttcctgagctggttcgactactgcgaccagctgatcaaggaggcccagaagaccgccgccgtggccctggccaaggccgtgcacgagagattcttcatcggcgtgatggagccccagctgatgcagaccagcgagatgggcatcctgaccagcaccgccctgctgcacagaatcgtgagacaggtgaccagcgacgtgctgctgcaggagatggtgttcttcatcctgggcgagcagagagagcccgagaccctggccgagatcagcagacaccccctgagacacagactgatcgagcactgcgaccacatcagcgacgagatcagcatcatgaccctgagaatgttcgagcacctgctgcagaagcccaacgagcacatcctgtacaacctggtgctgagaaacctggaggagagaaactacaccgagtacaagcccctgtgccccgaggacaaggacgtggtggagaacggcctgatcgccggcgccgtggacctggaggaggaccccctgttcaccgacatcagccccgagaacaccctgcccaaccaggagtggctgagcagcagcccccccgccacccccgaccaccccaagaacgacggcaagaccgaggtgcacaagatcgtgaacagcttcctgtgcctggtgcccgacgacgccaagagcagctaccacgtggagggcaccggctacgacacctacctgagagacgcccacagacagttcagagactactgcgccatctgcctgagatgggagtggcccggcagccccaaggccctggagaagtgcaacctggaggccgccttcttcgagggccacttcctgaaggtgctgttcgacagaatgggcagaatcctggaccagccctacgacgtgaacctgcaggtgaccagcgtgctgagcagactgagcctgttcccccacccccacatccacgagtacctgctggacccctacgtgaacctggcccccggctgcagaagcctgttcagcgtgatcgtgagagtggtgggcgacctgatgctgagaatccagagaatccaggacttcacccccaagctgctgctggtgagaaagagactgctgggcctggagcccgagggccccatcatcgaccacatcaccctgctggagggcgtgatcgtgctggaggagttctgcaaggagctggccgccatcgccttcgtgaagtaccacgccagcagcaccccctag

SEQ ID NO: 206616 - DNA, 252 bp, Artificial Sequence
  derived and/or modified sequence
ctgagcctgttcccccacccccacatccacgagtacctgctggacccctacgtgaacctggcccccggctgcagaagcctgttcagcgtgatcgtgagagtggtgggcgacctgatgctgagaatccagagaatccaggacttcacccccaagctgctgctggtgagaaagagactgctgggcctggagcccgagggccccatcagcgacctggagcccgtggaggccctgaccgtgagcagcatctgctag

SEQ ID NO: 206617 - DNA, 2298 bp, Artificial Sequence
  derived and/or modified sequence
atgttcagtaaattcacatcgatactccagcatgccgtggaagccttggcgccttcactgcccctccaggaagattttgtgtatcactggaaagcgattacacactattacattgagaccagcgacgataaggccccggtaactgacacgaacattccttcccatctggagcagatgctagacatactagttcaggaagagaatgagagagagagcggggaaaccggaccctgcatggagtacctactgcatcacaagattcttgagaccttgtacaccctcgggaaagcagactgtccacccgggatgaagcagcaggttctggtgttctataccaaactcctgggccgcataaggcagcccctgctccctcacatcaacgtgcaccgacctgtacagaaactcattagactatgcggcgaagtattggctaccccaaccgagaatgaagagatccagttcctctgcatagtttgcgcaaaactcaagcaggatccttatctcgtcaacttttttctggaaaacaagatgaagagccttgctagtaagggtgtgccaaatgtaatttcagaggacactctgaaaggacaggactcattgagtacggacacaggtcaatcccgccagcctgaggagttatcgggggccacagggatggaacagactgagttggaggatgagccgcctcatcagatggatcatctgtcgacctcactggataatttgtcagtgactagtctgcctgaagcttctgtggtgtgtccaaatcaggattataacctggtgaattccttgctgaacctgacgcgctcacctgacggtcgtatcgcggtcaaggcgtgcgaggggctaatgctgttagtcagcctgcctgagcccgccgcagctaagtgtctgacacagtcaacttgcctgtgcgagctcttgaccgacagactggcctcgctgtacaaggccttaccgcaaagcgtggatccactggatatagaaacagtcgaagccatcaactggggcttggactcatatagccataaggaagatgcttctgcattccctggtaagagggcactgattagttttttaagctggtttgactattgcgatcagctgatcaaggaggctcagaagacggcagccgttgctttagcaaaagcagtgcatgagagatttttcattggagtgatggagccccagctcatgcagacttctgagatgggcatcctgaccagcacagctttgcttcaccggatagtcagacaagtgacgagcgacgttctgcttcaggagatggtattcttcatactcggcgagcagagggaacccgagacactcgcagagatcagcagacaccctctgcgccaccgacttatagaacattgtgaccacatttccgatgagatatctatcatgactctgaggatgtttgaacacctgctccagaagccgaatgagcacatcctgtacaatctcgttttgagaaacctggaagagaggaattacacagagtacaaacccctgtgtcccgaggacaaggacgtcgtggaaaacggtctgatcgctggtgccgtagatctggaggaggaccccctgtttacagacatctctcccgaaaacacccttccaaaccaggagtggctgtcctcttcaccgcccgctacccccgatcaccctaagaatgacgggaagactgaggttcataagatcgttaatagcttcctctgcctggttcctgatgatgccaagtcatcttaccatgtcgagggcaccgggtatgacacctacctgagagatgcacaccgccaattccgggattattgtgccatttgcctgcggtgggaatggcccggaagccctaaagctctggagaaatgcaatctagaggcagctttttttgaaggacattttcttaaagtgctgttcgaccggatgggccggatcctcgaccagccctacgatgttaacctccaggtgacctctgtcctctctcggctttcactgttccctcacccccacatccacgagtatttgcttgatccatacgtgaacctggcaccgggttgtaggagtcttttcagcgtgatagttagggtcgttggcgatctgatgttaaggattcagaggattcaagacttcacacctaagcttctgctggtccgcaagagactgctcggccttgagccggagggccccattatcgatcacatcaccctgctcgaaggcgtgatcgtgctggaagagttttgtaaggaattggcagctattgcctttgtcaaataccacgcatcttccacaccctag

SEQ ID NO: 206618 - DNA, 252 bp, Artificial Sequence
  derived and/or modified sequence
ctgtcactgttccctcacccccacatacacgagtatttgctggacccatacgttaacttagcgcctggctgtagatccctcttttccgtgattgtgcgggttgtaggggatctaatgctgcgaatccagcgaatccaggactttaccccaaaattgcttctcgtgcgcaaacgcttattaggactggagcctgaagggcctatatccgatctagaaccggtggaagccctcaccgtttcaagcatttgctag

SEQ ID NO: 206619 - DNA, 5806 bp, Artificial Sequence
  derived and/or modified sequence
gcaggccgcggcgggcagagcggggggaaggaacccgagccgggctgccaccgtgtcccaaccggtgccgccgccggagcttctccgggccccgagtcctcgccgaacgccctcctcgccgcccgccgcgtcccggcgccctccggagccgccgagccgcccgcgcacacctgaagcggccgggccaggccctgcctcgatcctcagctcgtcctccccgccccgcaccggccttcactctggagcggccccggcagccgcagcaggggcggcggcggcggatcgaggagctctccaggtcgtcccgggagaggctgctgcagtcccgggacaggatgttctccaagttcacctccatcctgcagcacgccgtggaggcgcttgcaccttctcttcctttacaagaagattttgtttatcactggaaggcaattacccattactacatagagacttcagatgataaagccccagtgaccgatacaaatattccatcgcatctggaacagatgttagatatactggttcaagaagaaaatgaacgggaatctggagagacagggccatgtatggaatatttgcttcatcacaagatcttggaaacattatataccttggggaaagctgattgtcctccgggaatgaaacagcaggttttggttttctatacgaaacttctgggaagaatccggcagccactacttccacacattaacgtgcacaggccagtgcagaaattaattagactctgtggtgaagtcctagcaacaccaacagaaaatgaagagattcagtttctttgcattgtgtgtgcgaagctgaaacaggacccctacctggttaactttttcctagagaataagatgaaatcattggcttccaaaggagtaccaaatgtaatttcagaagatacattaaaaggtcaggattccttgtcaacagatacaggacagtcccgtcaaccagaggaactatctggtgctactggaatggagcaaacagaattggaagatgagcctcctcatcagatggatcacctgtccacaagcttggataacctcagtgtcacctcactgccagaggcctcggttgtttgtccaaatcaggattacaatttagtgaattctttgttaaatcttactagaagtcctgatggcagaatagctgtgaaggcatgtgaaggcttgatgctgttagtaagtttgccagagcctgcggctgcaaagtgccttacacagagcacttgcttgtgtgaactactgacagacagacttgcctccctgtacaaggccctacctcagtcagtggatccgttagatattgaaaccgtggaagcaattaactggggcttggactcatatagtcataaagaagatgcttcagcatttccaggaaaacgagccttaatttcatttctttcctggtttgattattgtgatcagctcattaaggaagcccaaaagactgctgctgttgctcttgccaaagctgttcatgaaagatttttcattggtgttatggaacctcaattaatgcaaacttctgagatgggtattctcacatccactgctctgcttcatcgcatcgttcggcaagtgacctctgatgttttgcttcaagaaatggtgttttttatccttggagaacagagggaaccagaaactctggcagaaatcagcagacatcctttaaggcataggttaattgaacattgtgatcacatatctgatgagataagcataatgacattacgaatgtttgaacatcttttacaaaaacccaatgagcacattctttacaacttggtcttgagaaatcttgaagaaagaaattatacagaatataaacctttgtgcccagaagataaagatgtggtagaaaatggattgatagcaggagcagtagatctggaagaagatccattatttactgacatttcaccagaaaacactttgccaaaccaagagtggcttagttcttcacctcctgctactccagaccaccccaaaaatgatggaaaaactgaagttcataaaattgtaaatagttttctctgtctggtaccggatgacgcaaaatcctcctaccatgttgagggcacaggatatgacacttacctccgagacgctcataggcagttccgagactactgtgctatctgcttaagatgggagtggcctgggtctccaaaagcattggaaaagtgcaatttagaagctgctttctttgaaggtcattttttgaaagtgctgttcgacagaatgggaagaattcttgatcagccatatgatgtaaacttacaagtaacctcagtgttatctagactttctctcttccctcatccacacatccacgagtaccttttggatccttacgtgaacctcgctcctggctgtagatctctcttctctgtaattgtcagggttgttggagaccttatgcttcgaatccagcgtattcaagactttactcccaagcttctgttagtcagaaagcggttacttggtttggaacctgaaggccctattattgaccacatcacactgctagagggtgtgattgtgttagaagagttctgtaaggagctggcggcaatcgcatttgtaaaatatcatgcttcctccacaccataaataacatctttcatgtaactgggggaacagaactactgtgtacatttcaccaaaaaagactcagttccacccagccacaagaggataaaaagcctttttaaacgcagtattgctgtaaactggacagaaccattaagaacctattgagtggacattcttggtgaaatgttgtataatgttgttttcattggctttatcataatggttctatatatacaattgcacattgttgaatccaggatacaatcaaaggaacttcaggaaataagcatttctaatgactgtgaaaagctgcaatatttccaatgtcatgactttgatgatatttctgttatattaatgtccttttaggtagcaaggcattttgacattctctgggactcaaatgcttgtattcttttggattaataagtagcaaaaaaaaatcactaattttataactttttaaggtcagaattcttatcaaacaaaatatgaaaactgtaaatgagaaaaaaatacaattcagaaaccattgaatgaattaattataggcgataaaaatgtgtagagcaccattaactttcttcagcttttttaagaataacaatttaatatgataaattcttgattaatataatatatctatatttttaaagaaatgttcttttactcttttgtgcacatagccatgttagtgattttcttcatgtgtgggtcccagtttatttaaactgtgtcgttttcgcagcagtgttcaatttgctcaccattggtagtgtttgctaaaattgtatttttttaagctaagtaacatgtactgggttgagaacctttttcccccctctccctctcagaaaattgctttataaaattgctttataatttgattttcttactgaaacgcatggtggtgtctaggtggggaactgactgataacccttggcagcaatcaaagtgccagtggctcctcgatgtttacatttttttctattttgttcagtcttttgttttaaatgattctaaagagattaaagaaaacagagttttaaatgtcctatttacatgttaaaggatttggggaaattgggtatgtatgtgaatgggtgtacatgtaggaacctgtagttcagcaaagctgcgctgggcacagcatgcttgtacttgattgacaaaatcgtgtttgccagtccactttctatttttcctttaagtgatgctgatcactcaaataatgcttttaagctattgtttgtttttatttgacatgttaagccgcagcactttcttcttcatctttccatttactgatatttgggggaacaggctatcaaaggttccggcttgaagggaactgtcactaccccctctaggaagttattttatgtagcatgtttgcatatacgcattgtgtggcatgtgcatagaggcttgttttacacctatctgctcattttgttgtgttagcttttctggtttatttcatagtttgttcttgctatttattaagaacagaatatcaaaagattatgaatagcctcagctctagaatgcttaccactgttaaaacaacaaaaagactaaacctctaatttcatgcaaatctttgttagcttattctaagaaatttattaagtaaaacaaagaaaaaacagaagtgggagatagttattttgtgcgtaattttctttaaatcattttgaatgatgtgaaggcattcagtttgctgtatttttttaatcacttcatacaaggaaaacttcgacatttacatttctagatgtagtaacagtctactttgatatatgagtatttaaactaaggcattaagagatattagatatttcttaatgttttcatagtgctcaataggtgtagtagcaatgatattacctctgaaaccaaatactcttttatccttgattccactatgggaccttataactagtccatgaaaccaagctcagaaaagctttaactcttatatttgtgtatatgtatgctgcttctgaaaatataatttttctaagttgttgtaatgactttaatttgtaatcagctaaggcttaagatttcatttgtttctaagtttctgtttttcatcccttcttttttcttttatatttagttcagacctagagccagtagaagctctcacagtgagttcaatttgttagtgaaacattgtactgcatcaccagtttttcttaccttctgttgacagctgaatatttctgttactcagtacttgcaaaaacagtaactaaaatgcactatgctgagtggaaagcaccgtcataacaattgattgccatagcaagttccaaagtgaatttcagccttgcttcacatttgtatcaataaatatgcacattttttaaaactttctaacaatatagtctttggatttgtttttagttatgagccgcattctttacttgatagaactcagatttgtcttagcctattgccatatagtactcaccttataactatgtaactttctcgtaatgtatctgtttgtgcaatatggaagctgtgagtggattcatagctttttggtttaattgtacattattgtgtgtgtatatatgtatatatgtatatatataaggaccaaaattcttagctcgcttacactgttgctagtgtaaacattgttacacttaattttacagggcacaaattatggaattacttcataaattcatggtaatgttttcataaattattgcattaacatacaattgccatttaattatgaagtccatcagtattgacagaagacgttacagtgaagtgctaaaaccacactatatggtaattatattttgggttatgtagtaaatcaaatatgcatgtcattgtgacactttatgtgttaaaacatggtagataatcacattttctgggccctgtaaaatagtgttactgtaatactctgttttgcctcctgccttgtttacattaaacaggatatttggtaaatttttttgtattgaaagttgtgtaggttactgacagtgttaccagcgtctggaattcttggtccctccgtggagaaactcttcagatggtcattgtgtacctactctctcttcaaaggaagttgtgatcaagttcaactttttgtgctaacaatgcatgcaggactaagagggatgatctaaaaaataaataatgtaatttaaac

SEQ ID NO: 206620 - DNA, 469 bp, Artificial Sequence
  derived and/or modified sequence
ctttctctcttccctcatccacacatccacgagtaccttttggatccttacgtgaacctcgctcctggctgtagatctctcttctctgtaattgtcagggttgttggagaccttatgcttcgaatccagcgtattcaagactttactcccaagcttctgttagtcagaaagcggttacttggtttggaacctgaaggccctatttcagacctagagccagtagaagctctcacagtgagttcaatttgttagtgaaacattgtactgcatcaccagtttttcttaccttctgttgacagctgaatatttctgttactcagtacttgcaaaaacagtaactaaaatgcactatgctgagtggaaagcaccgtcataacaattgattgccatagcaagttccaaagtgaatttcagccttgcttcacatttgtatcaataaatatgcacattttttaaaactttctaacaa

SEQ ID NO: 206621 - DNA, 2298 bp, Artificial Sequence
  derived and/or modified sequence
atgttcagcaagttcaccagcatcctgcagcacgctgtggaggccctggcccccagcctgcccctgcaggaggactttgtgtaccactggaaggccatcacccactactacatcgagaccagtgatgacaaggcccctgtgacagacaccaacatccccagccacctggagcagatgctggacatcctggtgcaggaggagaatgaaagagagagcggggagaccggcccctgcatggagtacctgctgcaccacaagatcctggagaccctgtacaccctgggcaaggctgactgccccccaggcatgaagcagcaggtgctggtgttctacaccaagctgctgggccgcatccggcagcccctgctgccccacatcaacgtgcacaggcctgtgcagaagctgatccggctgtgtggggaggtgctggccacccccacagaaaatgaggagatccagttcctgtgcatcgtgtgtgccaagctgaagcaggacccctacctggtgaacttcttcctggagaacaagatgaagagcctggccagcaaaggagtgcccaacgtcatcagcgaggacaccctgaagggccaggacagcctgagcacagacaccggccagagccggcagcctgaggagctgagcggggccaccggcatggagcagacagagctggaggatgagcccccccaccagatggaccacctgagcaccagcctggacaacctgtctgtgaccagcctgcctgaggcctctgtggtgtgccccaaccaggactacaacctggtgaacagcctgctgaacctgaccaggagcccagatggaagaattgctgtgaaggcctgtgagggcctgatgctgctggtgtccctgcctgagcctgctgctgccaagtgcctgacccagagcacctgcctgtgtgagctgctgacagaccggctggccagcctgtacaaggccctgccccagagcgtggaccccctggacattgaaacagtggaggccatcaactggggcctggacagctacagccacaaggaggatgccagcgccttccctgggaagagggccctgatctccttcctgtcctggtttgactactgtgaccagctgatcaaggaggcccagaagacagctgctgtggccctggccaaggctgtgcatgagcgcttcttcatcggcgtgatggagccccagctgatgcagaccagcgagatgggcatcctgaccagcacagccctgctgcacagaattgtgcggcaggtgaccagtgatgtgctgctgcaggagatggtgttcttcatcctgggggagcagcgggagcctgagaccctggccgagatcagccgccaccccctgcggcaccggctgattgagcactgtgaccacatcagtgatgagatcagcatcatgaccctgaggatgtttgagcacctgctgcagaagcccaatgagcacatcctgtacaacctggtgctgaggaacctggaggagaggaactacacagagtacaagcccctgtgcccagaggacaaggatgtggtggagaatggcctgattgctggagctgtggacctggaggaggaccccctcttcacagacatcagccctgagaacaccctgcccaaccaggagtggctgagcagcagccccccagccaccccagaccaccccaagaatgatggcaagacagaggtgcacaagatcgtgaacagcttcctgtgcctggtgcctgatgatgccaagagcagctaccacgtggagggcaccggctatgacacctacctgagagatgcccaccggcagttccgggactactgtgccatctgcctgcgctgggagtggccaggcagccccaaggccctggagaagtgcaacctggaggccgccttctttgagggccacttcctgaaggtgctgtttgacaggatgggccgcatcctggaccagccctatgatgtgaacctgcaggtgacctctgtgctgagccggctgagcctcttcccccacccccacatccacgagtacctgctggacccctacgtgaacctggcccctggctgccgcagcctcttcagcgtcatcgtgcgggtggtgggggacctgatgctgcgcatccagaggatccaggacttcacccccaagctgctgctggtgaggaagaggctgctgggcctggagcctgagggccccatcatcgaccacatcaccctgctggagggcgtcatcgtgctggaggagttctgcaaggagctggccgccatcgcctttgtgaagtaccacgccagcagcaccccctag

SEQ ID NO: 206622 - DNA, 252 bp, Artificial Sequence
  derived and/or modified sequence
ctgagcctcttcccccacccccacatccacgagtacctgctggacccctacgtgaacctggcccctggctgccgcagcctcttctctgtgattgtgcgggtggtgggggacctgatgctgcgcatccagaggatccaggacttcacccccaagctgctgctggtgaggaagaggctgctgggcctggagcctgagggccccatcagtgacctggagcctgtggaggccctgactgtgagcagcatctgctag

SEQ ID NO: 206623 - DNA, 2298 bp, Artificial Sequence
  derived and/or modified sequence
atgttcagcaagttcaccagcatcctgcagcacgccgtggaggccctggctccaagtctgccactgcaagaagatttcgtgtatcactggaaagcaataacccactactatatcgagacaagtgacgacaaagcgccggtgaccgatactaatattcctagccatttggagcaaatgttggacatactggtgcaggaggagaacgaacgagaaagtggagagacagggccttgtatggagtatctcctgcatcataaaatcctggagacgctctatactttaggaaaggctgactgtccacctggaatgaaacagcaagttctggtcttttacactaagctgctcggtaggatcagacagccactactgccccatatcaacgtgcacaggcccgtgcaaaagcttatacgtctctgcggtgaagtgttggcaacccccactgagaacgaagaaatccaattcctgtgtattgtatgtgccaagctgaagcaggatccttacctggtaaacttctttctagagaataaaatgaaatccctggcgtctaagggcgttccaaatgtcatttcggaggacacactaaaaggacaggactcgctgagcaccgatacaggacaaagtagacagcccgaagaactgagtggagcaacaggaatggagcagacagagcttgaggacgaaccgccccatcagatggaccaccttagcacctcgctcgataatctgagtgtcacctctctgccagaggcttcagtggtctgcccaaaccaggactataacctggtcaactccctgttgaatctcacccgttcacccgacggcagaatcgccgtcaaagcctgcgagggactgatgcttcttgtgtctttaccagagcccgcagctgctaaatgcctgacacaaagtacgtgtctctgtgagcttttgacggaccgcctagcctctttatataaagccctgcctcagtcagtggatccactcgacatagaaactgtggaggccattaactggggcttggacagctactcccacaaagaggatgcctcggcctttcccggaaagagagcgcttatctccttcctctcatggttcgactactgcgatcagctcattaaggaagcccaaaagaccgccgcggtcgccctcgctaaggctgtacacgagaggttcttcataggagtcatggagccacagttaatgcagacgtcagaaatggggatactcacctctaccgcactccttcataggatcgtgaggcaggtaacatcagacgtgctgttgcaggaaatggtgttcttcattcttggggaacagagagagcctgagactctagcggaaatctcccgacatcccctaaggcaccgtttgattgagcactgcgatcacatttcagatgaaatttctattatgacattacgcatgtttgagcatctgctgcagaaacccaatgagcacattctgtataacctagtccttcggaacctggaggaacggaactatacagaatacaagcccctgtgtcctgaggacaaagatgtggtggagaacggtctgatcgcaggtgcagtcgacttagaagaggatcccctgttcacagatatttcccctgagaacaccctgccaaaccaggagtggttatcgtccagtcctccagccacgcctgatcatccaaagaacgacggaaagacagaagtgcataagatcgtgaattcttttctatgtttagtgcccgacgatgccaaatccagctaccatgtagagggcacgggctacgacacctaccttcgggacgctcaccgccagttccgcgattattgtgccatctgcttacgctgggaatggccggggtccccaaaggctttggagaagtgtaatcttgaggcggccttcttcgaaggccacttccttaaggtgttattcgatcgcatgggcaggattctcgaccaaccttatgacgtgaaccttcaggtgacaagtgtgctatcgcggctgtctttattccctcatccccacatccacgagtatctgctcgatccatacgtcaaccttgcccctggctgtaggagcctcttctccgtcatcgtgcgggtggtgggcgatctgatgctgcggatacaacggatacaggatttcaccccaaaacttctgttggtgaggaagcgcctgctaggcctggaacccgagggcccaatcatcgatcatattactttgctggagggagtgatagtgttggaagaattctgcaaggaactcgccgcaatagcttttgttaagtatcacgccagctccacaccctag

SEQ ID NO: 206624 - DNA, 252 bp, Artificial Sequence
  derived and/or modified sequence
ctgagcctgttcccccacccccacatccacgagtacctgctggacccatatgtgaacctggccccaggttgccgctctctgttcagcgtcatagttcgagtggttggtgatctgatgctgcgtattcagcgcatacaggatttcactccaaagctcctgctggtaaggaaacggctccttggactagaacctgaggggcccatatccgacctggaacctgtcgaggcacttaccgtcagtagcatctgctag

SEQ ID NO: 206625 - DNA, 2298 bp, Artificial Sequence
  derived and/or modified sequence
atgttcagtaagtttacaagcattctgcagcatgctgtggaagccctggctccttccctgcctctccaggaagattttgtgtaccattggaaagccattacccactactacatcgaaacgtccgatgacaaagctcctgtgacggacactaatatccccagtcatctcgagcagatgctggatattttggtgcaggaagagaacgagcgggagagcggcgaaaccggcccttgtatggagtacttgctgcaccataagattttggagacgctgtacactctgggcaaagcagactgccccccaggaatgaagcagcaagtactggtgttctacaccaaattactgggcagaatccgacagcctctgctgcctcacattaacgttcatcgtcctgttcaaaaattgatccggctgtgcggggaagtcctggcaacacctactgaaaacgaggagatccagttcctttgcattgtgtgtgctaagctgaaacaggacccctatctagttaatttctttctggagaataagatgaagtctctggcttcaaagggagtgcccaatgtgataagcgaagatacactgaaaggccaggattccctgtccacagacacaggtcagtctagacagccagaggaacttagcggagctacaggcatggagcaaaccgaattggaggacgaacctccccatcaaatggatcacttatctaccagcctggacaatctctccgtcacgtctctgcccgaagcctccgtcgtttgcccgaaccaggattacaatctagtgaacagccttctaaacctgacccgttctcctgatggtaggattgctgtcaaggcctgtgaggggctcatgcttttggtgtctctccctgagccggctgcagccaagtgcttgacccagtccacatgtctgtgtgaactgctgaccgatagactggcatctttgtataaagctctgccgcagtcagtggacccattggatattgagacagtggaggccattaattggggcctggattcatattctcacaaggaggacgcttccgccttccctggcaagcgggctctcatatcgttcctttcctggttcgactactgcgaccaactcattaaggaagctcagaaaactgccgctgtcgcactcgccaaagcggtgcatgagagattttttataggggtgatggaaccccaattaatgcagacttccgagatgggcatattaaccagtacggcattgcttcaccgcattgtacgccaagtcacatccgatgtgcttctgcaggaaatggtgttttttatccttggcgaacagcgagagccagaaacacttgcagagatttcccgtcacccgctgcgccaccggcttatagaacattgcgatcacatttctgacgaaatctcaataatgacgctgcgcatgttcgagcatcttctgcaaaaacctaacgagcatatcctgtataacctcgtgctccgcaacttggaagagcgcaactatacagaatataaacccctatgcccagaggataaggatgtggtggagaacggtctgattgcaggcgcagtagatctagaagaggaccccctgtttaccgatatctcacctgagaacactctccctaatcaggagtggctgagttcttcccctcccgctacccctgaccaccctaagaatgatggaaagacggaggtccataagattgtaaactcgtttttgtgtctagtcccggacgatgctaaaagtagctaccacgttgaggggaccggctacgatacatacttgcgggacgcacaccggcaatttcgggattattgcgctatctgtctaaggtgggaatggcctgggtccccaaaagctctggagaagtgcaatcttgaggccgctttttttgaaggccactttctcaaggtgctcttcgacagaatggggaggattcttgatcaaccctatgatgttaacctacaggtgacaagtgtgctgagtcggcttagtctgtttccgcacccgcacattcatgaatacctgctcgatccatacgtcaacctggcaccgggttgccgatccttgttttctgtaatagtccgggtggttggggatctgatgcttcgaattcagaggatccaggattttacccctaagttgctgctggtcaggaagcgcttactggggttagaacctgaaggccctatcatcgatcatataacgctgctggagggggtaattgtgcttgaagagttttgtaaggagctggctgctatagcattcgtcaaatatcatgcctcttccacaccctag

SEQ ID NO: 206626 - DNA, 252 bp, Artificial Sequence
  derived and/or modified sequence
ctgagtttgtttccccatcctcatattcatgaatacttgctagatccatacgtgaacttggccccagggtgtcgatccctcttctcggtgatcgtgcgtgtcgtgggtgacctgatgttgagaatccaacgaattcaggactttacacccaagttactgttggtacgtaagcgactactaggattagagcccgaaggcccaatcagtgacctggagccagtggaagctctgaccgtctcgagcatctgttag

SEQ ID NO: 206627 - protein, 908 aa, Artificial Sequence
  derived and/or modified sequence
MKSSVAQIKPSSGHDRRENLNSYQRNSSPEDRYEEQERSPRDRDYFDYSRSDYEHSRRGRSYDSSMESRNRDREKRRERERDTDRKRSRKSPSPGRRNPETSVTQSSSAQDEPATKKKKDELDPLLTRTGGAYIPPAKLRMMQEQITDKNSLAYQRMSWEALKKSINGLINKVNISNISIIIQELLQENIVRDRGLLSRSVLQAQSASPIFTHVYAALVAIINSKFPQIGELILKRLILNFRKGYRRNDKQLCLTASKFVAHLINQNVAHEVLCLEMLTLLLERPTDDSVEVAIGFLKECGLKLTQVSPRGINAIFERLRNILHESEIDKRVQYMIEVMFAVRKDGFKDHPIILEGLDLVEEDDQFTHMLPLEDDYNPEDVLNVFKMDPNFMENEEKYKAIKKEILDEGDTDSNTDQDAGSSEEDEEEEEEEGEEDEEGQKVTIHDKTEINLVSFRRTIYLAIQSSLDFEECAHKLLKMEFPESQTKELCNMILDCCAQQRTYEKFFGLLAGRFCMLKKEYMESFEGIFKEQYDTIHRLETNKLRNVAKMFAHLLYTDSLPWSVLECIKLSEETTTSSSRIFVKIFFQELCEYMGLPKLNARLKDETLQPFFEGLLPRDNPRNTRFAINFFTSIGLGGLTDELREHLKNTPKVIVAQKPDVEQNKSSPSSSSSASSSSESDSSDSDSDSSDSSSESSSEESDSSSISSHSSASANDVRKKGHGKTRSKEVDKLIRNQQTNDRKQKERRQEHGHQETRTERERRSEKHRDQNSSGSNWRDPITKYTSDKDVPSERNNYSRVANDRDQEMHIDLENKHGDPKKKRGERRNSFSENEKHTHRIKDSENFRRKDRSKSKEMNRKHSGSRSDEDRYQNGAERRWEKSSRYSEQSRESKKNQDRRREKSPAKQK

SEQ ID NO: 206628 - protein, 745 aa, Artificial Sequence
  derived and/or modified sequence
MKSSVAQIKPSSGHDRRENLNSYQRNSSPEDRYEEQERSPRDRDYFDYSRSDYEHSRRGRSYDSSMESRNRDREKRRERERDTDRKRSRKSPSPGRRNPETSVTQSSSAQDEPATKKKKDELDPLLTRTGGAYIPPAKLRMMQEQITDKNSLAYQRMSWEALKKSINGLINKVNISNISIIIQELLQENIVRGRGLLSRSVLQAQSASPIFTHVYAALVAIINSKFPQIGELILKRLILNFRKGYRRNDKQLCLTASKFVAHLINQNVAHEVLCLEMLTLLLERPTDDSVEVAIGFLKECGLKLTQVSPRGINAIFERLRNILHESEIDKRVQYMIEVMFAVRKDGFKDHPIILEGLDLVEEDDQFTHMLPLEDDYNPEDVLNVFKMDPNFMENEEKYKAIKKEILDEGDTDSNTDQDAGSSEEDEEEEEEEGEEDEEGQKVTIHDKTEINLVSFRRTIYLAIQSSLDFEECAHKLLKMEFPESQTKELCNMILDCCAQQRTYEKFFGLLAGRFCMLKKEYMESFEGIFKEQYDTIHRLETNKLRNVAKMFAHLLYTDSLPWSVLECIKLSEETTTSSSRIFVKIFFQELCEYMGLPKLNARLKDETLQPFFEGLLPRDNPRNTRFAINFFTSIGLGGLTDELREHLKNTPKVIVAQKPDVEQNKSSPSSSSSASSSSESDSSDSDSDSSDSSSESSSEESDSSSISSHSSASANDVRKKGHGKTRSKEVDKLIRNQQTNDRKQK

SEQ ID NO: 206629 - protein, 908 aa, Artificial Sequence
  derived and/or modified sequence
MKSSVAQIKPSSGHDRRENLNSYQRNSSPEDRYEEQERSPRDRDYFDYSRSDYEHSRRGRSYDSSMESRNRDREKRRERERDTDRKRSRKSPSPGRRNPETSVTQSSSAQDEPATKKKKDELDPLLTRTGGAYIPPAKLRMMQEQITDKNSLAYQRMSWEALKKSINGLINKVNISNISIIIQELLQENIVRGRGLLSRSVLQAQSASPIFTHVYAALVAIINSKFPQIGELILKRLILNFRKGYRRNDKQLCLTASKFVAHLINQNVAHEVLCLEMLTLLLERPTDDSVEVAIGFLKECGLKLTQVSPRGINAIFERLRNILHESEIDKRVQYMIEVMFAVRKDGFKDHPIILEGLDLVEEDDQFTHMLPLEDDYNPEDVLNVFKMDPNFMENEEKYKAIKKEILDEGDTDSNTDQDAGSSEEDEEEEEEEGEEDEEGQKVTIHDKTEINLVSFRRTIYLAIQSSLDFEECAHKLLKMEFPESQTKELCNMILDCCAQQRTYEKFFGLLAGRFCMLKKEYMESFEGIFKEQYDTIHRLETNKLRNVAKMFAHLLYTDSLPWSVLECIKLSEETTTSSSRIFVKIFFQELCEYMGLPKLNARLKDETLQPFFEGLLPRDNPRNTRFAINFFTSIGLGGLTDELREHLKNTPKVIVAQKPDVEQNKSSPSSSSSASSSSESDSSDSDSDSSDSSSESSSEESDSSSISSHSSASANDVRKKGHGKTRSKEVDKLIRNQQTNDRKQKERRQEHGHQETRTERERRSEKHRDQNSSGSNWRDPITKYTSDKDVPSERNNYSRVANDRDQEMHIDLENKHGDPKKKRGERRNSFSENEKHTHRIKDSENFRRKDRSKSKEMNRKHSGSRSDEDRYQNGAERRWEKSSRYSEQSRESKKNQDRRREKSPAKQK

SEQ ID NO: 206630 - DNA, 2727 bp, Artificial Sequence
  derived and/or modified sequence
atgaaatcttccgtcgctcagatcaaaccctcttccggacacgaccgcagggaaaacttgaattcataccagcggaactcctcaccggaggacaggtacgaagagcaggaacggagccctcgggatagagactattttgattacagtcggtcagactatgagcactctcgacgaggtcgatcctacgatagctcaatggagagtagaaacagagaccgggagaaaaggagagagagagagagagacactgacagaaaacggagcaggaagtccccgtctccaggccggcggaatcctgaaacctctgtgacacagtccagtagtgctcaggatgagcccgcaaccaaaaagaagaaagacgaactggacccactgcttacccggacgggcggagcttacattcctcctgccaagctgagaatgatgcaggagcagattaccgacaaaaattccctggcatatcagcggatgtcttgggaggccttgaagaagtccatcaacggcctcattaacaaagtcaacatatctaacattagcatcatcatccaggaattactgcaggaaaatatagtgcgagaccgggggctcctgtcccgcagcgtgctgcaggcgcagtccgctagccccatcttcacgcacgtgtacgccgcgctggttgccattattaactctaagttcccccaaatcggggagcttattctcaagagactgatcctgaacttcagaaagggatacagacgcaacgacaaacagctgtgcctgactgcctcaaagtttgttgcacatctcattaatcagaacgtcgcccacgaggtgctgtgtttagagatgctcaccttgctcctagagcgaccaacggatgacagcgttgaagtggctatcggcttccttaaagagtgtggtctgaaattgacacaggtctctccccgaggaattaatgccatcttcgagcgactgagaaacattctgcacgaatccgagatagacaaacgcgttcagtacatgatagaggttatgttcgccgtgcggaaggacggatttaaggaccaccctatcattctggagggactcgatctcgtagaagaagatgatcagttcacacatatgctgccgttggaagacgactataatccagaggacgtcctgaatgtgttcaaaatggacccaaacttcatggaaaacgaggaaaaatacaaggctatcaagaaggaaatactagacgaaggggatacggactccaataccgatcaggacgctggcagttcagaagaggatgaggaagaggaggaggaagaaggagaggaagatgaggagggccaaaaagtcacaattcatgacaagactgagattaacctggtctcctttaggaggacaatatacctcgccatccaatcctcacttgactttgaagaatgcgctcataaactattaaagatggaatttccagagtcccagaccaaggaactctgcaatatgattttggactgttgcgcccagcagcggacgtacgaaaaatttttcgggctattggccgggcgattctgtatgctgaaaaaagagtatatggaatcctttgagggaatctttaaagagcagtacgatacaatccaccgtcttgaaacaaacaagctgcgcaatgtggccaagatgtttgcccatctcctctataccgattcactcccttggtccgtactcgagtgcatcaagttatcagaagaaacgaccaccagctcaagtcgaatttttgtgaaaatatttttccaggaactatgcgagtacatggggctgccaaaacttaatgctagacttaaagatgaaacactgcaacctttcttcgaaggcctccttcccagagacaacccgcgcaacacccgatttgccatcaattttttcacaagcatcggactaggaggactcacagacgagcttcgcgaacacctcaaaaatacccccaaggtcatcgtggcccagaagcccgacgtggaacagaataaatcatccccgtcgagctcatcttcagcaagctctagcagcgagtctgattctagtgattccgattctgattcctccgactctagcagcgagtcgtcaagcgaggagtccgattccagctccatttcctcccactcctctgcatccgctaacgacgtgcgaaagaaagggcatggaaagacacggagcaaagaagtcgataagctcatcagaaaccagcagacaaatgaccgtaagcaaaaggagagaagacaggagcatggtcaccaggagacacgaaccgagcgcgaacggaggagcgagaagcaccgggaccagaacagcagtggaagcaattggcgtgacccaatcactaagtatacgagcgataaggacgtgccgtccgagcgaaacaattactccagggtggccaacgatcgggatcaagaaatgcatattgacctggagaataaacacggcgaccctaaaaaaaagcgcggcgaacgtcgaaacagcttcagtgagaacgaaaaacatacccacaggatcaaggattccgagaattttaggcgcaaggatcgtagcaaatcaaaagagatgaatcggaagcactccggcagtcggagcgacgaagaccgataccagaatggcgccgagagacggtgggaaaaatcctccagatattctgagcagtctagagaatcaaagaaaaatcaggacagacggcgagaaaaatcacccgctaaacagaaatag

SEQ ID NO: 206631 - DNA, 2238 bp, Artificial Sequence
  derived and/or modified sequence
atgaaaagctccgtggcccaaatcaagccttcatctggccatgatcgccgtgagaatctgaatagctaccagcggaacagctctcctgaagataggtacgaggagcaagaacgcagtccacgcgaccgggattattttgattactctcgcagcgattatgaacactcgaggaggggcagaagttatgactcctctatggagtctcgtaatcgagaccgcgagaaacgacgcgagcgggaacgagacaccgacagaaaacgatctcgcaaaagccccagtcccggtagaaggaaccccgagacatcagtcactcagtcttctagtgcccaggatgaaccagcgacaaaaaagaagaaagatgagcttgaccccctgctcacacgaacaggcggcgcttacatcccccccgcaaaactgaggatgatgcaggaacagatcaccgacaagaattcactagcctatcaacgcatgtcatgggaggctctgaagaagagtataaacggtctcattaataaggtgaatatcagcaacatcagtattataatccaggagctgctgcaggagaatatagttcgaggccggggcttgctgtcacgttcggtgctgcaggctcaaagcgcgagtcctatattcactcacgtctatgccgcgctggttgctatcattaactccaagttcccccagatcggcgagctcattctaaaaaggctgatcttaaactttaggaaaggctatcgtcggaatgacaagcagttatgtctgacagcgtctaagtttgtggcacacctgatcaaccagaatgtggcacacgaggtgttgtgcctcgagatgctaactctgctgctggaacggccaacagacgattcagtcgaagtggccattgggttcctaaaggaatgcggacttaagctgacacaggtctcacccagaggaattaatgccatttttgagcggctcagaaatatcctccacgagtccgagatcgacaagagggtgcaatacatgatcgaagtcatgttcgcagtgcgtaaggatggctttaaggatcatccaattatcctcgagggcctcgacctcgtcgaggaagatgaccagttcacccacatgttgcctcttgaggacgattacaatccggaagatgtgctgaatgtcttcaaaatggaccctaacttcatggaaaacgaggagaaatacaaagctattaagaaagagattttggacgagggggacaccgatagcaacacggaccaggacgctggtagctctgaagaagatgaggaggaggaggaggaagaaggagaggaagatgaagagggacaaaaggtgactattcacgacaagacagagatcaatctggtgtccttccggagaacgatatacctggcaatccagtctagcctggattttgaagagtgcgctcataagctactcaagatggaatttccagagtctcagactaaagagctgtgcaacatgatcctcgattgttgcgctcagcaacgcacgtacgaaaagttcttcggcctgctggctggacgcttctgcatgctgaaaaaagaatacatggagtccttcgaaggaattttcaaggagcagtacgatacgatccatcgtttagagactaataagctcaggaatgtggctaaaatgtttgctcaccttctgtacacagatagcttgccatggtcagttttggagtgtatcaagctcagcgaagagaccacgacttcttcctctaggatattcgtgaaaattttcttccaggagctgtgtgaatatatgggactgcctaagttaaacgctcgcctcaaggacgagacactacagccatttttcgaggggctgctcccgagggacaaccctcgaaatacacgattcgctattaactttttcacatcaattggactcggaggattgaccgacgaactgagggaacacttaaagaatacacctaaggtgattgtcgctcagaaaccggatgttgaacagaacaaaagcagcccctcgtcctctagctctgccagttcttccagcgaatctgattccagcgattctgattctgacagctcggattccagttctgagtcctcctcagaggagtccgacagttcctcgatcagctcacacagtagcgcctctgccaacgacgtgagaaagaaaggccacggaaagactagatcgaaggaggtcgacaaactcatacgcaatcagcagactaatgatcgtaaacagaagtag

SEQ ID NO: 206632 - DNA, 2727 bp, Artificial Sequence
  derived and/or modified sequence
atgaagtcttccgtggcccagataaagccaagttctgggcacgacagaagagagaatttgaattcataccagcgaaactcctcgcccgaagacagatacgaggaacaggagcggagtccccgggatagagattactttgattatagtcgaagtgactacgagcactctagacggggaaggtcctacgattcaagcatggagtctcgcaaccgggatcgcgagaagcggcgagaacgcgagcgcgatactgatcgcaaaagatcccggaagtccccaagccctggacggagaaatccggaaacatcagtaacacagtcaagttcagcccaagatgagcctgcaaccaagaagaagaaggatgaattggatcccctcctcacgcggacaggcggcgcatacattccacccgccaagctgagaatgatgcaagagcagatcactgataagaattctctcgcctaccagcggatgtcttgggaagcactgaagaagtcaataaatggccttatcaataaagtgaacattagcaacatctccatcataattcaggagttgctgcaggaaaacatcgtgcgaggacgggggttgctgtcccgaagtgttctgcaggcgcagagtgcctcacccatctttacacatgtgtacgccgctcttgtcgccattatcaactcgaagtttccccaaataggtgaactcattctgaagcggctcattttaaattttcggaaggggtatcgcaggaatgacaaacagttatgcctgacggcctcaaagttcgtagcccacctgattaaccagaatgtggcacatgaggtgctgtgtttggagatgttaaccctgctgctggaacgcccaacagacgatagtgttgaggtggccatcggattcctgaaggaatgcggattgaaactgacacaggtctccccaagaggcatcaacgccattttcgagcgtcttagaaacatacttcatgagagtgagatagataaaagggtacagtacatgatcgaggtgatgtttgccgtgcggaaggatggttttaaggaccatccaataatcctagaaggacttgacctcgtcgaagaggacgaccagttcacccacatgctgcccctcgaggacgactacaacccagaagatgtgctgaacgtgtttaaaatggaccccaatttcatggagaacgaggaaaagtacaaagcaattaagaaagagatcttagacgagggcgatacggattctaacacagaccaagacgcaggctcttcggaagaagacgaggaagaggaggaggaggagggcgaggaagatgaagagggtcaaaaggtgacgattcacgataagaccgaaatcaacttggttagcttccgaagaactatctatctagccatccagtcatcacttgactttgaagagtgcgcccataaacttctgaagatggaattccccgaaagtcaaactaaggagttatgcaacatgatcttggattgttgtgcccaacagcgcacctacgagaagtttttcggcctgctggcgggacgcttctgcatgctgaaaaaagaatacatggaatccttcgaaggcattttcaaggagcaatacgacaccattcaccggctcgagacaaataagttgaggaatgtggcaaagatgttcgctcacctgctgtataccgacagcctaccttggagcgtgcttgagtgtattaagctgagcgaagaaaccaccacgtcatcttcccggatattcgtgaagatcttctttcaggagttgtgtgaatacatggggcttcctaaacttaatgcgcggcttaaggatgagaccctgcagcccttcttcgaaggcctactccctagggacaacccgcgcaataccagattcgcaatcaatttttttacttccatcgggctcggaggcctgactgatgagctgagagagcatttaaaaaatactcccaaggtcatcgttgctcaaaaaccagatgtcgaacaaaacaagtcgagtccttcgagtagtagcagcgcctcgtcctcatctgagtcagattcttccgattctgacagcgatagtagcgatagctcaagtgaatcatctagcgaggaaagtgatagtagctcaatctcgtcccattcaagcgctagcgcaaatgatgtccgcaagaaaggacacgggaaaactcggagcaaggaagtggacaagttgattcgtaaccaacagacgaacgacagaaagcagaaagagagaaggcaggaacacggtcaccaggagacaaggaccgaacgggagcgccgatcggaaaagcatcgagaccagaacagtagcggatcaaactggcgagacccaatcactaagtataccagcgacaaggatgtaccgtcggagaggaataactacagccgagtggccaatgacagagatcaggagatgcacatcgatttggagaataagcatggggaccccaagaaaaagcgaggagagcgccgaaactccttcagcgagaacgaaaagcacacccatcgcattaaggacagcgagaacttccggagaaaggataggtcaaaatcaaaggaaatgaaccgcaagcactcaggatcaagatctgatgaagatagatatcaaaacggcgcagagagaaggtgggagaagtcatcacgctatagcgaacagtctagggaaagtaaaaaaaatcaggatcgcaggcgggagaaaagtccagctaagcagaagtag

SEQ ID NO: 206633 - DNA, 2727 bp, Artificial Sequence
  derived and/or modified sequence
atgaagagctctgtggcccagatcaagcccagcagcggccatgaccggcgggagaacctgaacagctaccagaggaacagcagccctgaggacagatatgaggagcaggagaggagcccccgggaccgggactactttgactacagcagaagtgactatgagcacagcagaagaggccgctcctatgacagctccatggagagcaggaacagagaccgggagaagaggcgggagcgggagcgggacacagacaggaagaggagcaggaagagccccagccctggaagaagaaatcctgagacctctgtgacccagagcagcagcgcccaggatgagcccgccaccaagaagaagaaggatgagctggaccccctgctgaccaggactggaggagcctacatccccccagccaagctgaggatgatgcaggagcagatcacagacaagaacagcctggcctaccagaggatgtcctgggaggccctgaagaagagcatcaatggcctcatcaacaaggtgaacatcagcaacatcagcatcatcatccaggagctgctgcaggagaacatcgtgcgggaccggggcctgctgagccgctctgtgctgcaggcccagagcgccagccccatcttcacccacgtgtatgctgccctggtggccatcatcaacagcaagttcccccagattggagagctgatcctgaagaggctcatcctgaacttcaggaagggctacagaagaaatgacaagcagctgtgcctgacagccagcaagtttgtggcccacctgatcaaccagaatgtggcccacgaggtgctgtgcctggagatgctgaccctgctgctggagcggcccacagatgattctgtggaggtggccatcggcttcctgaaggaatgtggcctgaagctgacccaggtgagcccccggggcatcaatgccatctttgagcggctgaggaacatcctgcacgagagcgagattgacaagagggtgcagtacatgattgaggtgatgtttgctgtgaggaaggatggcttcaaggaccaccccatcatcctggagggcctggacctggtggaggaggatgaccagttcacccacatgctgcccctggaggatgactacaacccagaagatgtgctgaatgtgttcaagatggaccccaacttcatggagaatgaggagaagtacaaggccatcaagaaggagatcctggatgaaggagacacagacagcaacacagaccaggatgctggcagcagcgaggaggatgaggaggaggaggaggaggagggggaggaggatgaggagggccagaaggtgaccatccatgacaagacagagatcaacctggtgtccttccggaggaccatctacctggccatccagagcagcctggactttgaagaatgtgcccacaagctgctgaagatggagttccctgagagccagaccaaggagctgtgcaacatgatcctggactgctgtgcccagcagaggacctatgagaagttcttcggcctgctggccggccgcttctgcatgctgaagaaggagtacatggagagctttgagggcatcttcaaggagcagtatgacaccatccaccggctggagaccaacaagctgagaaatgtggccaagatgtttgcccacctgctgtacacagacagcctgccctggagcgtgctggagtgcatcaagctgtctgaggagaccaccaccagcagcagccgcatctttgtgaagatcttcttccaggagctgtgtgagtacatgggcctgcccaagctgaatgcccggctgaaggatgagaccctgcagcccttctttgagggcctgctgccccgggacaaccccaggaacaccaggtttgccatcaacttcttcaccagcatcggcctgggcggcctgacagatgagctgcgggagcacctgaagaacacccccaaggtgattgtggcccagaagccagatgtggagcagaacaagagcagccccagcagcagcagcagcgccagcagcagcagcgagagtgacagcagtgacagcgacagcgacagcagtgacagcagcagcgagagcagcagcgaggagagtgacagcagcagcatcagcagccacagcagcgccagcgccaatgatgtgaggaagaagggccacggcaagaccaggagcaaggaggtggacaagctgatccggaaccagcagaccaatgacaggaagcagaaggagcggcggcaggagcacggccaccaggagaccaggacagagcgggagcggcgctctgagaagcaccgggaccagaacagcagcggcagcaactggagggaccccatcaccaagtacaccagtgacaaggatgtgcccagcgagaggaacaactacagccgggtggccaatgaccgggaccaggagatgcacatcgacctggagaacaagcacggggaccccaagaagaagagaggagagaggagaaattccttctctgaaaatgagaagcacacccaccgcatcaaggacagcgagaacttccggaggaaggacaggagcaagagcaaggagatgaacaggaagcacagcggcagcagaagtgatgaggaccgctaccagaatggagctgagcggcgctgggagaagagcagccgctacagcgagcagagccgggagagcaagaagaaccaggacagaagaagagagaagagccctgccaagcagaagtag

SEQ ID NO: 206634 - DNA, 2238 bp, Artificial Sequence
  derived and/or modified sequence
atgaagagctctgtggcccagatcaagcccagcagcggccatgaccggcgggagaacctgaacagctaccagaggaacagcagccctgaggacagatatgaggagcaggagaggagcccccgggaccgggactactttgactacagcagaagtgactatgagcacagcagaagaggccgctcctatgacagctccatggagagcaggaacagagaccgggagaagaggcgggagcgggagcgggacacagacaggaagaggagcaggaagagccccagccctggaagaagaaatcctgagacctctgtgacccagagcagcagcgcccaggatgagcccgccaccaagaagaagaaggatgagctggaccccctgctgaccaggactggaggagcctacatccccccagccaagctgaggatgatgcaggagcagatcacagacaagaacagcctggcctaccagaggatgtcctgggaggccctgaagaagagcatcaatggcctcatcaacaaggtgaacatcagcaacatcagcatcatcatccaggagctgctgcaggagaacatcgtgcggggccggggcctgctgagccgctctgtgctgcaggcccagagcgccagccccatcttcacccacgtgtatgctgccctggtggccatcatcaacagcaagttcccccagattggagagctgatcctgaagaggctcatcctgaacttcaggaagggctacagaagaaatgacaagcagctgtgcctgacagccagcaagtttgtggcccacctgatcaaccagaatgtggcccacgaggtgctgtgcctggagatgctgaccctgctgctggagcggcccacagatgattctgtggaggtggccatcggcttcctgaaggaatgtggcctgaagctgacccaggtgagcccccggggcatcaatgccatctttgagcggctgaggaacatcctgcacgagagcgagattgacaagagggtgcagtacatgattgaggtgatgtttgctgtgaggaaggatggcttcaaggaccaccccatcatcctggagggcctggacctggtggaggaggatgaccagttcacccacatgctgcccctggaggatgactacaacccagaagatgtgctgaatgtgttcaagatggaccccaacttcatggagaatgaggagaagtacaaggccatcaagaaggagatcctggatgaaggagacacagacagcaacacagaccaggatgctggcagcagcgaggaggatgaggaggaggaggaggaggagggggaggaggatgaggagggccagaaggtgaccatccatgacaagacagagatcaacctggtgtccttccggaggaccatctacctggccatccagagcagcctggactttgaagaatgtgcccacaagctgctgaagatggagttccctgagagccagaccaaggagctgtgcaacatgatcctggactgctgtgcccagcagaggacctatgagaagttcttcggcctgctggccggccgcttctgcatgctgaagaaggagtacatggagagctttgagggcatcttcaaggagcagtatgacaccatccaccggctggagaccaacaagctgagaaatgtggccaagatgtttgcccacctgctgtacacagacagcctgccctggagcgtgctggagtgcatcaagctgtctgaggagaccaccaccagcagcagccgcatctttgtgaagatcttcttccaggagctgtgtgagtacatgggcctgcccaagctgaatgcccggctgaaggatgagaccctgcagcccttctttgagggcctgctgccccgggacaaccccaggaacaccaggtttgccatcaacttcttcaccagcatcggcctgggcggcctgacagatgagctgcgggagcacctgaagaacacccccaaggtgattgtggcccagaagccagatgtggagcagaacaagagcagccccagcagcagcagcagcgccagcagcagcagcgagagtgacagcagtgacagcgacagcgacagcagtgacagcagcagcgagagcagcagcgaggagagtgacagcagcagcatcagcagccacagcagcgccagcgccaatgatgtgaggaagaagggccacggcaagaccaggagcaaggaggtggacaagctgatccggaaccagcagaccaatgacaggaagcagaagtag

SEQ ID NO: 206635 - DNA, 2727 bp, Artificial Sequence
  derived and/or modified sequence
atgaagagctctgtggcccagatcaagcccagcagcggccatgaccggcgggagaacctgaacagctaccagaggaacagcagccctgaggacagatatgaggagcaggagaggagcccccgggaccgggactactttgactacagcagaagtgactatgagcacagcagaagaggccgctcctatgacagctccatggagagcaggaacagagaccgggagaagaggcgggagcgggagcgggacacagacaggaagaggagcaggaagagccccagccctggaagaagaaatcctgagacctctgtgacccagagcagcagcgcccaggatgagcccgccaccaagaagaagaaggatgagctggaccccctgctgaccaggactggaggagcctacatccccccagccaagctgaggatgatgcaggagcagatcacagacaagaacagcctggcctaccagaggatgtcctgggaggccctgaagaagagcatcaatggcctcatcaacaaggtgaacatcagcaacatcagcatcatcatccaggagctgctgcaggagaacatcgtgcggggccggggcctgctgagccgctctgtgctgcaggcccagagcgccagccccatcttcacccacgtgtatgctgccctggtggccatcatcaacagcaagttcccccagattggagagctgatcctgaagaggctcatcctgaacttcaggaagggctacagaagaaatgacaagcagctgtgcctgacagccagcaagtttgtggcccacctgatcaaccagaatgtggcccacgaggtgctgtgcctggagatgctgaccctgctgctggagcggcccacagatgattctgtggaggtggccatcggcttcctgaaggaatgtggcctgaagctgacccaggtgagcccccggggcatcaatgccatctttgagcggctgaggaacatcctgcacgagagcgagattgacaagagggtgcagtacatgattgaggtgatgtttgctgtgaggaaggatggcttcaaggaccaccccatcatcctggagggcctggacctggtggaggaggatgaccagttcacccacatgctgcccctggaggatgactacaacccagaagatgtgctgaatgtgttcaagatggaccccaacttcatggagaatgaggagaagtacaaggccatcaagaaggagatcctggatgaaggagacacagacagcaacacagaccaggatgctggcagcagcgaggaggatgaggaggaggaggaggaggagggggaggaggatgaggagggccagaaggtgaccatccatgacaagacagagatcaacctggtgtccttccggaggaccatctacctggccatccagagcagcctggactttgaagaatgtgcccacaagctgctgaagatggagttccctgagagccagaccaaggagctgtgcaacatgatcctggactgctgtgcccagcagaggacctatgagaagttcttcggcctgctggccggccgcttctgcatgctgaagaaggagtacatggagagctttgagggcatcttcaaggagcagtatgacaccatccaccggctggagaccaacaagctgagaaatgtggccaagatgtttgcccacctgctgtacacagacagcctgccctggagcgtgctggagtgcatcaagctgtctgaggagaccaccaccagcagcagccgcatctttgtgaagatcttcttccaggagctgtgtgagtacatgggcctgcccaagctgaatgcccggctgaaggatgagaccctgcagcccttctttgagggcctgctgccccgggacaaccccaggaacaccaggtttgccatcaacttcttcaccagcatcggcctgggcggcctgacagatgagctgcgggagcacctgaagaacacccccaaggtgattgtggcccagaagccagatgtggagcagaacaagagcagccccagcagcagcagcagcgccagcagcagcagcgagagtgacagcagtgacagcgacagcgacagcagtgacagcagcagcgagagcagcagcgaggagagtgacagcagcagcatcagcagccacagcagcgccagcgccaatgatgtgaggaagaagggccacggcaagaccaggagcaaggaggtggacaagctgatccggaaccagcagaccaatgacaggaagcagaaggagcggcggcaggagcacggccaccaggagaccaggacagagcgggagcggcgctctgagaagcaccgggaccagaacagcagcggcagcaactggagggaccccatcaccaagtacaccagtgacaaggatgtgcccagcgagaggaacaactacagccgggtggccaatgaccgggaccaggagatgcacatcgacctggagaacaagcacggggaccccaagaagaagagaggagagaggagaaattccttctctgaaaatgagaagcacacccaccgcatcaaggacagcgagaacttccggaggaaggacaggagcaagagcaaggagatgaacaggaagcacagcggcagcagaagtgatgaggaccgctaccagaatggagctgagcggcgctgggagaagagcagccgctacagcgagcagagccgggagagcaagaagaaccaggacagaagaagagagaagagccctgccaagcagaagtag

SEQ ID NO: 206636 - DNA, 2727 bp, Artificial Sequence
  derived and/or modified sequence
atgaagagcagcgtggcccagatcaagcccagcagcggccacgaccgccgcgaaaatttgaatagctaccagcgcaactctagcccggaggaccggtatgaagaacaggaaagatcaccgagagatagggactactttgattactccaggtccgactacgagcattcacgaaggggaaggtcttacgattcaagtatggagtcccggaacagggatcgcgaaaaaaggcgggaacgggagcgagacaccgatagaaaacgatccaggaagtccccgtctcctgggcggcgcaaccctgagacctcagtcacccagagcagctctgctcaggacgagccagcaactaagaagaaaaaagacgagttggatccactgttgacaagaaccggtggcgcttacattccgccggcgaagctgaggatgatgcaagagcagattacagataaaaattcacttgcctaccagaggatgtcatgggaagcactaaagaaaagcatcaacgggctcatcaataaagtgaacattagcaacatttctataatcatccaggagctgttgcaagaaaacatcgtgagagaccgcggtctgctgagccgcagtgtgcttcaagcacagagtgcttctcctatttttacccacgtatacgcagctctggtcgcaattatcaattccaagtttcctcagataggcgaactgattctcaagcgcttgattctgaactttcggaaaggctatcggagaaacgacaagcaactgtgcctcaccgctagcaaattcgttgcccacctgatcaatcagaatgttgcccacgaggtgctgtgtctggagatgctaacgcttctgctggaaaggcctaccgacgattctgtagaggtggctatcggatttctcaaagaatgcgggctgaaactgacccaggtgtcccccaggggaatcaacgcgatcttcgagagactgcgaaacatcttgcacgaatctgaaatcgataagcgcgtccagtacatgatcgaggttatgttcgccgtgcgcaaggatggatttaaagatcatcccatcatcctggagggtctagatcttgtcgaggaggatgaccaattcacacacatgcttccgttggaggacgactacaaccctgaagatgtgctgaatgtgtttaagatggacccgaacttcatggagaacgaggagaagtacaaagctatcaagaaggagatcttagacgaaggggatactgatagtaatactgatcaggacgcaggcagctcagaggaagatgaggaagaggaagaagaggaaggtgaagaggatgaggaaggacagaaagtcacaatccatgacaaaacagagattaatctagtgtcattccgacgcacaatctacctggcaattcaatcatctctggatttcgaggagtgcgctcacaagctcctgaagatggaattcccagagagtcaaaccaaggagctgtgtaatatgatcttggactgttgcgcccaacaaagaacctacgagaaattttttgggcttctcgccgggagattctgcatgttgaagaaagagtatatggaaagcttcgagggaatctttaaggagcagtacgacaccatccatagactggagaccaacaaactccggaatgttgccaaaatgttcgcccacctgttgtatacagacagtctgccctggtccgtgcttgagtgcatcaaactttctgaggagactactactagcagctcacgcatattcgtaaagatcttctttcaagaactgtgtgagtacatgggcctgccaaaacttaatgctcgcctaaaagatgagacacttcagcctttttttgagggactgctccccagggataaccctcgcaatacacgctttgcaatcaatttcttcaccagcatcggactgggcggtctgacagatgagttgcgggaacacctaaagaacactcccaaggttatcgtagcacagaaacccgacgtagagcagaacaaaagttcaccatcaagctctagtagtgcttcctccagcagcgaatcggactcttccgactctgatagcgactccagcgattcatctagtgaatcttcatcagaagagagtgattccagctccatttcctcccattcttcagccagcgccaacgatgtccgaaagaaagggcacggtaaaacccgaagtaaggaggtggacaaactcattaggaatcagcagactaatgataggaaacagaaggaaagaaggcaggaacatggacaccaggagacgcgaaccgaaagagagaggcgatcagagaaacacagggaccagaatagctccgggtctaactggcgggacccaataacaaagtatacctccgacaaggatgtgccctctgagcgtaataattatagcagggtggccaacgacagagaccaggagatgcacatagacttggaaaataagcatggagaccccaagaaaaagagaggagagcgccggaactcatttagcgagaatgaaaagcacacacatcgaatcaaggacagtgaaaatttccgcagaaaagatagatccaagtcgaaagagatgaatagaaaacatagcggatcccgatcagatgaagatcggtatcagaacggggccgaaaggagatgggaaaagagcagtcggtacagcgagcaatctcgagaatcgaaaaagaatcaggatcgccgtcgtgagaagtcaccggcaaaacagaaatag

SEQ ID NO: 206637 - DNA, 2238 bp, Artificial Sequence
  derived and/or modified sequence
atgaagagcagcgtggcccagatcaagcccagcagcggccacgaccggcgggagaacctgaacagctatcagagaaattctagcccggaagataggtacgaggagcaggaaagaagcccaagagatagggactacttcgactactcgcggagtgactacgaacactcacgacgcgggagatcttacgactcatctatggagtctcgcaacagagaccgcgaaaaaaggagggagagggagcgagacacagataggaaacggtcgaggaagtcaccctcacctggacgacgaaaccctgagacctcagtcacgcagtcatcgtcagcccaggacgaacctgcaactaaaaaaaaaaaggatgaactagatcctctgcttacgcgcacagggggtgcatacataccccccgccaagctgcggatgatgcaggaacagattaccgacaaaaacagcctcgcttatcagcgcatgtcctgggaggccctcaagaagtctatcaacggactaattaacaaggtgaatatctcaaacataagtattattatccaagaactcctgcaagagaacatcgtgcgaggtcggggtctgttgagtagatcggtgctgcaggcacagtctgcctctccaatttttacgcatgtgtatgccgcactggtggccattatcaatagtaagttcccccagatcggagagctaatcttgaagaggcttatactcaacttccgaaaaggatatcggaggaacgataagcagctatgtttgaccgcatcgaaattcgtggcccaccttatcaatcaaaatgtggcacatgaagtgctctgtcttgagatgctgacacttctcctggaacggccgaccgatgacagcgttgaagtggccattggcttcctgaaggagtgcggcctaaagcttacccaagtatcccctagggggatcaacgcgattttcgagagacttaggaacattctgcacgagtccgaaattgacaaacgagttcagtatatgatcgaggttatgtttgccgtgcgcaaggacgggtttaaggatcatcccattatcctcgagggactggatctcgtggaggaggatgaccaattcacccatatgttgcctttagaggatgactacaatccagaggacgttttaaacgtgttcaagatggacccaaatttcatggaaaatgaggagaagtacaaggcaataaagaaggaaatcttggacgaaggtgatacagattctaatacagatcaagacgcggggagctcagaagaggacgaggaagaagaagaagaggaaggagaggaagacgaagaggggcagaaggtcacaatccatgataagaccgaaatcaatcttgtttcttttcgtcgaaccatttatttagccatccagtcgagtctggacttcgaggagtgcgcccataagctattgaaaatggaattccctgagtcccagaccaaagaactttgcaacatgatcctggattgctgtgcccagcagcgtacctacgagaaattcttcgggctgctcgctggcagattctgtatgcttaaaaaagagtatatggagagttttgaaggcatttttaaggaacagtatgacacaattcatcggctggagaccaataagctgaggaacgtggccaaaatgttcgcccatctgctgtatacagactctttgccttggtcagtactggaatgtatcaagctttctgaggagaccacgacctcatcttcccggatatttgttaaaatattctttcaggagctctgcgagtacatgggattgcccaagctaaatgccagactaaaagatgagacactgcaaccttttttcgagggtctgctcccacgggataaccccaggaatactcgctttgcgattaatttttttactagtattgggctgggaggcctgacagatgaactacgcgaacacctgaagaacacgccaaaagtcattgtggcacagaaacctgatgttgagcagaacaaatctagtccaagctccagttccagcgcttcctcgtccagtgaatccgattcatctgattccgatagcgactccagtgactcttcctccgagtcttcaagcgaggagtcagactccagctcaatcagtagtcacagctccgcctctgccaacgacgtgagaaaaaagggccacggaaagacacgttctaaggaagtcgacaaattaatccgtaatcaacagacaaacgatcggaaacagaaatag

SEQ ID NO: 206638 - DNA, 2727 bp, Artificial Sequence
  derived and/or modified sequence
atgaagagcagcgtggcccagatcaagcccagcagcggccacgaccggcgtgaaaatctcaactcttaccagcgcaactcctcaccagaggataggtacgaggaacaggaaaggagcccaagggacagagattatttcgattacagtcggagcgattacgaacattctcggcggggcaggagttacgatagcagtatggaatcacgaaaccgcgacagggaaaagcgacgcgaacgtgagcgcgacactgacaggaaacgctcccggaagtcacccagcccaggccgacgcaatccagagacttcagtgacccagtctagcagcgcccaggatgaacccgccactaagaaaaagaaagatgagctggaccctctcctgacaaggactggcggtgcatacatcccccccgctaagctccggatgatgcaggagcagatcaccgataaaaactctcttgcataccagcgaatgtcctgggaggctctgaaaaagtcgattaacgggctgatcaataaagtgaacatctcaaacatcagcatcataatccaagagctcctgcaggaaaatattgttagggggcgcggcctgttgagccgttccgtcttgcaggcacaaagtgccagtcccatctttacccatgtatacgccgcattggtggcaatcatcaacagtaagtttccccagatcggtgaacttattctgaaaaggctgattctcaactttaggaagggttataggcgaaacgacaagcagctgtgtctgaccgcctcgaaattcgtggcccacctgattaatcagaacgttgcgcatgaagtcctgtgtctggaaatgctgactttattattggaaaggcccacggatgatagcgttgaagttgcaatcgggttccttaaagagtgcggcctgaagctgacacaggtatcacccagaggcattaatgcgattttcgaacgactgagaaacatattacatgagtcagaaatcgacaaaagggtccagtacatgattgaggtgatgtttgccgtcagaaaggatggattcaaagatcatcctattattttggagggccttgacctggttgaagaagacgatcagtttactcacatgctcccgttggaagacgattacaatcctgaggatgtcctgaacgtgtttaaaatggatcctaacttcatggagaacgaggagaagtataaagctatcaagaaggagatcctggacgagggtgataccgatagcaataccgatcaggacgccgggtctagcgaagaagacgaagaagaggaagaagaggaaggtgaagaggacgaggaggggcaaaaggttaccattcacgataaaacagagataaacctcgtctccttccgacgtaccatctatttagcaattcagtccagccttgatttcgaagagtgcgcacacaaactcctgaaaatggagttccctgagtcacagacaaaggagctgtgtaacatgatcctagactgttgtgcacagcagcgaacatatgagaagttttttgggcttctagctggccgattctgtatgttaaagaaggaatacatggagtcatttgagggaatattcaaagagcaatatgacactattcaccggcttgaaacgaacaaactaaggaacgttgccaaaatgttcgcccatctgctgtacaccgactccttgccctggtccgtcctcgaatgcatcaagctatctgaggaaacaacgacatccagttctagaatttttgtgaaaattttctttcaggagttgtgcgagtacatggggctccctaagctgaatgcacggctgaaggacgagaccctgcaaccattctttgagggcctgctccctagggacaatcccaggaatactcggttcgcgatcaatttcttcacttctatcggcctggggggccttaccgatgagctcagggaacaccttaagaacacaccaaaggtaatcgttgcccagaagcccgacgtagagcaaaataagtcttctcctagctcctctagctcagcaagttcatcaagcgagtccgattctagtgatagcgatagtgacagcagtgactcgtcctcagaaagtagctctgaggaatccgactcaagtagtatcagcagtcattctagcgcatcagccaatgatgtgcgtaagaaaggacacgggaaaacccggtcaaaggaagtggacaaactgatccgaaaccagcagacaaatgacagaaaacaaaaagaacggcggcaggagcatggccaccaagagactagaactgaacgcgagcggcgttcagagaaacatagggaccaaaactccagcgggtctaactggagggatcctattaccaagtacacatcagataaagatgtccctagtgaaagaaacaattattcccgggtcgccaatgatcgggatcaggagatgcacatcgatctcgaaaacaagcatggagaccctaagaagaaacgtggagagcgacggaactcgttttccgaaaatgagaaacacacccaccgcattaaagactccgaaaactttcgccggaaagacaggtcaaagtcaaaggaaatgaacaggaaacatagcggctcaaggagtgatgaagacaggtatcagaacggcgctgagaggcgatgggagaagagctccagatatagtgagcagagtcgggagtccaagaaaaatcaagatagaaggagggagaagtcaccagcaaagcagaagtag

SEQ ID NO: 206639 - DNA, 2727 bp, Artificial Sequence
  derived and/or modified sequence
atgaaatctagcgtcgctcagatcaagccttccagcggccacgataggcgcgaaaacttaaattcttaccagcgcaactcctctcccgaagatcggtacgaggagcaagaacgaagcccacgcgatcgggactacttcgactactctagatcagactatgaacattcacgtagaggcagatcttacgatagttccatggaatccaggaacagagatcgggagaagaggagggagcgcgagagggacaccgacagaaagcgctcacgcaagtcgcccagcccagggaggaggaatcctgaaaccagtgtcacccaatcttcatctgcacaagacgagcccgcaacaaaaaagaagaaggacgagctagatccccttctgactaggacagggggtgcatatatccccccagcgaagctcaggatgatgcaggagcagatcactgacaagaacagtctcgcttaccaaaggatgagctgggaggccctcaagaaatctatcaatgggctgattaataaagtaaacatctctaacatatcaattatcatacaggagttgctccaagagaatatagtgagagatcgcggattactatcaagatcagtgttacaggcgcagtccgcctccccaatttttacgcatgtgtacgccgctctagtggccattattaattccaaatttccacagataggagagttaattctgaaacggctgatccttaactttaggaagggttataggcggaacgataagcaactatgtttgactgcctccaagtttgtagcccatctgatcaatcaaaacgtggcacacgaggttctgtgcctggagatgttgaccctgctgctagagcggccaactgacgactcggtcgaggttgctataggattcctgaaggaatgtggccttaaacttacacaagtatctccgagagggatcaacgcaatcttcgagcggctcaggaacatccttcatgagtccgagatagacaaacgcgtgcagtacatgatcgaggtgatgtttgcagtgcgcaaggatggctttaaggaccatccaatcatattggaaggtctcgacctcgtcgaagaagacgatcagttcacacatatgctcccattggaggatgactacaatccagaagacgttctgaatgtatttaaaatggacccaaattttatggagaacgaggagaagtacaaggctatcaagaaggaaatcctggatgaaggcgataccgattccaataccgatcaagatgccggatcttcagaggaggacgaggaggaggaagaggaggagggggaggaggatgaggaagggcagaaggtcactattcacgataagactgagataaacctggtgagtttcaggcgcacaatctacctcgcgatacaaagctctctggatttcgaggaatgtgcgcacaagctcctcaaaatggagttccctgagagtcagactaaggagctgtgcaacatgattctggactgctgtgcacagcagcgcacatatgaaaaattctttggccttttagccggacgattctgtatgctgaaaaaagagtacatggaatcttttgaaggaatattcaaggagcagtacgatacaatccacagactggaaaccaacaaattgagaaacgtagctaagatgttcgctcacctcttatataccgactctttgccctggagcgtactcgaatgtattaagctgtcagaggagaccacaacctcgagctcgcgcattttcgtaaagatcttttttcaggaactgtgtgagtacatggggctgcctaaattgaacgctagactgaaagatgagacactccaacctttctttgagggactgttaccgagggataatcctcgcaacactcgttttgcaatcaacttctttacaagcataggcctcggcggactgacggacgagctgagggagcacctgaaaaacaccccgaaggtcatcgttgcccagaagcctgatgttgagcagaataagtcctcgccttccagttcttctagcgccagttcaagctctgaaagcgacagctctgattcagactccgactccagcgatagctccagcgaaagttcaagcgaggagtctgactcttcaagcatctctagtcatagctctgcaagcgcgaacgacgtccgcaaaaagggtcacggaaaaacccggagtaaagaggtggacaagctcatcagaaaccagcaaacaaatgatcgcaaacaaaaggagcggaggcaggagcatggccaccaggagacgagaactgagagagagcggcgttccgagaaacatcgggaccagaattcaagtggctcgaactggcgggatccgatcactaaatatacatcagataaggatgtcccttctgagcgtaataactattcacgagtggccaacgatagagatcaggaaatgcatatcgatctggagaataaacacggtgaccccaagaagaagagaggcgagcggcgtaattctttcagcgaaaatgagaagcacacgcacagaatcaaagacagtgagaatttcaggaggaaggatagatccaagtcaaaggagatgaatagaaagcactctggctcaaggtccgatgaggacagataccagaatggagctgaaaggcgctgggaaaagagttccagatattcagagcagagtcgggaatccaaaaagaatcaggaccgccgaagggaaaaaagccctgccaagcagaagtag

SEQ ID NO: 206640 - DNA, 2238 bp, Artificial Sequence
  derived and/or modified sequence
atgaaatcatccgtcgctcaaattaaaccaagtagcggtcatgaccgtagagagaacctcaattcttaccagaggaattcgtcaccagaggatcggtatgaggaacaagaacgaagcccccgagatcgggattatttcgactacagcagaagcgattatgagcatagccggcgagggagatcttacgacagttccatggagagtagaaatcgcgatagagaaaagcgccgagagcgggaaagggatactgaccgcaaacggtcccgtaagagccctagcccaggtcgcagaaatccagagacttctgtgacccaatcatccagtgctcaggatgagcctgcaacaaaaaagaagaaagacgagctggatcctctcttgacccggaccggcggtgcatacatccctcccgctaaactccgtatgatgcaggaacagatcacagacaagaatagtcttgcttatcagcggatgagctgggaggctctgaagaagagtatcaatggcttgataaacaaggtgaacatttctaatatttcaatcataatccaagaacttctccaggaaaacatcgtgcgcggaaggggactgctcagccgatccgtcttgcaggcccagagtgcatctcctattttcacgcacgtctatgccgctctagtggcaattattaattccaaattcccacaaattggggagctgattttaaaacgactcattctgaactttagaaaggggtaccgcagaaacgacaagcagctgtgtctgactgcctcaaaattcgtggcccacttaatcaatcagaatgtggctcacgaggtgctctgtctggaaatgctcactctgctgttggaaaggcccacagatgattccgtggaggtggcgattggatttctgaaggaatgcggattaaaactcactcaggtgtctccaagaggtataaatgctattttcgagagactccgcaacatcctgcacgaatccgagatcgataaacgggtgcagtatatgattgaagtgatgtttgctgtccgaaaagatggatttaaggaccaccctatcatcctcgagggattagaccttgtcgaagaagatgatcagttcacacatatgcttcctctagaggacgactacaatcctgaagacgtgctcaacgtattcaaaatggatccaaattttatggaaaacgaggaaaagtataaagccatcaagaaagagattctggatgagggagataccgatagtaacacagatcaggatgccggatcatctgaggaagatgaagaggaagaagaagaagagggcgaggaggacgaggagggtcagaaagtcaccattcatgataagacagagataaatctggtcagctttcggaggaccatctatctggcaatccagtcatcactcgacttcgaggagtgtgcacataagctcctcaagatggagtttccagaaagccagaccaaggagctgtgcaatatgatcctcgattgttgcgcacaacaacggacttacgagaaattctttggcttattggcgggacggttctgtatgctgaagaaagagtacatggaaagtttcgagggcatattcaaagagcagtacgacactatccatagactggagacaaacaagctccgaaatgtcgccaagatgttcgcacatctgctgtacacagatagccttccctggtcagttctggaatgcattaaactaagcgaggaaactacgacctcaagtagtcgtatttttgtgaagatcttttttcaagaactctgcgagtatatgggcctcccaaaactgaatgcccgtctgaaggatgagactctacaaccgtttttcgagggactgctacccagggacaacccacgtaatacacggttcgccatcaatttttttaccagtatcggacttggaggcctgacagacgagttgagggagcatttgaaaaacacgccgaaggtgatagttgcccagaaacccgacgtggagcagaacaaatcgagtccaagttcaagctcctcggcgtcaagctccagcgaatccgatagtagcgactcagactctgacagctcagattcttcttccgaatctagttcggaagaatccgatagttcctcgatcagctcacactccagcgcctccgccaatgacgtgaggaaaaaggggcacggaaaaactagaagcaaggaagtggacaagttgatacgcaatcagcagacaaacgaccgaaaacagaaatag

SEQ ID NO: 206641 - DNA, 2727 bp, Artificial Sequence
  derived and/or modified sequence
atgaagtcctccgttgcgcagatcaaacctagcagcggacatgatcgcagagagaatctgaatagctaccagagaaattccagtccggaggacaggtacgaggagcaggagcggtctccgagggaccgcgattacttcgactactctaggtctgattacgagcactcgcgtcgcggaagaagttacgactcatccatggaatcacggaacagggaccgcgagaaacggagagaacgggagcgcgacaccgaccgtaagaggagtcgtaaatcaccttctccaggcagacgtaatcctgaaacttctgttacccaaagcagttccgcacaggacgaaccggctaccaagaaaaaaaaggacgaactggaccccctgctgacacggacaggcggagcctacattcctccagccaaattgagaatgatgcaggaacaaataactgataagaactccctggcctatcagcgaatgtcttgggaagccctcaagaaatcaatcaatggcctgattaataaggtgaatatcagcaacatctcaattattatccaggaattgctgcaggaaaacattgttaggggtcgcggactgctctctcgctcagttttgcaagcacagagcgcctcccctattttcactcacgtctacgcggctctggtcgctatcattaactccaagttccctcagataggggagctgatcctcaagcggctgatccttaacttccgcaaaggatatcgcagaaacgataagcaactctgtctgaccgcttctaagttcgtcgctcatctcatcaaccagaacgttgcccatgaagtgctgtgcctagaaatgctcacgttgctgctggaacggccaaccgacgattccgtggaggtagcaattggcttcctcaaagagtgcggcctgaagctgacccaagtttctcccagaggtattaatgcaatctttgaaagactccgcaatatccttcacgagtcagagatcgacaagagggtgcagtatatgatagaagtgatgttcgccgtgagaaaagacgggtttaaagaccatcccatcattctggaagggctggacttggtggaggaggatgaccagttcacccatatgctgccccttgaagacgattataatccagaagatgtgctgaacgtctttaagatggatcctaattttatggaaaacgaggaaaaatacaaagcaattaaaaaagagatcctggacgagggagacacggattcgaatacggatcaagatgccggatcatcagaagaagacgaagaagaggaggaagaggagggagaggaagacgaagaaggccagaaagtgactatccacgacaaaaccgagatcaatcttgtgagctttcgcagaacaatctacttggcaatccagtcatcactcgattttgaggaatgcgcccacaaactcctgaagatggagttccccgagtcgcaaaccaaggaactgtgcaatatgatcctggactgctgtgctcagcagcggacctacgaaaagtttttcgggctcttggccggaagattttgtatgctgaagaaggaatacatggaatcatttgagggcatcttcaaagagcagtatgacacgatccaccggctggagaccaacaagttacgcaacgtggccaagatgttcgctcacttgctttacactgattcactgccatggtcagtgcttgagtgtattaaactctcggaagaaaccacaacctcatcgtcacgtatctttgtgaagatctttttccaggaactgtgtgagtacatgggtctccctaaattgaatgcgaggctgaaggacgaaacccttcaaccattcttcgaggggctcctgccgcgagacaacccgagaaacactcgcttcgccatcaatttcttcacatccataggcctcggcggtctgaccgacgagctcagggaacacctgaaaaacacccccaaagtcatcgtcgctcagaaacctgatgttgaacagaacaaatcatcaccgtcctctagctccagcgcaagcagcagttctgagagtgactcttcagattctgactccgactcttccgatagtagcagtgagtcctcaagtgaagaatctgactcctcttctatctcttctcacagttccgccagcgctaatgacgtgagaaaaaagggccacggaaaaacaaggtctaaagaggtagacaagctgatccgcaaccagcagactaatgatagaaagcagaaagaacgcagacaggagcatggtcatcaagagacacgcacagagagggagagaaggtccgagaagcaccgggatcagaacagttcaggctcgaattggcgtgacccaattaccaagtatacttccgacaaggacgtgccatcggagagaaacaattacagtcgagtagctaatgaccgggatcaagagatgcacatcgacttagagaacaagcatggggaccccaaaaagaagcgcggagaacgtcgcaactccttcagcgagaatgaaaagcatactcaccgaattaaagactccgaaaactttagacgcaaggaccgaagtaaaagcaaagagatgaaccgcaagcacagcggctcccgttccgacgaggatagatatcagaacggtgcagaacggagatgggagaagtcttcccggtatagcgaacaaagtcgggagtccaaaaagaatcaagacagaaggagggagaagtcgcctgcaaagcagaagtag

SEQ ID NO: 206642 - DNA, 2884 bp, Artificial Sequence
  derived and/or modified sequence
aagtgacgtacgtccggtgtaatggcggcgcggtggagctctaggtgatgtttgcagacagaaaaagtaaactgtcaaggaattcagagcattgggtacttgttatttggaccagtttgaagcatctttgatttattggaccaactggcaacagaaaatgaaaagtagtgtggcacagataaaaccttcttctggtcatgacagaagggaaaaccttaattcatatcagaggaactcctctccagaagacagatatgaagaacaagaacgatccccccgggatagagattactttgattacagcagatcagactatgagcattcaagaagaggacgttcttatgatagtagcatggagtcacgaaacagggaccgagaaaaacgcagagaaagagaaagagatacggatcggaaaaggtctcggaaatccccatctcctgggaggagaaacccagaaacatcagtaactcagagttcctctgctcaggatgaacctgctacaaagaaaaagaaagatgagctggatcctcttcttactcgcactggtggagcatatattccccctgcaaagctcaggatgatgcaggaacagattacagataaaaacagcttagcataccagaggatgagttgggaggccctgaagaagtcaattaatggccttatcaacaaagtcaacatttccaacataagtattattattcaagagcttcttcaagaaaatatagttagagacagaggactgctgtccaggtctgttttgcaagcacagagtgcttctccaatcttcacccatgtttatgcagcattagtggcaattatcaactcaaaatttccacaaattggagaattaatcctcaaaaggttaattcttaattttcgaaaaggctatcgaagaaatgacaagcaactttgcctgactgcttcaaaatttgtggcgcatcttattaaccaaaatgtggcacacgaagtattatgcttagagatgctcactttgctcctggaaagaccaacagatgatagcgttgaagtagctattggttttcttaaggaatgtggcctcaaattaacacaagtgtcaccaagaggaatcaatgctatatttgaacgccttcgaaacattctgcatgagtctgaaattgacaaaagagttcaatatatgattgaagtgatgtttgctgtacggaaagatggattcaaggaccaccccattatcctagaaggtcttgatttggtggaagaagatgatcaattcactcatatgctccctctggaggatgactataatccagaagatgttcttaatgttttcaagatggatcctaattttatggagaatgaagagaagtacaaagctattaagaaagaaattcttgatgagggagatactgactcgaacacagaccaggatgctgggagtagtgaagaggacgaggaagaagaagaggaagagggagaagaagatgaagaaggacaaaaagtaactattcatgacaaaacagaaattaacctggtctcatttcgtcgtacaatttatcttgctattcagtcaagtttagattttgaagaatgtgctcacaaattgctgaaaatggagtttcctgaaagccaaacaaaagaactctgcaacatgatacttgattgctgtgcccaacagaggacatacgaaaaattttttggcttattagctgggcgattttgcatgctaaagaaagagtacatggaatcctttgaaggtatattcaaagaacagtatgataccatccatcgcttggaaacaaacaagttgcgaaatgttgctaagatgtttgctcaccttttatacactgattcacttccatggagtgttcttgaatgtataaaactgagtgaagaaaccactacatcatccagtagaatttttgtcaaaatatttttccaggaactgtgtgaatacatgggtcttcctaaacttaatgcaagattaaaggatgaaactctgcagccattctttgaaggattattaccccgagataatccaagaaacactcggtttgccatcaacttctttacttctataggtcttggaggtttaacggatgaactgcgggagcatctcaaaaatacaccaaaggtcattgtggcgcagaaaccagatgttgagcaaaataaatcctccccatcctcttcctcttcagcgtcctcctcttcagagtctgactcatccgactctgattctgacagcagtgatagcagttcagagtcttccagtgaagagagcgactcttcatccatcagtagtcatagctctgcctcagctaatgatgtaagaaagaagggacatgggaagaccagaagtaaagaggtagataaattgatcagaaaccagcaaacaaatgataggaaacaaaaagaaagaagacaagaacacgggcaccaggaaacaaggactgagagagaaagaaggtcagaaaaacacagagatcaaaattcaagtggttcaaattggagagatcctataacaaagtacacatcagacaaagatgttccttctgaacgaaataactacagtagagttgcgaatgacagagaccaagaaatgcatatagatttggaaaataagcatggtgatcccaaaaagaagagaggagagagaagaaattctttttctgaaaatgagaagcatacacaccgaattaaagacagtgaaaatttcagaagaaaagatagatcaaagtcaaaggaaatgaatagaaagcactcaggctcaagaagtgatgaagatagatatcaaaatggtgccgagagacgatgggaaaaatctagcagatactctgaacaatccagagaatcaaagaaaaatcaggaccggcgaagagaaaagtctccagcaaaacaaaaataa

SEQ ID NO: 206643 - DNA, 2392 bp, Artificial Sequence
  derived and/or modified sequence
aagtgacgtacgtccggtgtaatggcggcgcggtggagctctaggtgatgtttgcagacagaaaaagtaaactgtcaaggaattcagagcattgggtacttgttatttggaccagtttgaagcatctttgatttattggaccaactggcaacagaaaatgaaaagtagtgtggcacagataaaaccttcttctggtcatgacagaagggaaaaccttaattcatatcagaggaactcctctccagaagacagatatgaagaacaagaacgatccccccgggatagagattactttgattacagcagatcagactatgagcattcaagaagaggacgttcttatgatagtagcatggagtcacgaaacagggaccgagaaaaacgcagagaaagagaaagagatacggatcggaaaaggtctcggaaatccccatctcctgggaggagaaacccagaaacatcagtaactcagagttcctctgctcaggatgaacctgctacaaagaaaaagaaagatgagctggatcctcttcttactcgcactggtggagcatatattccccctgcaaagctcaggatgatgcaggaacagattacagataaaaacagcttagcataccagaggatgagttgggaggccctgaagaagtcaattaatggccttatcaacaaagtcaacatttccaacataagtattattattcaagagcttcttcaagaaaatatagttagaggaagaggactgctgtccaggtctgttttgcaagcacagagtgcttctccaatcttcacccatgtttatgcagcattagtggcaattatcaactcaaaatttccacaaattggagaattaatcctcaaaaggttaattcttaattttcgaaaaggctatcgaagaaatgacaagcaactttgcctgactgcttcaaaatttgtggcgcatcttattaaccaaaatgtggcacacgaagtattatgcttagagatgctcactttgctcctggaaagaccaacagatgatagcgttgaagtagctattggttttcttaaggaatgtggcctcaaattaacacaagtgtcaccaagaggaatcaatgctatatttgaacgccttcgaaacattctgcatgagtctgaaattgacaaaagagttcaatatatgattgaagtgatgtttgctgtacggaaagatggattcaaggaccaccccattatcctagaaggtcttgatttggtggaagaagatgatcaattcactcatatgctccctctggaggatgactataatccagaagatgttcttaatgttttcaagatggatcctaattttatggagaatgaagagaagtacaaagctattaagaaagaaattcttgatgagggagatactgactcgaacacagaccaggatgctgggagtagtgaagaggacgaggaagaagaagaggaagagggagaagaagatgaagaaggacaaaaagtaactattcatgacaaaacagaaattaacctggtctcatttcgtcgtacaatttatcttgctattcagtcaagtttagattttgaagaatgtgctcacaaattgctgaaaatggagtttcctgaaagccaaacaaaagaactctgcaacatgatacttgattgctgtgcccaacagaggacatacgaaaaattttttggcttattagctgggcgattttgcatgctaaagaaagagtacatggaatcctttgaaggtatattcaaagaacagtatgataccatccatcgcttggaaacaaacaagttgcgaaatgttgctaagatgtttgctcaccttttatacactgattcacttccatggagtgttcttgaatgtataaaactgagtgaagaaaccactacatcatccagtagaatttttgtcaaaatatttttccaggaactgtgtgaatacatgggtcttcctaaacttaatgcaagattaaaggatgaaactctgcagccattctttgaaggattattaccccgagataatccaagaaacactcggtttgccatcaacttctttacttctataggtcttggaggtttaacggatgaactgcgggagcatctcaaaaatacaccaaaggtcattgtggcgcagaaaccagatgttgagcaaaataaatcctccccatcctcttcctcttcagcgtcctcctcttcagagtctgactcatccgactctgattctgacagcagtgatagcagttcagagtcttccagtgaagagagcgactcttcatccatcagtagtcatagctctgcctcagctaatgatgtaagaaagaagggacatgggaagaccagaagtaaagaggtagataaattgatcagaaaccagcaaacaaatgataggaaacaaaaa

SEQ ID NO: 206644 - DNA, 3280 bp, Artificial Sequence
  derived and/or modified sequence
gtggagtccccgcaggcagagacgcggagtgggggtggcgggtcgccggatcgggtgggaagtaaaagacccccaggagtgggtgcgggctcactgatacggctgtgagcggcattggagtgtgcgtgggtcttctcgctacgctcgggcccgcaagaggggtgtgagagcggctaggtccaagcaggtgatgtttgcagacagaaaaagtaaactgtcaaggaattcagagcattgggtacttgttatttggaccagtttgaagcatctttgatttattggaccaactggcaacagaaaatgaaaagtagtgtggcacagataaaaccttcttctggtcatgacagaagggaaaaccttaattcatatcagaggaactcctctccagaagacagatatgaagaacaagaacgatccccccgggatagagattactttgattacagcagatcagactatgagcattcaagaagaggacgttcttatgatagtagcatggagtcacgaaacagggaccgagaaaaacgcagagaaagagaaagagatacggatcggaaaaggtctcggaaatccccatctcctgggaggagaaacccagaaacatcagtaactcagagttcctctgctcaggatgaacctgctacaaagaaaaagaaagatgagctggatcctcttcttactcgcactggtggagcatatattccccctgcaaagctcaggatgatgcaggaacagattacagataaaaacagcttagcataccagaggatgagttgggaggccctgaagaagtcaattaatggccttatcaacaaagtcaacatttccaacataagtattattattcaagagcttcttcaagaaaatatagttagaggaagaggactgctgtccaggtctgttttgcaagcacagagtgcttctccaatcttcacccatgtttatgcagcattagtggcaattatcaactcaaaatttccacaaattggagaattaatcctcaaaaggttaattcttaattttcgaaaaggctatcgaagaaatgacaagcaactttgcctgactgcttcaaaatttgtggcgcatcttattaaccaaaatgtggcacacgaagtattatgcttagagatgctcactttgctcctggaaagaccaacagatgatagcgttgaagtagctattggttttcttaaggaatgtggcctcaaattaacacaagtgtcaccaagaggaatcaatgctatatttgaacgccttcgaaacattctgcatgagtctgaaattgacaaaagagttcaatatatgattgaagtgatgtttgctgtacggaaagatggattcaaggaccaccccattatcctagaaggtcttgatttggtggaagaagatgatcaattcactcatatgctccctctggaggatgactataatccagaagatgttcttaatgttttcaagatggatcctaattttatggagaatgaagagaagtacaaagctattaagaaagaaattcttgatgagggagatactgactcgaacacagaccaggatgctgggagtagtgaagaggacgaggaagaagaagaggaagagggagaagaagatgaagaaggacaaaaagtaactattcatgacaaaacagaaattaacctggtctcatttcgtcgtacaatttatcttgctattcagtcaagtttagattttgaagaatgtgctcacaaattgctgaaaatggagtttcctgaaagccaaacaaaagaactctgcaacatgatacttgattgctgtgcccaacagaggacatacgaaaaattttttggcttattagctgggcgattttgcatgctaaagaaagagtacatggaatcctttgaaggtatattcaaagaacagtatgataccatccatcgcttggaaacaaacaagttgcgaaatgttgctaagatgtttgctcaccttttatacactgattcacttccatggagtgttcttgaatgtataaaactgagtgaagaaaccactacatcatccagtagaatttttgtcaaaatatttttccaggaactgtgtgaatacatgggtcttcctaaacttaatgcaagattaaaggatgaaactctgcagccattctttgaaggattattaccccgagataatccaagaaacactcggtttgccatcaacttctttacttctataggtcttggaggtttaacggatgaactgcgggagcatctcaaaaatacaccaaaggtcattgtggcgcagaaaccagatgttgagcaaaataaatcctccccatcctcttcctcttcagcgtcctcctcttcagagtctgactcatccgactctgattctgacagcagtgatagcagttcagagtcttccagtgaagagagcgactcttcatccatcagtagtcatagctctgcctcagctaatgatgtaagaaagaagggacatgggaagaccagaagtaaagaggtagataaattgatcagaaaccagcaaacaaatgataggaaacaaaaagaaagaagacaagaacacgggcaccaggaaacaaggactgagagagaaagaaggtcagaaaaacacagagatcaaaattcaagtggttcaaattggagagatcctataacaaagtacacatcagacaaagatgttccttctgaacgaaataactacagtagagttgcgaatgacagagaccaagaaatgcatatagatttggaaaataagcatggtgatcccaaaaagaagagaggagagagaagaaattctttttctgaaaatgagaagcatacacaccgaattaaagacagtgaaaatttcagaagaaaagatagatcaaagtcaaaggaaatgaatagaaagcactcaggctcaagaagtgatgaagatagatatcaaaatggtgccgagagacgatgggaaaaatctagcagatactctgaacaatccagagaatcaaagaaaaatcaggaccggcgaagagaaaagtctccagcaaaacaaaaataattctacaaaatgacataaactggacatgccttatattcagttgaaacaaattattttttactttgacgaactttatagagaattcttgtataaagtattggtttgtatttgtaaatttaaaaaatgttttcattttaacatgttttataattgatacatctcaaggccctacccataaaattatttgaaaactttcaccagaaagggatgtaagtctcgcttatattttgtgaataaaatgatcaaaagctca

SEQ ID NO: 206645 - DNA, 2727 bp, Artificial Sequence
  derived and/or modified sequence
atgaagagcagcgtggcccagatcaagcccagcagcggccacgacagaagagagaacctgaacagctaccagagaaacagcagccccgaggacagatacgaggagcaggagagaagccccagagacagagactacttcgactacagcagaagcgactacgagcacagcagaagaggcagaagctacgacagcagcatggagagcagaaacagagacagagagaagagaagagagagagagagagacaccgacagaaagagaagcagaaagagccccagccccggcagaagaaaccccgagaccagcgtgacccagagcagcagcgcccaggacgagcccgccaccaagaagaagaaggacgagctggaccccctgctgaccagaaccggcggcgcctacatcccccccgccaagctgagaatgatgcaggagcagatcaccgacaagaacagcctggcctaccagagaatgagctgggaggccctgaagaagagcatcaacggcctgatcaacaaggtgaacatcagcaacatcagcatcatcatccaggagctgctgcaggagaacatcgtgagagacagaggcctgctgagcagaagcgtgctgcaggcccagagcgccagccccatcttcacccacgtgtacgccgccctggtggccatcatcaacagcaagttcccccagatcggcgagctgatcctgaagagactgatcctgaacttcagaaagggctacagaagaaacgacaagcagctgtgcctgaccgccagcaagttcgtggcccacctgatcaaccagaacgtggcccacgaggtgctgtgcctggagatgctgaccctgctgctggagagacccaccgacgacagcgtggaggtggccatcggcttcctgaaggagtgcggcctgaagctgacccaggtgagccccagaggcatcaacgccatcttcgagagactgagaaacatcctgcacgagagcgagatcgacaagagagtgcagtacatgatcgaggtgatgttcgccgtgagaaaggacggcttcaaggaccaccccatcatcctggagggcctggacctggtggaggaggacgaccagttcacccacatgctgcccctggaggacgactacaaccccgaggacgtgctgaacgtgttcaagatggaccccaacttcatggagaacgaggagaagtacaaggccatcaagaaggagatcctggacgagggcgacaccgacagcaacaccgaccaggacgccggcagcagcgaggaggacgaggaggaggaggaggaggagggcgaggaggacgaggagggccagaaggtgaccatccacgacaagaccgagatcaacctggtgagcttcagaagaaccatctacctggccatccagagcagcctggacttcgaggagtgcgcccacaagctgctgaagatggagttccccgagagccagaccaaggagctgtgcaacatgatcctggactgctgcgcccagcagagaacctacgagaagttcttcggcctgctggccggcagattctgcatgctgaagaaggagtacatggagagcttcgagggcatcttcaaggagcagtacgacaccatccacagactggagaccaacaagctgagaaacgtggccaagatgttcgcccacctgctgtacaccgacagcctgccctggagcgtgctggagtgcatcaagctgagcgaggagaccaccaccagcagcagcagaatcttcgtgaagatcttcttccaggagctgtgcgagtacatgggcctgcccaagctgaacgccagactgaaggacgagaccctgcagcccttcttcgagggcctgctgcccagagacaaccccagaaacaccagattcgccatcaacttcttcaccagcatcggcctgggcggcctgaccgacgagctgagagagcacctgaagaacacccccaaggtgatcgtggcccagaagcccgacgtggagcagaacaagagcagccccagcagcagcagcagcgccagcagcagcagcgagagcgacagcagcgacagcgacagcgacagcagcgacagcagcagcgagagcagcagcgaggagagcgacagcagcagcatcagcagccacagcagcgccagcgccaacgacgtgagaaagaagggccacggcaagaccagaagcaaggaggtggacaagctgatcagaaaccagcagaccaacgacagaaagcagaaggagagaagacaggagcacggccaccaggagaccagaaccgagagagagagaagaagcgagaagcacagagaccagaacagcagcggcagcaactggagagaccccatcaccaagtacaccagcgacaaggacgtgcccagcgagagaaacaactacagcagagtggccaacgacagagaccaggagatgcacatcgacctggagaacaagcacggcgaccccaagaagaagagaggcgagagaagaaacagcttcagcgagaacgagaagcacacccacagaatcaaggacagcgagaacttcagaagaaaggacagaagcaagagcaaggagatgaacagaaagcacagcggcagcagaagcgacgaggacagataccagaacggcgccgagagaagatgggagaagagcagcagatacagcgagcagagcagagagagcaagaagaaccaggacagaagaagagagaagagccccgccaagcagaagtag

SEQ ID NO: 206646 - DNA, 2238 bp, Artificial Sequence
  derived and/or modified sequence
atgaagagcagcgtggcccagatcaagcccagcagcggccacgacagaagagagaacctgaacagctaccagagaaacagcagccccgaggacagatacgaggagcaggagagaagccccagagacagagactacttcgactacagcagaagcgactacgagcacagcagaagaggcagaagctacgacagcagcatggagagcagaaacagagacagagagaagagaagagagagagagagagacaccgacagaaagagaagcagaaagagccccagccccggcagaagaaaccccgagaccagcgtgacccagagcagcagcgcccaggacgagcccgccaccaagaagaagaaggacgagctggaccccctgctgaccagaaccggcggcgcctacatcccccccgccaagctgagaatgatgcaggagcagatcaccgacaagaacagcctggcctaccagagaatgagctgggaggccctgaagaagagcatcaacggcctgatcaacaaggtgaacatcagcaacatcagcatcatcatccaggagctgctgcaggagaacatcgtgagaggcagaggcctgctgagcagaagcgtgctgcaggcccagagcgccagccccatcttcacccacgtgtacgccgccctggtggccatcatcaacagcaagttcccccagatcggcgagctgatcctgaagagactgatcctgaacttcagaaagggctacagaagaaacgacaagcagctgtgcctgaccgccagcaagttcgtggcccacctgatcaaccagaacgtggcccacgaggtgctgtgcctggagatgctgaccctgctgctggagagacccaccgacgacagcgtggaggtggccatcggcttcctgaaggagtgcggcctgaagctgacccaggtgagccccagaggcatcaacgccatcttcgagagactgagaaacatcctgcacgagagcgagatcgacaagagagtgcagtacatgatcgaggtgatgttcgccgtgagaaaggacggcttcaaggaccaccccatcatcctggagggcctggacctggtggaggaggacgaccagttcacccacatgctgcccctggaggacgactacaaccccgaggacgtgctgaacgtgttcaagatggaccccaacttcatggagaacgaggagaagtacaaggccatcaagaaggagatcctggacgagggcgacaccgacagcaacaccgaccaggacgccggcagcagcgaggaggacgaggaggaggaggaggaggagggcgaggaggacgaggagggccagaaggtgaccatccacgacaagaccgagatcaacctggtgagcttcagaagaaccatctacctggccatccagagcagcctggacttcgaggagtgcgcccacaagctgctgaagatggagttccccgagagccagaccaaggagctgtgcaacatgatcctggactgctgcgcccagcagagaacctacgagaagttcttcggcctgctggccggcagattctgcatgctgaagaaggagtacatggagagcttcgagggcatcttcaaggagcagtacgacaccatccacagactggagaccaacaagctgagaaacgtggccaagatgttcgcccacctgctgtacaccgacagcctgccctggagcgtgctggagtgcatcaagctgagcgaggagaccaccaccagcagcagcagaatcttcgtgaagatcttcttccaggagctgtgcgagtacatgggcctgcccaagctgaacgccagactgaaggacgagaccctgcagcccttcttcgagggcctgctgcccagagacaaccccagaaacaccagattcgccatcaacttcttcaccagcatcggcctgggcggcctgaccgacgagctgagagagcacctgaagaacacccccaaggtgatcgtggcccagaagcccgacgtggagcagaacaagagcagccccagcagcagcagcagcgccagcagcagcagcgagagcgacagcagcgacagcgacagcgacagcagcgacagcagcagcgagagcagcagcgaggagagcgacagcagcagcatcagcagccacagcagcgccagcgccaacgacgtgagaaagaagggccacggcaagaccagaagcaaggaggtggacaagctgatcagaaaccagcagaccaacgacagaaagcagaagtag

SEQ ID NO: 206647 - DNA, 2727 bp, Artificial Sequence
  derived and/or modified sequence
atgaagagcagcgtggcccagatcaagcccagcagcggccacgacagaagagagaacctgaacagctaccagagaaacagcagccccgaggacagatacgaggagcaggagagaagccccagagacagagactacttcgactacagcagaagcgactacgagcacagcagaagaggcagaagctacgacagcagcatggagagcagaaacagagacagagagaagagaagagagagagagagagacaccgacagaaagagaagcagaaagagccccagccccggcagaagaaaccccgagaccagcgtgacccagagcagcagcgcccaggacgagcccgccaccaagaagaagaaggacgagctggaccccctgctgaccagaaccggcggcgcctacatcccccccgccaagctgagaatgatgcaggagcagatcaccgacaagaacagcctggcctaccagagaatgagctgggaggccctgaagaagagcatcaacggcctgatcaacaaggtgaacatcagcaacatcagcatcatcatccaggagctgctgcaggagaacatcgtgagaggcagaggcctgctgagcagaagcgtgctgcaggcccagagcgccagccccatcttcacccacgtgtacgccgccctggtggccatcatcaacagcaagttcccccagatcggcgagctgatcctgaagagactgatcctgaacttcagaaagggctacagaagaaacgacaagcagctgtgcctgaccgccagcaagttcgtggcccacctgatcaaccagaacgtggcccacgaggtgctgtgcctggagatgctgaccctgctgctggagagacccaccgacgacagcgtggaggtggccatcggcttcctgaaggagtgcggcctgaagctgacccaggtgagccccagaggcatcaacgccatcttcgagagactgagaaacatcctgcacgagagcgagatcgacaagagagtgcagtacatgatcgaggtgatgttcgccgtgagaaaggacggcttcaaggaccaccccatcatcctggagggcctggacctggtggaggaggacgaccagttcacccacatgctgcccctggaggacgactacaaccccgaggacgtgctgaacgtgttcaagatggaccccaacttcatggagaacgaggagaagtacaaggccatcaagaaggagatcctggacgagggcgacaccgacagcaacaccgaccaggacgccggcagcagcgaggaggacgaggaggaggaggaggaggagggcgaggaggacgaggagggccagaaggtgaccatccacgacaagaccgagatcaacctggtgagcttcagaagaaccatctacctggccatccagagcagcctggacttcgaggagtgcgcccacaagctgctgaagatggagttccccgagagccagaccaaggagctgtgcaacatgatcctggactgctgcgcccagcagagaacctacgagaagttcttcggcctgctggccggcagattctgcatgctgaagaaggagtacatggagagcttcgagggcatcttcaaggagcagtacgacaccatccacagactggagaccaacaagctgagaaacgtggccaagatgttcgcccacctgctgtacaccgacagcctgccctggagcgtgctggagtgcatcaagctgagcgaggagaccaccaccagcagcagcagaatcttcgtgaagatcttcttccaggagctgtgcgagtacatgggcctgcccaagctgaacgccagactgaaggacgagaccctgcagcccttcttcgagggcctgctgcccagagacaaccccagaaacaccagattcgccatcaacttcttcaccagcatcggcctgggcggcctgaccgacgagctgagagagcacctgaagaacacccccaaggtgatcgtggcccagaagcccgacgtggagcagaacaagagcagccccagcagcagcagcagcgccagcagcagcagcgagagcgacagcagcgacagcgacagcgacagcagcgacagcagcagcgagagcagcagcgaggagagcgacagcagcagcatcagcagccacagcagcgccagcgccaacgacgtgagaaagaagggccacggcaagaccagaagcaaggaggtggacaagctgatcagaaaccagcagaccaacgacagaaagcagaaggagagaagacaggagcacggccaccaggagaccagaaccgagagagagagaagaagcgagaagcacagagaccagaacagcagcggcagcaactggagagaccccatcaccaagtacaccagcgacaaggacgtgcccagcgagagaaacaactacagcagagtggccaacgacagagaccaggagatgcacatcgacctggagaacaagcacggcgaccccaagaagaagagaggcgagagaagaaacagcttcagcgagaacgagaagcacacccacagaatcaaggacagcgagaacttcagaagaaaggacagaagcaagagcaaggagatgaacagaaagcacagcggcagcagaagcgacgaggacagataccagaacggcgccgagagaagatgggagaagagcagcagatacagcgagcagagcagagagagcaagaagaaccaggacagaagaagagagaagagccccgccaagcagaagtag

SEQ ID NO: 206648 - protein, 927 aa, Artificial Sequence
  derived and/or modified sequence
MGTQDPGNMGTGVPASEQISCAKEDPQVYCPEETGGTKDVQVTDCKSPEDSRPPKETDCCNPEDSGQLMVSYEGKAMGYQVPPFGWRICLAHEFTEKRKPFQANNVSLSNMIKHIGMGLRYLQWWYRKTHVEKKTPFIDMINSVPLRQIYGCPLGGIGGGTITRGWRGQFCRWQLNPGMYQHRTVIADQFTVCLRREGQTVYQQVLSLERPSVLRSWNWGLCGYFAFYHALYPRAWTVYQLPGQNVTLTCRQITPILPHDYQDSSLPVGVFVWDVENEGDEALDVSIMFSMRNGLGGGDDAPGGLWNEPFCLERSGETVRGLLLHHPTLPNPYTMAVAARVTAATTVTHITAFDPDSTGQQVWQDLLQDGQLDSPTGQSTPTQKGVGIAGAVCVSSKLRPRGQCRLEFSLAWDMPRIMFGAKGQVHYRRYTRFFGQDGDAAPALSHYALCRYAEWEERISAWQSPVLDDRSLPAWYKSALFNELYFLADGGTVWLEVLEDSLPEELGRNMCHLRPTLRDYGRFGYLEGQEYRMYNTYDVHFYASFALIMLWPKLELSLQYDMALATLREDLTRRRYLMSGVMAPVKRRNVIPHDIGDPDDEPWLRVNAYLIHDTADWKDLNLKFVLQVYRDYYLTGDQNFLKDMWPVCLAVMESEMKFDKDHDGLIENGGYADQTYDGWVTTGPSAYCGGLWLAAVAVMVQMAALCGAQDIQDKFSSILSRGQEAYERLLWNGRYYNYDSSSRPQSRSVMSDQCAGQWFLKACGLGEGDTEVFPTQHVVRALQTIFELNVQAFAGGAMGAVNGMQPHGVPDKSSVQSDEVWVGVVYGLAATMIQEGLTWEGFQTAEGCYRTVWERLGLAFQTPEAYCQQRVFRSLAYMRPLSIWAMQLALQQQQHKKASWPKVKQGTGLRTGPMFGPKEAMANLSPE

SEQ ID NO: 206649 - DNA, 2784 bp, Artificial Sequence
  derived and/or modified sequence
atgggcacccaggaccccggcaacatgggcaccggcgtgcccgccagcgagcagatcagctgcgccaaggaggacccccaggtgtactgccccgaggagaccggcggcaccaaggacgtgcaggtgaccgactgcaagagccccgaggacagcagaccccccaaggagaccgactgctgcaaccccgaggacagcggccagctgatggtgagctacgagggcaaggccatgggctaccaggtgccccccttcggctggagaatctgcctggcccacgagttcaccgagaagagaaagcccttccaggccaacaacgtgagcctgagcaacatgatcaagcacatcggcatgggcctgagatacctgcagtggtggtacagaaagacccacgtggagaagaagacccccttcatcgacatgatcaacagcgtgcccctgagacagatctacggctgccccctgggcggcatcggcggcggcaccatcaccagaggctggagaggccagttctgcagatggcagctgaaccccggcatgtaccagcacagaaccgtgatcgccgaccagttcaccgtgtgcctgagaagagagggccagaccgtgtaccagcaggtgctgagcctggagagacccagcgtgctgagaagctggaactggggcctgtgcggctacttcgccttctaccacgccctgtaccccagagcctggaccgtgtaccagctgcccggccagaacgtgaccctgacctgcagacagatcacccccatcctgccccacgactaccaggacagcagcctgcccgtgggcgtgttcgtgtgggacgtggagaacgagggcgacgaggccctggacgtgagcatcatgttcagcatgagaaacggcctgggcggcggcgacgacgcccccggcggcctgtggaacgagcccttctgcctggagagaagcggcgagaccgtgagaggcctgctgctgcaccaccccaccctgcccaacccctacaccatggccgtggccgccagagtgaccgccgccaccaccgtgacccacatcaccgccttcgaccccgacagcaccggccagcaggtgtggcaggacctgctgcaggacggccagctggacagccccaccggccagagcacccccacccagaagggcgtgggcatcgccggcgccgtgtgcgtgagcagcaagctgagacccagaggccagtgcagactggagttcagcctggcctgggacatgcccagaatcatgttcggcgccaagggccaggtgcactacagaagatacaccagattcttcggccaggacggcgacgccgcccccgccctgagccactacgccctgtgcagatacgccgagtgggaggagagaatcagcgcctggcagagccccgtgctggacgacagaagcctgcccgcctggtacaagagcgccctgttcaacgagctgtacttcctggccgacggcggcaccgtgtggctggaggtgctggaggacagcctgcccgaggagctgggcagaaacatgtgccacctgagacccaccctgagagactacggcagattcggctacctggagggccaggagtacagaatgtacaacacctacgacgtgcacttctacgccagcttcgccctgatcatgctgtggcccaagctggagctgagcctgcagtacgacatggccctggccaccctgagagaggacctgaccagaagaagatacctgatgagcggcgtgatggcccccgtgaagagaagaaacgtgatcccccacgacatcggcgaccccgacgacgagccctggctgagagtgaacgcctacctgatccacgacaccgccgactggaaggacctgaacctgaagttcgtgctgcaggtgtacagagactactacctgaccggcgaccagaacttcctgaaggacatgtggcccgtgtgcctggccgtgatggagagcgagatgaagttcgacaaggaccacgacggcctgatcgagaacggcggctacgccgaccagacctacgacggctgggtgaccaccggccccagcgcctactgcggcggcctgtggctggccgccgtggccgtgatggtgcagatggccgccctgtgcggcgcccaggacatccaggacaagttcagcagcatcctgagcagaggccaggaggcctacgagagactgctgtggaacggcagatactacaactacgacagcagcagcagaccccagagcagaagcgtgatgagcgaccagtgcgccggccagtggttcctgaaggcctgcggcctgggcgagggcgacaccgaggtgttccccacccagcacgtggtgagagccctgcagaccatcttcgagctgaacgtgcaggccttcgccggcggcgccatgggcgccgtgaacggcatgcagccccacggcgtgcccgacaagagcagcgtgcagagcgacgaggtgtgggtgggcgtggtgtacggcctggccgccaccatgatccaggagggcctgacctgggagggcttccagaccgccgagggctgctacagaaccgtgtgggagagactgggcctggccttccagacccccgaggcctactgccagcagagagtgttcagaagcctggcctacatgagacccctgagcatctgggccatgcagctggccctgcagcagcagcagcacaagaaggccagctggcccaaggtgaagcagggcaccggcctgagaaccggccccatgttcggccccaaggaggccatggccaacctgagccccgagtag

SEQ ID NO: 206650 - DNA, 3611 bp, Artificial Sequence
  derived and/or modified sequence
agaccggaaagggctcgggtcatcccggcgcccagggtcaccttcccacgggctggcacctgggcgcgggcgctgccccggagccggccggcgggacctggcgcccaatcctgggggacccggtgccgtggcccaggggccgggccgaggtcccgggggcggtgccttgcgggcccgtcccggggcggtgcctggtgggctggccccgcggctcctcccctctctgcgggcccagtcgccctttggccgggcgagctaatcgtcggctcaatgacgacgaggcccgacccttcccgtccaggacctacagagacaaccgaaggagagcccaaggcggcttctttgctgtcgccgcccccactgaagcaagagctccccggctccactgaaacaccagctcatttaagctttccccaacgcccggccctccgggacgatacctaacaacgaccggcgcccgcatctggaataggctggcgagatacttagtatccgagggctcgggacttggcgccatcgaggtcatggggacccaggatccagggaacatgggaaccggcgtcccagcctcggagcagataagctgtgccaaagaggatccacaagtttattgccctgaagagactggcggcaccaaggatgtgcaggttacagactgtaagagtcccgaagacagccgacccccaaaagagacggactgctgcaatccggaggactctgggcagctgatggtttcctatgagggtaaagctatgggctaccaggtgcctccctttggctggcgcatctgtctggctcatgagtttacagagaagaggaaaccctttcaagctaacaacgtctccctaagcaacatgataaagcatataggcatgggcttgaggtacctgcagtggtggtaccggaagacccatgtggaaaagaagacacctttcatcgacatgatcaattctgtacccctaagacagatttatggttgtcccttgggtggcatcgggggaggcactattacccgtggctggagaggccagttctgtcgttggcagcttaaccctggaatgtatcagcaccggacagtcatcgctgaccaattcacagtgtgcctgcgtcgggaagggcagactgtgtaccagcaagtcctgtccctggagcgcccaagtgtcctccgcagctggaactggggcctgtgtgggtactttgctttctaccatgccctctatccccgagcctggactgtctatcagcttcctggccagaatgtcaccctcacctgccgtcagatcacacccatcttgccccatgactaccaggacagcagcctgcctgtaggagtctttgtgtgggatgtggaaaatgaaggggacgaagctctagatgtgtccatcatgttctccatgcggaatggactgggtggtggagacgatgccccagggggtttgtggaatgagcccttctgtctggagcgtagcggggaaactgtccgggggctgctcctgcatcatccaacccttccaaacccctacacgatggctgtggctgcacgagtcacggcagctaccacggtaacccacatcacagcctttgaccctgacagcacggggcagcaggtgtggcaggatctacttcaggatggacagctggactctcccactggccaaagcacccctacgcagaaaggagtaggcattgctggagctgtgtgtgtttccagcaagttgcgacctcgaggccagtgccgcctggagttttcactggcttgggacatgcccaggatcatgtttggagctaaaggccaagtccactacaggcggtatacaaggttctttggccaggatggagatgcagcacctgccctcagccactatgcactgtgccgatacgcagagtgggaagagaggatctcagcttggcagagcccggtattggatgacagatcactgcctgcctggtacaaatctgcgctgttcaatgaactatacttcctggctgatggaggcacagtgtggctggaagttcttgaggactccctaccagaggagctgggcagaaacatgtgtcacctccgccccaccctacgggactacggtcgatttggctaccttgagggccaggagtaccgcatgtacaacacatatgatgtccacttttatgcttcctttgccctcatcatgctctggcccaaacttgagctcagcctacagtatgacatggctctggccactctcagggaggacctgacacggcgacggtacctgatgagtggggtgatggcacctgtgaaaaggaggaacgtcatcccccatgatattggggacccagatgatgaaccatggctccgcgtcaatgcatatttaatccatgatactgctgattggaaggacctgaacctgaagtttgtgctgcaggtttatcgggactattacctcacgggtgatcaaaacttcctgaaggacatgtggcctgtgtgtctagctgtgatggaatctgaaatgaagtttgacaaggaccatgatggactcattgaaaatggaggctatgcagaccagacctatgatggatgggtgaccacaggccccagtgcttactgtggagggctgtggctggcagctgtggctgtgatggtccagatggctgctctgtgtggggcacaggacatccaggataagttttcttctatcctcagccggggccaagaagcctatgagagactgctgtggaatggccgctattacaactatgacagcagctctcggcctcagtctcgtagtgttatgtctgaccagtgtgctggacagtggttcctgaaggcctgtggcctaggagaaggagacactgaggtgtttcctacccaacatgtggtccgtgctctccaaactatctttgagctgaacgtccaggcctttgcaggaggggccatgggggctgtgaatgggatgcagccccatggtgtccctgataaatccagtgtgcagtctgatgaagtctgggtgggtgtggtctacgggctggcagctaccatgatccaagagggcctgacttgggagggcttccagacagctgaaggctgctaccgtaccgtgtgggagcgcctgggtctggccttccagaccccagaggcatactgccagcagcgagtgttccgctcactggcctacatgcggccactgagcatatgggccatgcagctagccctgcaacagcagcagcacaaaaaggcctcctggccaaaagtcaaacagggcacaggactaaggacagggcctatgtttggaccaaaggaagccatggcaaacctgagcccagagtgagccgtctgaactgtgggagggaagtgctaacagcccagcctccagcctggcctttcctccttcccctctgaacctcctgcaaccctgagccatcaggacaatcataccccttcccttctctccacccaattgtgccagtaaatgggggttgagggtgacctaggcagcattagaatcacttatttatttctttcctcacctgttccctgactgcgtgaaatgttcagggaggtcagttgatttccccaggtacattcatggtgtgacagacacatgggtacaaataaaagacccagaaagcca

SEQ ID NO: 206651 - DNA, 2784 bp, Artificial Sequence
  derived and/or modified sequence
atgggcactcaggatccagggaacatgggtactggggtgcctgcctctgagcaaatctcttgtgccaaagaggacccccaagtgtattgtccagaggagactggcggcaccaaagacgtccaggtgactgactgcaagtctccagaggatagtaggcccccaaaggagactgactgttgcaacccagaggactccggtcaacttatggtctcatacgagggcaaggccatgggctatcaagtcccgccctttggctggagaatatgcttagctcacgaatttacagaaaagaggaaacctttccaggccaacaacgtgtcgctctctaatatgattaaacacattggcatgggactcagatacctgcaatggtggtataggaagacccacgtggaaaaaaaaacacctttcatcgatatgataaactctgtgcccctccgacagatttatggttgtccccttgggggcattgggggaggaacgattactcggggatggcggggccaattttgtcggtggcagttaaaccctggaatgtaccagcacaggacggtgatcgctgaccaattcactgtatgcctgcgacgggaagggcaaacagtgtatcagcaggtgctttccctggagcgtccaagtgtcctccgtagttggaactggggtttatgcggctattttgcattttaccatgcgctttatcctcgcgcttggacagtataccaattaccaggccaaaatgtgacactaacatgccggcagattactccgattctcccgcacgattaccaggacagcagcctgccggtgggcgtgttcgtttgggatgtggaaaacgagggggacgaggccttggacgtttccatcatgtttagcatgagaaacggtctcggggggggcgatgatgcccctggtgggctgtggaatgaacccttctgcttggaacgatccggggagaccgttagggggcttctgctgcatcaccctacactgcctaacccttacacgatggctgtagcagctagagtcactgcagccactaccgtcactcacatcaccgcgttcgacccagattcaactggccagcaagtttggcaggacttgttacaggacggtcaactagattcccccacaggacagtctactcccactcaaaagggggtcgggatcgcaggagctgtctgcgtttccagcaagctccgcccccgggggcagtgcaggttggagttctctctagcctgggatatgccacgaatcatgttcggagccaaagggcaggtgcactatcggcgctatacgcggtttttcggacaagacggagatgcagcccccgcacttagccattatgcactttgtcgctacgccgagtgggaggagagaatatctgcatggcaatcacctgtattggacgataggtcacttcccgcctggtataagtcagcactcttcaatgagctctatttcctggcagatgggggaaccgtgtggttagaagtgcttgaggacagcctacctgaagaactaggcaggaacatgtgccatttgagacccacccttcgggattacggcagatttgggtacttggaaggccaggaataccgcatgtacaacacctacgatgtccatttctacgccagctttgcactgatcatgctgtggcccaaactggagctctccctacagtatgatatggccctcgcaacccttcgcgaggatctgacccgccgacgatatctgatgtctggggtgatggctcccgttaagcgtcgtaatgttatccctcacgacataggggacccggacgacgagccctggctgcgggtaaacgcataccttatccacgatacagcagactggaaggacctaaacctgaaatttgtgttgcaagtgtatcgggactactacctaacaggcgaccagaattttctgaaggatatgtggcccgtgtgccttgctgtaatggagagtgagatgaagttcgataaagaccacgacggcttgattgaaaatggtggctacgccgaccaaacatatgacgggtgggttactaccggacctagcgcctactgcgggggcctctggctggccgccgtggccgtcatggttcagatggccgctttgtgtggggcccaagacatccaggataaattctcttccattttatctagggggcaggaggcctatgaacgtctgttatggaatggaagatactataattacgattctagctctcgaccgcagagtagatctgtcatgagtgatcaatgtgcgggtcagtggtttctcaaggcatgcggcctcggtgaaggtgatactgaggttttccctactcagcacgtggtccgcgcgctgcagaccattttcgaacttaacgtacaggccttcgccgggggagcgatgggggcagtgaatggtatgcagccccacggtgtacctgacaaatcaagcgtacagagtgatgaagtgtgggtgggggtggtgtatggactggctgccactatgatacaggagggcctgacttgggagggttttcagactgccgagggctgttaccgcacagtgtgggaacggctgggccttgctttccagaccccagaggcatattgccaacagcgggtcttcagatcattggcttatatgcgccccctgtctatctgggcgatgcagcttgctctgcaacagcaacagcacaagaaagccagctggcctaaggttaaacagggcacaggtctgcgtacagggcccatgttcggtcccaaagaagcaatggcaaacctgtccccagaatag

SEQ ID NO: 206652 - DNA, 2784 bp, Artificial Sequence
  derived and/or modified sequence
atgggcacccaggaccccggcaacatgggcactggagtgcctgccagcgagcagatcagctgtgccaaggaggacccccaggtgtactgcccagaggagaccggcggcaccaaggatgtgcaggtgacagactgcaagagccctgaggacagcaggcctcccaaggagacagactgctgcaacccagaagattctggccagctgatggtgtcctatgagggcaaggccatgggctaccaggtgccccccttcggctggaggatctgcctggcccacgagttcacagagaagaggaagcccttccaggccaacaacgtgtccctgagcaacatgatcaagcacatcggcatgggcctgcgctacctgcagtggtggtacaggaagacccacgtggagaagaagacccccttcatcgacatgatcaacagcgtgcccctgcggcagatctacggctgccccctgggcggcattggaggcggcaccatcacccggggctggaggggccagttctgccgctggcagctgaaccctggcatgtaccagcacaggacagtgattgctgaccagttcaccgtgtgcctgcggcgggagggccagacagtgtaccagcaggtgctgagcctggagcggcccagcgtgctgcgctcctggaactggggcctgtgtggctactttgccttctaccacgccctgtacccccgggcctggacagtgtaccagctgcccggccagaatgtgaccctgacctgccggcagatcacccccatcctgccccatgactaccaggacagcagcctgcctgtgggcgtgtttgtgtgggatgtggagaatgaaggagatgaggccctggatgtgtccatcatgttctccatgagaaatggcctgggcggcggagatgatgcccctgggggcctgtggaatgagcccttctgcctggagaggtctggagagaccgtgcggggcctgctgctgcaccaccccaccctgcccaacccctacaccatggctgtggccgcccgggtgacagctgccaccaccgtgacccacatcacagcctttgatcctgacagcacaggccagcaggtgtggcaggacctgctgcaggacggccagctggacagccccaccggccagagcacccccacccagaagggcgtgggcattgctggagctgtgtgtgtgagcagcaagctgcggccccggggccagtgccgcctggagttcagcctggcctgggacatgccccgcatcatgtttggagccaagggccaggtgcactaccgccgctacacccgcttcttcggccaggatggagatgctgccccagccctgagccactacgccctgtgccgctatgcagagtgggaggagcgcatcagcgcctggcagagccctgtgctggatgacaggagcctgcctgcctggtacaagagcgccctcttcaatgagctgtacttcctggctgatggcggcaccgtgtggctggaggtgctggaggacagcctgcctgaggagctgggcaggaacatgtgccacctgcggcccaccctgcgggactatggccgcttcggctacctggagggccaggagtacaggatgtacaacacctatgatgtgcacttctacgccagctttgccctgatcatgctgtggcccaagctggagctgagcctgcagtatgacatggccctggccaccctgcgggaggacctgacccggcggcgctacctgatgtctggagtgatggcccctgtgaagagaagaaatgtcatcccccatgacattggagaccctgatgatgagccctggctgcgggtgaatgcctacctgattcatgacacagctgactggaaggacctgaacctgaagtttgtgctgcaggtgtacagagactactacctgactggagaccagaacttcctgaaggacatgtggcctgtgtgcctggccgtgatggagagcgagatgaagtttgacaaggaccatgatggcctgattgaaaatggaggctacgccgaccagacctatgatggctgggtgaccaccggccccagcgcctactgcggcggcctgtggctggccgctgtggccgtgatggtgcagatggccgccctgtgtggggcccaggacatccaggacaagttcagcagcatcctgagccggggccaggaggcctatgaaaggctgctgtggaatggccgctactacaactatgacagcagcagccggccccagagccgctctgtgatgtctgaccagtgtgccggccagtggttcctgaaggcctgtggcctgggggagggggacacagaggtgttccccacccagcacgtggtgcgggccctgcagaccatctttgagctgaatgtgcaggcctttgctgggggcgccatgggcgctgtgaatggcatgcagccccatggagtgcctgacaagagctctgtgcagagtgatgaggtgtgggtgggcgtggtgtatggcctggccgccaccatgatccaggagggcctgacctgggagggcttccagacagctgagggctgctacagaacagtgtgggagcggctgggcctggccttccagaccccagaggcctactgccagcagagggtcttccgcagcctggcctacatgaggcccctgagcatctgggccatgcagctggccctgcagcagcagcagcacaagaaggcctcctggcccaaggtgaagcagggcaccggcctgaggacaggccccatgtttggccccaaggaggccatggccaacctgagccctgagtag

SEQ ID NO: 206653 - DNA, 2784 bp, Artificial Sequence
  derived and/or modified sequence
atgggcacccaggaccccggcaacatgggcaccggcgtgcccgccagtgagcaaatctcctgtgcgaaggaggacccgcaggtttactgtccagaggaaaccggtggcactaaggatgttcaagtgaccgattgtaaatcccccgaggactccagaccccctaaggagacagattgttgtaatcctgaggattcggggcaactcatggtgtcttatgaaggaaaagccatgggctaccaggtgccaccttttgggtggagaatttgcctggcccacgagtttaccgagaagagaaagcccttccaggcaaacaatgtgagtctctctaatatgattaagcacattggaatgggtctgcgctatctccagtggtggtatagaaagacccatgtggaaaaaaagactccgttcatcgatatgatcaacagcgtacctctgaggcagatatacggatgtcccctgggaggcatcggcgggggcactattaccaggggatggcggggccaattctgtcgctggcagttgaatcctggcatgtaccagcacagaaccgttatcgccgaccagttcacggtgtgcctccgccgggaggggcagactgtctaccagcaggtgctaagtctcgaacgcccatcagtgttgcgtagctggaattggggcctctgtgggtactttgccttctatcatgccctttatccccgagcatggaccgtgtaccaactgcccggccagaacgtgacactcacttgcaggcagatcacccccatcctgccacacgattaccaagatagcagtcttcctgtgggagtttttgtctgggatgtagaaaatgagggggacgaggccctggatgtgtccataatgtttagcatgaggaacgggctggggggaggagatgacgcgcccggagggctctggaacgagccattctgcctggagcgctctggggagaccgtgcgaggattactcctccatcatccaaccctcccaaacccgtatactatggctgtcgctgcccgggtaaccgcagccacgaccgttacacatattacagcttttgaccctgacagcacggggcaacaggtttggcaggacctccttcaggatggacaactcgactcccctactgggcaaagcaccccaacacaaaaaggagtggggattgccggtgctgtatgcgtaagctctaagctgaggcctcggggccaatgcagactggaattttccttggcatgggacatgccccggatcatgtttggggccaaaggacaggtgcactatcggagatatacccgattctttggacaggacggcgacgctgcccctgctcttagtcactacgcactgtgccgttatgcggagtgggaggaaaggatcagcgcatggcagagccctgttctggacgatcgttccttgccggcatggtataaatcggccctgtttaacgaactgtactttcttgctgatggcggaaccgtgtggctggaagtgttagaggactctctgcctgaggaactcgggcgtaatatgtgtcaccttaggcctactctccgggactatgggcgcttcggatacctggaggggcaggaatatcgaatgtacaatacctacgacgtgcatttttatgcatccttcgctttaataatgctgtggcccaagctggagctgagcctccaatatgatatggctctggccaccctgagagaggatctgactcgtcggcgttacctgatgagcggcgtgatggcacccgttaaaagacggaacgtgataccccatgacatcggcgatcccgatgatgagccatggttgcgggttaacgcttacctgatccacgacaccgcagattggaaagatctgaatctgaaattcgttctccaggtctaccgtgattactacctgactggagaccagaattttctgaaggacatgtggcccgtttgcttggcagtgatggagtctgagatgaagtttgataaggatcacgacggactcattgagaacgggggttacgctgatcaaacatatgacggatgggtaacgacagggccaagcgcctactgcggcggcctttggctggccgctgtcgccgtgatggtgcaaatggcggccctatgtggtgctcaagacatccaggacaaattttcctcaatcctctctcgcggtcaggaagcttatgaaaggctgctgtggaacggaagatactacaactatgatagcagttcccgaccacaatctagatcggtgatgtccgatcagtgcgcaggtcagtggttccttaaagcctgtgggctcggagaaggtgacacggaggttttccctacccagcatgttgtacgcgctctgcagaccatcttcgaacttaatgtacaggcattcgcagggggtgccatgggagccgttaatgggatgcagccacacggggttccagacaaatcctcagttcagtcagatgaagtgtgggtgggcgtcgtgtatggactggctgcaaccatgatacaggaggggctcacttgggagggatttcaaacagccgagggatgttaccgcaccgtctgggagcgactgggcctggcctttcagaccccggaggcctattgccagcagcgtgtgtttaggagcctggcttacatgcgccctctgtcgatatgggccatgcagctggcactgcaacagcagcagcataagaaggcctcttggcccaaagttaagcagggcacaggcctgcggaccggacccatgtttgggccaaaggaggctatggctaacctgtcaccggagtag

SEQ ID NO: 206654 - DNA, 2784 bp, Artificial Sequence
  derived and/or modified sequence
atggggactcaagacccgggaaatatgggcacaggcgttcccgcttcggaacaaatctcctgcgctaaagaggatccacaggtctactgtccagaggagactggtggcactaaggacgtgcaggtgaccgactgtaaaagccctgaggattctcgtcctccaaaagagacggattgctgcaaccctgaggactccggacagctgatggtcagctatgagggaaaagcaatgggctaccaggtgcctcccttcggctggcgtatttgcctggcgcatgaatttaccgagaagcgcaaaccattccaggcaaacaatgtaagtttaagcaacatgatcaaacatattgggatggggctgagatatctacaatggtggtaccgtaaaacgcatgtggaaaagaaaaccccttttatcgatatgatcaactccgtccctctacgacagatttatggctgcccactggggggaatcggcggagggacgatcaccagaggctggcggggacagttctgtagatggcaactcaatccaggaatgtaccaacacagaacagtgatcgctgatcaattcactgtgtgcctccgaagagagggtcagacggtgtaccaacaggtgctctcgctagagcgccctagtgtcctgcgcagctggaactggggactttgtggctatttcgctttctatcacgccctctatccgagggcgtggactgtatatcagctgcctgggcaaaacgtcactttaacttgcagacagattacaccgatcctcccgcatgactaccaggattcctccctgccggtgggggtttttgtgtgggatgtggagaacgagggggatgaggctctagacgtgtcgattatgttttctatgagaaacggactcggaggtggcgacgacgctcctggtggcctctggaacgagcccttttgcctagagcggagcggcgaaactgtgagaggcctactgttacaccaccctacacttccaaacccctatacgatggccgtcgcggcacgagtaacagcggcaactaccgttactcacataaccgcattcgaccctgactccaccgggcaacaagtttggcaggatttacttcaggacgggcagcttgatagtcctaccggccagagtactcctacacagaaaggagtagggatcgctggggcagtttgtgtgtcctccaagcttaggccaaggggccagtgtagactggaattttccctggcatgggatatgccgcgaatcatgttcggcgctaagggccaggttcattacaggcgatacacgcgcttcttcggacaagacggagatgctgcacctgcactcagccactatgctctgtgtcgttacgctgagtgggaagagcgcatctctgcatggcagagtcccgtacttgacgacagaagtctgccagcctggtacaagagcgctctcttcaacgagttgtatttcctggctgacggaggtacagtatggcttgaagtactcgaggatagcctgcccgaagagctggggaggaacatgtgccacctgcgcccaacactacgcgattacggaagattcggttatcttgaggggcaggaatacagaatgtacaacacttatgacgtccatttttacgcatcttttgcgctgatcatgctctggcccaagctagagctatccctgcagtatgacatggcacttgccacactgcgcgaggatttgactcggcgacggtatctgatgtccggcgtcatggctcccgttaagaggaggaacgtgatcccgcacgacatcggcgacccagatgacgaaccttggctgcgtgtaaacgcctatctcatccacgatactgctgactggaaagacttgaaccttaaatttgtactgcaggtgtatcgagactactatctcactggagatcagaactttctcaaagatatgtggccagtgtgtctggccgtgatggagagcgagatgaaattcgataaggatcacgatggtctgatcgagaatggaggctacgccgatcaaacttatgatgggtgggttactactggacccagcgcctattgtggaggcctatggcttgccgctgtggccgtcatggtccagatggccgcattatgtggcgcacaagatatccaggataaattctcctccatcctgagtcgaggtcaggaggcttatgaaaggctgttgtggaacggcaggtactataattatgacagtagttccaggccccagtccaggagcgtgatgagcgaccagtgtgctggtcaatggtttctaaaggcttgtggactgggagagggcgatactgaggtattcccgacccagcacgtggtgagggctctccagaccatctttgaactgaatgtgcaggccttcgccggtggtgccatgggcgctgtcaacggcatgcagcctcatggagtaccagacaaatcttccgtgcagtcggatgaagtgtgggttggggttgtttacgggcttgccgctaccatgatacaggaggggcttacatgggaaggcttccagacagcagagggctgttaccgaaccgtgtgggaacgactcggccttgcctttcagacccctgaggcatactgccaacagcgagtctttcgctctctggcctatatgcgacccctcagcatttgggcaatgcagctcgccttgcagcagcagcaacacaaaaaggcctcctggcccaaggttaagcagggcactggcctgagaacgggcccaatgtttggacccaaggaagctatggccaatctgtcacccgagtag

SEQ ID NO: 206655 - protein, 1271 aa, Artificial Sequence
  derived and/or modified sequence
  misc_feature (1)..(1): Xaa can be any naturally occurring amino acid
XRDFQSEVLLSAMELFHMTSGGDAAMFRDGKEPQPSAEAAAAPSLANISCFTQKLVEKLYSGMFSADPRHILLFILEHIMVVIETASSQRDTVLSTLYSSLNKVILYCLSKPQQSLSECLGLLSILGFLQEHWDVVFATYNSNISFLLCLMHCLLLLNERSYPEGFGLEPKPRMSTYHQVFLSPNEDVKEKREDLPSLSDVQHNIQKTVQTLWQQLVAQRQQTLEDAFKIDLSVKPGEREVKIEEVTPLWEETMLKAWQHYLASEKKSLASRSNVAHHSKVTLWSGSLSSAMKLMPGRQAKDPECKTEDFVSCIENYRRRGQELYASLYKDHVQRRKCGNIKAANAWARIQEQLFGELGLWSQGEETKPCSPWELDWREGPARMRKRIKRLSPLEALSSGRHKESQDKNDHISQTNAENQDELTLREAEGEPDEVGVDCTQLTFFPALHESLHSEDFLELCRERQVILQELLDKEKVTQKFSLVIVQGHLVSEGVLLFGHQHFYICENFTLSPTGDVYCTRHCLSNISDPFIFNLCSKDRSTDHYSCQCHSYADMRELRQARFLLQDIALEIFFHNGYSKFLVFYNNDRSKAFKSFCSFQPSLKGKATSEDTLSLRRYPGSDRIMLQKWQKRDISNFEYLMYLNTAAGRTCNDYMQYPVFPWVLADYTSETLNLANPKIFRDLSKPMGAQTKERKLKFIQRFKEVEKTEGDMTVQCHYYTHYSSAIIVASYLVRMPPFTQAFCALQGGSFDVADRMFHSVKSTWESASRENMSDVRELTPEFFYLPEFLTNCNGVEFGCMQDGTVLGDVQLPPWADGDPRKFISLHRKALESDFVSANLHHWIDLIFGYKQQGPAAVDAVNIFHPYFYGDRMDLSSITDPLIKSTILGFVSNFGQVPKQLFTKPHPARTAAGKPLPGKDVSTPVSLPGHPQPFFYSLQSLRPSQVTVKDMYLFSLGSESPKGAIGHIVSTEKTILAVERNKVLLPPLWNRTFSWGFDDFSCCLGSYGSDKVLMTFENLAAWGRCLCAVCPSPTTIVTSGTSTVVCVWELSMTKGRPRGLRLRQALYGHTQAVTCLAASVTFSLLVSGSQDCTCILWDLDHLTHVTRLPAHREGISAITISDVSGTIVSCAGAHLSLWNVNGQPLASITTAWGPEGAITCCCLMEGPAWDTSQIIITGSQDGMVRVWKTEDVKMSVPGRPAGEEPPAQPPSPRGHKWEKNLALSRELDVSIALTGKPSKTSPAVTALAVSRNHTKLLVGDERGRIFCWSADG

SEQ ID NO: 206656 - protein, 2267 aa, Artificial Sequence
  derived and/or modified sequence
  misc_feature (1)..(1): Xaa can be any naturally occurring amino acid
XKLASQAIEPDVLRQFLGLGIPSSLSATTKILDSSHTHRGNPGCSGSQTAQGLAEGPWPAAPDAGLHPGVTQAPQPLGESQDSTTALQTALSLISMTSPRNLQPQRAALAPSFVEFDMSVEGYGCLFIPTLSTVMGTSTEYSVSGGIGTGATRPFPPPGGLTFSCWFLISRHGAATEGHPLRFLTLVRHLARTEQPFVCFSVSLCPDDLSLVVSTEEKEFQPLDVMEPEDDSEPSAGCQLQVRCGQLLACGQWHHLAVVVTKEMKRHCTVSTCLDGQVIGSAKMLYIQALPGPFLSMDPSAFVDVYGYIATPRVWKQKSSLIWRLGPTYLFEEAISMETLEVINKLGPRYCGNFQAVHVQGEDLDSEATPFVAEERVSFGLHIASSSITSVADIRNAYNEVDSRLIAKEMNISSRDNAMPVFLLRNCAGHLSGSLRTIGAVAVGQLGVRVFHSSPAASSLDFIGGPAILLGLISLATDDHTMYAAVKVLHSVLTSNAMCDFLMQHICGYQIMAFLLRKKASLLNHRIFQLILSVAGTVELGFRSSAITNTGVFQHILCNFELWMNTADNLELSLFSHLLEILQSPREGPRNAEAAHQAQLIPKLIFLFNEPSLIPSKISTIIGILACQLRGHFSTQDLLRIGLFVVYTLKPSSVNERQICMDGALDPSLPAGSQTSGKTIWLRNQLLEMLLSVISSPQLHLSSESKEEMFLKLGPDWFLLLLQGHLHASTTVLALKLLLYFLASPSLRTRFRDGLCAGSWVERSTEGVDIVMDNLKSQSPLPEQSPCLLPGFRVLNDFLAHHVHIPEVYLIVSTFFLQTPLTELMDGPKDSLDAMLQWLLQRHHQEEVLQAGLCTEGALLLLEMLKATMSQPLAGSEDGAWAQTFPASVLQFLSLVHRTYPQDPAWRAPEFLQTLAIAAFPLGAQKGVGAESTRNTSSPEAAAEGDSTVEGLQAPTKAHPARRKLREFTQLLLRELLLGASSPKQWLPLEVLLEASPDHATSQQKRDFQSEVLLSAMELFHMTSGGDAAMFRDGKEPQPSAEAAAAPSLANISCFTQKLVEKLYSGMFSADPRHILLFILEHIMVVIETASSQRDTVLSTLYSSLNKVILYCLSKPQQSLSECLGLLSILGFLQEHWDVVFATYNSNISFLLCLMHCLLLLNERSYPEGFGLEPKPRMSTYHQVFLSPNEDVKEKREDLPSLSDVQHNIQKTVQTLWQQLVAQRQQTLEDAFKIDLSVKPGEREVKIEEVTPLWEETMLKAWQHYLASEKKSLASRSNVAHHSKVTLWSGSLSSAMKLMPGRQAKDPECKTEDFVSCIENYRRRGQELYASLYKDHVQRRKCGNIKAANAWARIQEQLFGELGLWSQGEETKPCSPWELDWREGPARMRKRIKRLSPLEALSSGRHKESQDKNDHISQTNAENQDELTLREAEGEPDEVGVDCTQLTFFPALHESLHSEDFLELCRERQVILQELLDKEKVTQKFSLVIVQGHLVSEGVLLFGHQHFYICENFTLSPTGDVYCTRHCLSNISDPFIFNLCSKDRSTDHYSCQCHSYADMRELRQARFLLQDIALEIFFHNGYSKFLVFYNNDRSKAFKSFCSFQPSLKGKATSEDTLSLRRYPGSDRIMLQKWQKRDISNFEYLMYLNTAAGRTCNDYMQYPVFPWVLADYTSETLNLANPKIFRDLSKPMGAQTKERKLKFIQRFKEVEKTEGDMTVQCHYYTHYSSAIIVASYLVRMPPFTQAFCALQGGSFDVADRMFHSVKSTWESASRENMSDVRELTPEFFYLPEFLTNCNGVEFGCMQDGTVLGDVQLPPWADGDPRKFISLHRKALESDFVSANLHHWIDLIFGYKQQGPAAVDAVNIFHPYFYGDRMDLSSITDPLIKSTILGFVSNFGQVPKQLFTKPHPARTAAGKPLPGKDVSTPVSLPGHPQPFFYSLQSLRPSQVTVKDMYLFSLGSESPKGAIGHIVSTEKTILAVERNKVLLPPLWNRTFSWGFDDFSCCLGSYGSDKVLMTFENLAAWGRCLCAVCPSPTTIVTSGTSTVVCVWELSMTKGRPRGLRLRQALYGHTQAVTCLAASVTFSLLVSGSQDCTCILWDLDHLTHVTRLPAHREGISAITISDVSGTIVSCAGAHLSLWNVNGQPLASITTAWGPEGAITCCCLMEGPAWDTSQIIITGSQDGMVRVWKTEDVKMSVPGLQMGRKREAAEALAQQCQAEGGRGDWGLSSAYRRNPQGLLPHSSQGRASGNHSSAAQPSPWPMGLL

SEQ ID NO: 206657 - protein, 3184 aa, Artificial Sequence
  derived and/or modified sequence
MEAEDLSKAEDRNEDPGSKNEGQLAAVQPDVPHGGQSSSPTALWDMLERKFLEYQQLTHKSPIERQKSLLSLLPLFLKAWEHSVGIICFPSLQRLAEDVSDQLAQQLQKALVGKPAEQARLAAGQLLWWKGDVDQDGYLLLKSVYVLTGTDSETLGRVAESGLPALLLQCLYLFFVFPLDKDELLESDLQVQKMFVQMLLNICSDSQGLEGLLSGSELQSLLIATTCLREHSCCFWKEPTFCVLRAISKAQNLSIIQYLQATDCVRLSLQNLSRLTDTLPAPEVSEAVSLILGFVKDSYPVSSALFLEFENSEGYPLLLKVLLRYDGLTQSEVDPHLEELLGLVVWLTTCGRSELKVFDSITYPQLEGFKFHHEASGVTVKNLQAFQVLQNVFHKASDSVLCIQVLSVIRTMWAWNARNFFLLEWTLQPISQFVEIMPLKPAPVQEHFFQLLEALVFELHYVPHEILRKVQHLIKESPGPSCTLMALQSILSIAGGDPLFTDIFRDSGLLGLLLAQLRKQAKIMRKSGNKVSTPGVQDPERELTCVMLRIVVTLLKGSVRNAVVLKDHGMVPFIKIFLDDECYREASLSILEQLSAINAEEYMSIIVGALCSSTQGELQLKLDLLKSLLRILVTPKGRAAFRVSSGFNGLLSLLSDLEGSLQEPPLQAWGAVSPRQTLELVLYTLCAVSAALHWDPVNGYFFRRNGLFEKLAEDLCLLGCFGALEEEGNLLRSWVDTKARPFADLLGTAFSSSGSLPPRIQSCLQILGFLDSMASGTLHLRGDLKESLRTKQGPVVDVQKGETGSDPQRNFKQWPDLEERMDEGDAAIMHPGVVCIMVRLLPRLYHEDHPQLSEEIQCSLASHIQSLVKSEKNRQVMCEAGLLGTLMASCHRALVTSGSPLHSRLIRIFEKLASQAIEPDVLRQFLGLGIPSSLSATTKILDSSHTHRGNPGCSGSQTAQGLAEGPWPAAPDAGLHPGVTQAPQPLGESQDSTTALQTALSLISMTSPRNLQPQRAALAPSFVEFDMSVEGYGCLFIPTLSTVMGTSTEYSVSGGIGTGATRPFPPPGGLTFSCWFLISRHGAATEGHPLRFLTLVRHLARTEQPFVCFSVSLCPDDLSLVVSTEEKEFQPLDVMEPEDDSEPSAGCQLQVRCGQLLACGQWHHLAVVVTKEMKRHCTVSTCLDGQVIGSAKMLYIQALPGPFLSMDPSAFVDVYGYIATPRVWKQKSSLIWRLGPTYLFEEAISMETLEVINKLGPRYCGNFQAVHVQGEDLDSEATPFVAEERVSFGLHIASSSITSVADIRNAYNEVDSRLIAKEMNISSRDNAMPVFLLRNCAGHLSGSLRTIGAVAVGQLGVRVFHSSPAASSLDFIGGPAILLGLISLATDDHTMYAAVKVLHSVLTSNAMCDFLMQHICGYQIMAFLLRKKASLLNHRIFQLILSVAGTVELGFRSSAITNTGVFQHILCNFELWMNTADNLELSLFSHLLEILQSPREGPRNAEAAHQAQLIPKLIFLFNEPSLIPSKISTIIGILACQLRGHFSTQDLLRIGLFVVYTLKPSSVNERQICMDGALDPSLPAGSQTSGKTIWLRNQLLEMLLSVISSPQLHLSSESKEEMFLKLGPDWFLLLLQGHLHASTTVLALKLLLYFLASPSLRTRFRDGLCAGSWVERSTEGVDIVMDNLKSQSPLPEQSPCLLPGFRVLNDFLAHHVHIPEVYLIVSTFFLQTPLTELMDGPKDSLDAMLQWLLQRHHQEEVLQAGLCTEGALLLLEMLKATMSQPLAGSEDGAWAQTFPASVLQFLSLVHRTYPQDPAWRAPEFLQTLAIAAFPLGAQKGVGAESTRNTSSPEAAAEGDSTVEGLQAPTKAHPARRKLREFTQLLLRELLLGASSPKQWLPLEVLLEASPDHATSQQKRDFQSEVLLSAMELFHMTSGGDAAMFRDGKEPQPSAEAAAAPSLANISCFTQKLVEKLYSGMFSADPRHILLFILEHIMVVIETASSQRDTVLSTLYSSLNKVILYCLSKPQQSLSECLGLLSILGFLQEHWDVVFATYNSNISFLLCLMHCLLLLNERSYPEGFGLEPKPRMSTYHQVFLSPNEDVKEKREDLPSLSDVQHNIQKTVQTLWQQLVAQRQQTLEDAFKIDLSVKPGEREVKIEEVTPLWEETMLKAWQHYLASEKKSLASRSNVAHHSKVTLWSGSLSSAMKLMPGRQAKDPECKTEDFVSCIENYRRRGQELYASLYKDHVQRRKCGNIKAANAWARIQEQLFGELGLWSQGEETKPCSPWELDWREGPARMRKRIKRLSPLEALSSGRHKESQDKNDHISQTNAENQDELTLREAEGEPDEVGVDCTQLTFFPALHESLHSEDFLELCRERQVILQELLDKEKVTQKFSLVIVQGHLVSEGVLLFGHQHFYICENFTLSPTGDVYCTRHCLSNISDPFIFNLCSKDRSTDHYSCQCHSYADMRELRQARFLLQDIALEIFFHNGYSKFLVFYNNDRSKAFKSFCSFQPSLKGKATSEDTLSLRRYPGSDRIMLQKWQKRDISNFEYLMYLNTAAGRTCNDYMQYPVFPWVLADYTSETLNLANPKIFRDLSKPMGAQTKERKLKFIQRFKEVEKTEGDMTVQCHYYTHYSSAIIVASYLVRMPPFTQAFCALQGGSFDVADRMFHSVKSTWESASRENMSDVRELTPEFFYLPEFLTNCNGVEFGCMQDGTVLGDVQLPPWADGDPRKFISLHRKALESDFVSANLHHWIDLIFGYKQQGPAAVDAVNIFHPYFYGDRMDLSSITDPLIKSTILGFVSNFGQVPKQLFTKPHPARTAAGKPLPGKDVSTPVSLPGHPQPFFYSLQSLRPSQVTVKDMYLFSLGSESPKGAIGHIVSTEKTILAVERNKVLLPPLWNRTFSWGFDDFSCCLGSYGSDKVLMTFENLAAWGRCLCAVCPSPTTIVTSGTSTVVCVWELSMTKGRPRGLRLRQALYGHTQAVTCLAASVTFSLLVSGSQDCTCILWDLDHLTHVTRLPAHREGISAITISDVSGTIVSCAGAHLSLWNVNGQPLASITTAWGPEGAITCCCLMEGPAWDTSQIIITGSQDGMVRVWKTEDVKMSVPGRPAGEEPPAQPPSPRGHKWEKNLALSRELDVSIALTGKPSKTSPAVTALAVSRNHTKLLVGDERGRIFCWSADG

SEQ ID NO: 206658 - protein, 3176 aa, Artificial Sequence
  derived and/or modified sequence
MEAEDLSKAEDRNEDPGSKNEGQLAAVQPDVPHGGQSSSPTALWDMLERKFLEYQQLTHKSPIERQKSLLSLLPLFLKAWEHSVGIICFPSLQRLAEDVSDQLAQQLQKALVGKPAEQARLAAGQLLWWKGDVDQDGYLLLKSVYVLTGTDSETLGRVAESGLPALLLQCLYLFFVFPLDKDELLESDLQVQKMFVQMLLNICSDSQGLEGLLSGSELQSLLIATTCLREHSCCFWKEPTFCVLRAISKAQNLSIIQYLQATDCVRLSLQNLSRLTDTLPAPEVSEAVSLILGFVKDSYPVSSALFLEFENSEGYPLLLKVLLRYDGLTQSEVDPHLEELLGLVVWLTTCGRSELKVFDSITYPQLEGFKFHHEASGVTVKNLQAFQVLQNVFHKASDSVLCIQVLSVIRTMWAWNARNFFLLEWTLQPISQFVEIMPLKPAPVQEHFFQLLEALVFELHYVPHEILRKVQHLIKESPGPSCTLMALQSILSIAGGDPLFTDIFRDSGLLGLLLAQLRKQAKIMRKSGNKVSTPGVQDPERELTCVMLRIVVTLLKGSVRNAVVLKDHGMVPFIKIFLDDECYREASLSILEQLSAINAEEYMSIIVGALCSSTQGELQLKLDLLKSLLRILVTPKGRAAFRVSSGFNGLLSLLSDLEGSLQEPPLQAWGAVSPRQTLELVLYTLCAVSAALHWDPVNGYFFRRNGLFEKLAEDLCLLGCFGALEEEGNLLRSWVDTKARPFADLLGTAFSSSGSLPPRIQSCLQILGFLDSMASGTLHLRGDLKESLRTKQGPVVDVQKGETGSDPQRNFKQWPDLEERMDEGDAAIMHPGVVCIMVRLLPRLYHEDHPQLSEEIQCSLASHIQSLVKSEKNRQVMCEAGLLGTLMASCHRALVTSGSPLHSRLIRIFEKLASQAIEPDVLRQFLGLGIPSSLSATTKILDSSHTHRGNPGCSGSQTAQGLAEGPWPAAPDAGLHPGVTQAPQPLGESQDSTTALQTALSLISMTSPRNLQPQRAALAPSFVEFDMSVEGYGCLFIPTLSTVMGTSTEYSVSGGIGTGATRPFPPPGGLTFSCWFLISRHGAATEGHPLRFLTLVRHLARTEQPFVCFSVSLCPDDLSLVVSTEEKEFQPLDVMEPEDDSEPSAGCQLQVRCGQLLACGQWHHLAVVVTKEMKRHCTVSTCLDGQVIGSAKMLYIQALPGPFLSMDPSAFVDVYGYIATPRVWKQKSSLIWRLGPTYLFEEAISMETLEVINKLGPRYCGNFQAVHVQGEDLDSEATPFVAEERVSFGLHIASSSITSVADIRNAYNEVDSRLIAKEMNISSRDNAMPVFLLRNCAGHLSGSLRTIGAVAVGQLGVRVFHSSPAASSLDFIGGPAILLGLISLATDDHTMYAAVKVLHSVLTSNAMCDFLMQHICGYQIMAFLLRKKASLLNHRIFQLILSVAGTVELGFRSSAITNTGVFQHILCNFELWMNTADNLELSLFSHLLEILQSPREGPRNAEAAHQAQLIPKLIFLFNEPSLIPSKISTIIGILACQLRGHFSTQDLLRIGLFVVYTLKPSSVNERQICMDGALDPSLPAGSQTSGKTIWLRNQLLEMLLSVISSPQLHLSSESKEEMFLKLGPDWFLLLLQGHLHASTTVLALKLLLYFLASPSLRTRFRDGLCAGSWVERSTEGVDIVMDNLKSQSPLPEQSPCLLPGFRVLNDFLAHHVHIPEVYLIVSTFFLQTPLTELMDGPKDSLDAMLQWLLQRHHQEEVLQAGLCTEGALLLLEMLKATMSQPLAGSEDGAWAQTFPASVLQFLSLVHRTYPQDPAWRAPEFLQTLAIAAFPLGAQKGVGAESTRNTSSPEAAAEGDSTVEGLQAPTKAHPARRKLREFTQLLLRELLLGASSPKQWLPLEVLLEASPDHATSQQKRDFQSEVLLSAMELFHMTSGGDAAMFRDGKEPQPSAEAAAAPSLANISCFTQKLVEKLYSGMFSADPRHILLFILEHIMVVIETASSQRDTVLSTLYSSLNKVILYCLSKPQQSLSECLGLLSILGFLQEHWDVVFATYNSNISFLLCLMHCLLLLNERSYPEGFGLEPKPRMSTYHQVFLSPNEDVKEKREDLPSLSDVQHNIQKTVQTLWQQLVAQRQQTLEDAFKIDLSVKPGEREVKIEEVTPLWEETMLKAWQHYLASEKKSLASRSNVAHHSKVTLWSGSLSSAMKLMPGRQAKDPECKTEDFVSCIENYRRRGQELYASLYKDHVQRRKCGNIKAANAWARIQEQLFGELGLWSQGEETKPCSPWELDWREGPARMRKRIKRLSPLEALSSGRHKESQDKNDHISQTNAENQDELTLREAEGEPDEVGVDCTQLTFFPALHESLHSEDFLELCRERQVILQELLDKEKVTQKFSLVIVQGHLVSEGVLLFGHQHFYICENFTLSPTGDVYCTRHCLSNISDPFIFNLCSKDRSTDHYSCQCHSYADMRELRQARFLLQDIALEIFFHNGYSKFLVFYNNDRSKAFKSFCSFQPSLKGKATSEDTLSLRRYPGSDRIMLQKWQKRDISNFEYLMYLNTAAGRTCNDYMQYPVFPWVLADYTSETLNLANPKIFRDLSKPMGAQTKERKLKFIQRFKEVEKTEGDMTVQCHYYTHYSSAIIVASYLVRMPPFTQAFCALQGGSFDVADRMFHSVKSTWESASRENMSDVRELTPEFFYLPEFLTNCNGVEFGCMQDGTVLGDVQLPPWADGDPRKFISLHRKALESDFVSANLHHWIDLIFGYKQQGPAAVDAVNIFHPYFYGDRMDLSSITDPLIKSTILGFVSNFGQVPKQLFTKPHPARTAAGKPLPGKDVSTPVSLPGHPQPFFYSLQSLRPSQVTVKDMYLFSLGSESPKGAIGHIVSTEKTILAVERNKVLLPPLWNRTFSWGFDDFSCCLGSYGSDKVLMTFENLAAWGRCLCAVCPSPTTIVTSGTSTVVCVWELSMTKGRPRGLRLRQALYGHTQAVTCLAASVTFSLLVSGSQDCTCILWDLDHLTHVTRLPAHREGISAITISDVSGTIVSCAGAHLSLWNVNGQPLASITTAWGPEGAITCCCLMEGPAWDTSQIIITGSQDGMVRVWKTEDVKMSVPGLQMGRKREAAEALAQQCQAEGGRGDWGLSSAYRRNPQGLLPHSSQGRASGNHSSAAQPSPWPMGLL

SEQ ID NO: 206659 - protein, 624 aa, Artificial Sequence
  derived and/or modified sequence
MLQKWQKRDISNFEYLMYLNTAAGRTCNDYMQYPVFPWVLADYTSETLNLANPKIFRDLSKPMGAQTKERKLKFIQRFKEVEKTEGDMTVQCHYYTHYSSAIIVASYLVRMPPFTQAFCALQGGSFDVADRMFHSVKSTWESASRENMSDVRELTPEFFYLPEFLTNCNGVEFGCMQDGTVLGDVQLPPWADGDPRKFISLHRKALESDFVSANLHHWIDLIFGYKQQGPAAVDAVNIFHPYFYGDRMDLSSITDPLIKSTILGFVSNFGQVPKQLFTKPHPARTAAGKPLPGKDVSTPVSLPGHPQPFFYSLQSLRPSQVTVKDMYLFSLGSESPKGAIGHIVSTEKTILAVERNKVLLPPLWNRTFSWGFDDFSCCLGSYGSDKVLMTFENLAAWGRCLCAVCPSPTTIVTSGTSTVVCVWELSMTKGRPRGLRLRQALYGHTQAVTCLAASVTFSLLVSGSQDCTCILWDLDHLTHVTRLPAHREGISAITISDVSGTIVSCAGAHLSLWNVNGQPLASITTAWGPEGAITCCCLMEGPAWDTSQIIITGSQDGMVRVWKTEDVKMSVPGRPAGEEPPAQPPTLSMADGTSMKRMSTHTRRAEQHAGNCDLVMPSCTRNYT

SEQ ID NO: 206660 - DNA, 3816 bp, Artificial Sequence
  derived and/or modified sequence
tgaagagacttccagagcgaggtgctgctgagcgccatggagctgttccacatgaccagcggcggcgacgccgccatgttcagagacggcaaggagccccagcccagcgccgaggccgccgccgcccccagcctggccaacatcagctgcttcacccagaagctggtggagaagctgtacagcggcatgttcagcgccgaccccagacacatcctgctgttcatcctggagcacatcatggtggtgatcgagaccgccagcagccagagagacaccgtgctgagcaccctgtacagcagcctgaacaaggtgatcctgtactgcctgagcaagccccagcagagcctgagcgagtgcctgggcctgctgagcatcctgggcttcctgcaggagcactgggacgtggtgttcgccacctacaacagcaacatcagcttcctgctgtgcctgatgcactgcctgctgctgctgaacgagagaagctaccccgagggcttcggcctggagcccaagcccagaatgagcacctaccaccaggtgttcctgagccccaacgaggacgtgaaggagaagagagaggacctgcccagcctgagcgacgtgcagcacaacatccagaagaccgtgcagaccctgtggcagcagctggtggcccagagacagcagaccctggaggacgccttcaagatcgacctgagcgtgaagcccggcgagagagaggtgaagatcgaggaggtgacccccctgtgggaggagaccatgctgaaggcctggcagcactacctggccagcgagaagaagagcctggccagcagaagcaacgtggcccaccacagcaaggtgaccctgtggagcggcagcctgagcagcgccatgaagctgatgcccggcagacaggccaaggaccccgagtgcaagaccgaggacttcgtgagctgcatcgagaactacagaagaagaggccaggagctgtacgccagcctgtacaaggaccacgtgcagagaagaaagtgcggcaacatcaaggccgccaacgcctgggccagaatccaggagcagctgttcggcgagctgggcctgtggagccagggcgaggagaccaagccctgcagcccctgggagctggactggagagagggccccgccagaatgagaaagagaatcaagagactgagccccctggaggccctgagcagcggcagacacaaggagagccaggacaagaacgaccacatcagccagaccaacgccgagaaccaggacgagctgaccctgagagaggccgagggcgagcccgacgaggtgggcgtggactgcacccagctgaccttcttccccgccctgcacgagagcctgcacagcgaggacttcctggagctgtgcagagagagacaggtgatcctgcaggagctgctggacaaggagaaggtgacccagaagttcagcctggtgatcgtgcagggccacctggtgagcgagggcgtgctgctgttcggccaccagcacttctacatctgcgagaacttcaccctgagccccaccggcgacgtgtactgcaccagacactgcctgagcaacatcagcgaccccttcatcttcaacctgtgcagcaaggacagaagcaccgaccactacagctgccagtgccacagctacgccgacatgagagagctgagacaggccagattcctgctgcaggacatcgccctggagatcttcttccacaacggctacagcaagttcctggtgttctacaacaacgacagaagcaaggccttcaagagcttctgcagcttccagcccagcctgaagggcaaggccaccagcgaggacaccctgagcctgagaagataccccggcagcgacagaatcatgctgcagaagtggcagaagagagacatcagcaacttcgagtacctgatgtacctgaacaccgccgccggcagaacctgcaacgactacatgcagtaccccgtgttcccctgggtgctggccgactacaccagcgagaccctgaacctggccaaccccaagatcttcagagacctgagcaagcccatgggcgcccagaccaaggagagaaagctgaagttcatccagagattcaaggaggtggagaagaccgagggcgacatgaccgtgcagtgccactactacacccactacagcagcgccatcatcgtggccagctacctggtgagaatgccccccttcacccaggccttctgcgccctgcagggcggcagcttcgacgtggccgacagaatgttccacagcgtgaagagcacctgggagagcgccagcagagagaacatgagcgacgtgagagagctgacccccgagttcttctacctgcccgagttcctgaccaactgcaacggcgtggagttcggctgcatgcaggacggcaccgtgctgggcgacgtgcagctgcccccctgggccgacggcgaccccagaaagttcatcagcctgcacagaaaggccctggagagcgacttcgtgagcgccaacctgcaccactggatcgacctgatcttcggctacaagcagcagggccccgccgccgtggacgccgtgaacatcttccacccctacttctacggcgacagaatggacctgagcagcatcaccgaccccctgatcaagagcaccatcctgggcttcgtgagcaacttcggccaggtgcccaagcagctgttcaccaagccccaccccgccagaaccgccgccggcaagcccctgcccggcaaggacgtgagcacccccgtgagcctgcccggccacccccagcccttcttctacagcctgcagagcctgagacccagccaggtgaccgtgaaggacatgtacctgttcagcctgggcagcgagagccccaagggcgccatcggccacatcgtgagcaccgagaagaccatcctggccgtggagagaaacaaggtgctgctgccccccctgtggaacagaaccttcagctggggcttcgacgacttcagctgctgcctgggcagctacggcagcgacaaggtgctgatgaccttcgagaacctggccgcctggggcagatgcctgtgcgccgtgtgccccagccccaccaccatcgtgaccagcggcaccagcaccgtggtgtgcgtgtgggagctgagcatgaccaagggcagacccagaggcctgagactgagacaggccctgtacggccacacccaggccgtgacctgcctggccgccagcgtgaccttcagcctgctggtgagcggcagccaggactgcacctgcatcctgtgggacctggaccacctgacccacgtgaccagactgcccgcccacagagagggcatcagcgccatcaccatcagcgacgtgagcggcaccatcgtgagctgcgccggcgcccacctgagcctgtggaacgtgaacggccagcccctggccagcatcaccaccgcctggggccccgagggcgccatcacctgctgctgcctgatggagggccccgcctgggacaccagccagatcatcatcaccggcagccaggacggcatggtgagagtgtggaagaccgaggacgtgaagatgagcgtgcccggcagacccgccggcgaggagccccccgcccagccccccagccccagaggccacaagtgggagaagaacctggccctgagcagagagctggacgtgagcatcgccctgaccggcaagcccagcaagaccagccccgccgtgaccgccctggccgtgagcagaaaccacaccaagctgctggtgggcgacgagagaggcagaatcttctgctggagcgccgacggctag

SEQ ID NO: 206661 - DNA, 6804 bp, Artificial Sequence
  derived and/or modified sequence
tgaaagctggccagccaggccatcgagcccgacgtgctgagacagttcctgggcctgggcatccccagcagcctgagcgccaccaccaagatcctggacagcagccacacccacagaggcaaccccggctgcagcggcagccagaccgcccagggcctggccgagggcccctggcccgccgcccccgacgccggcctgcaccccggcgtgacccaggccccccagcccctgggcgagagccaggacagcaccaccgccctgcagaccgccctgagcctgatcagcatgaccagccccagaaacctgcagccccagagagccgccctggcccccagcttcgtggagttcgacatgagcgtggagggctacggctgcctgttcatccccaccctgagcaccgtgatgggcaccagcaccgagtacagcgtgagcggcggcatcggcaccggcgccaccagacccttccccccccccggcggcctgaccttcagctgctggttcctgatcagcagacacggcgccgccaccgagggccaccccctgagattcctgaccctggtgagacacctggccagaaccgagcagcccttcgtgtgcttcagcgtgagcctgtgccccgacgacctgagcctggtggtgagcaccgaggagaaggagttccagcccctggacgtgatggagcccgaggacgacagcgagcccagcgccggctgccagctgcaggtgagatgcggccagctgctggcctgcggccagtggcaccacctggccgtggtggtgaccaaggagatgaagagacactgcaccgtgagcacctgcctggacggccaggtgatcggcagcgccaagatgctgtacatccaggccctgcccggccccttcctgagcatggaccccagcgccttcgtggacgtgtacggctacatcgccacccccagagtgtggaagcagaagagcagcctgatctggagactgggccccacctacctgttcgaggaggccatcagcatggagaccctggaggtgatcaacaagctgggccccagatactgcggcaacttccaggccgtgcacgtgcagggcgaggacctggacagcgaggccacccccttcgtggccgaggagagagtgagcttcggcctgcacatcgccagcagcagcatcaccagcgtggccgacatcagaaacgcctacaacgaggtggacagcagactgatcgccaaggagatgaacatcagcagcagagacaacgccatgcccgtgttcctgctgagaaactgcgccggccacctgagcggcagcctgagaaccatcggcgccgtggccgtgggccagctgggcgtgagagtgttccacagcagccccgccgccagcagcctggacttcatcggcggccccgccatcctgctgggcctgatcagcctggccaccgacgaccacaccatgtacgccgccgtgaaggtgctgcacagcgtgctgaccagcaacgccatgtgcgacttcctgatgcagcacatctgcggctaccagatcatggccttcctgctgagaaagaaggccagcctgctgaaccacagaatcttccagctgatcctgagcgtggccggcaccgtggagctgggcttcagaagcagcgccatcaccaacaccggcgtgttccagcacatcctgtgcaacttcgagctgtggatgaacaccgccgacaacctggagctgagcctgttcagccacctgctggagatcctgcagagccccagagagggccccagaaacgccgaggccgcccaccaggcccagctgatccccaagctgatcttcctgttcaacgagcccagcctgatccccagcaagatcagcaccatcatcggcatcctggcctgccagctgagaggccacttcagcacccaggacctgctgagaatcggcctgttcgtggtgtacaccctgaagcccagcagcgtgaacgagagacagatctgcatggacggcgccctggaccccagcctgcccgccggcagccagaccagcggcaagaccatctggctgagaaaccagctgctggagatgctgctgagcgtgatcagcagcccccagctgcacctgagcagcgagagcaaggaggagatgttcctgaagctgggccccgactggttcctgctgctgctgcagggccacctgcacgccagcaccaccgtgctggccctgaagctgctgctgtacttcctggccagccccagcctgagaaccagattcagagacggcctgtgcgccggcagctgggtggagagaagcaccgagggcgtggacatcgtgatggacaacctgaagagccagagccccctgcccgagcagagcccctgcctgctgcccggcttcagagtgctgaacgacttcctggcccaccacgtgcacatccccgaggtgtacctgatcgtgagcaccttcttcctgcagacccccctgaccgagctgatggacggccccaaggacagcctggacgccatgctgcagtggctgctgcagagacaccaccaggaggaggtgctgcaggccggcctgtgcaccgagggcgccctgctgctgctggagatgctgaaggccaccatgagccagcccctggccggcagcgaggacggcgcctgggcccagaccttccccgccagcgtgctgcagttcctgagcctggtgcacagaacctacccccaggaccccgcctggagagcccccgagttcctgcagaccctggccatcgccgccttccccctgggcgcccagaagggcgtgggcgccgagagcaccagaaacaccagcagccccgaggccgccgccgagggcgacagcaccgtggagggcctgcaggcccccaccaaggcccaccccgccagaagaaagctgagagagttcacccagctgctgctgagagagctgctgctgggcgccagcagccccaagcagtggctgcccctggaggtgctgctggaggccagccccgaccacgccaccagccagcagaagagagacttccagagcgaggtgctgctgagcgccatggagctgttccacatgaccagcggcggcgacgccgccatgttcagagacggcaaggagccccagcccagcgccgaggccgccgccgcccccagcctggccaacatcagctgcttcacccagaagctggtggagaagctgtacagcggcatgttcagcgccgaccccagacacatcctgctgttcatcctggagcacatcatggtggtgatcgagaccgccagcagccagagagacaccgtgctgagcaccctgtacagcagcctgaacaaggtgatcctgtactgcctgagcaagccccagcagagcctgagcgagtgcctgggcctgctgagcatcctgggcttcctgcaggagcactgggacgtggtgttcgccacctacaacagcaacatcagcttcctgctgtgcctgatgcactgcctgctgctgctgaacgagagaagctaccccgagggcttcggcctggagcccaagcccagaatgagcacctaccaccaggtgttcctgagccccaacgaggacgtgaaggagaagagagaggacctgcccagcctgagcgacgtgcagcacaacatccagaagaccgtgcagaccctgtggcagcagctggtggcccagagacagcagaccctggaggacgccttcaagatcgacctgagcgtgaagcccggcgagagagaggtgaagatcgaggaggtgacccccctgtgggaggagaccatgctgaaggcctggcagcactacctggccagcgagaagaagagcctggccagcagaagcaacgtggcccaccacagcaaggtgaccctgtggagcggcagcctgagcagcgccatgaagctgatgcccggcagacaggccaaggaccccgagtgcaagaccgaggacttcgtgagctgcatcgagaactacagaagaagaggccaggagctgtacgccagcctgtacaaggaccacgtgcagagaagaaagtgcggcaacatcaaggccgccaacgcctgggccagaatccaggagcagctgttcggcgagctgggcctgtggagccagggcgaggagaccaagccctgcagcccctgggagctggactggagagagggccccgccagaatgagaaagagaatcaagagactgagccccctggaggccctgagcagcggcagacacaaggagagccaggacaagaacgaccacatcagccagaccaacgccgagaaccaggacgagctgaccctgagagaggccgagggcgagcccgacgaggtgggcgtggactgcacccagctgaccttcttccccgccctgcacgagagcctgcacagcgaggacttcctggagctgtgcagagagagacaggtgatcctgcaggagctgctggacaaggagaaggtgacccagaagttcagcctggtgatcgtgcagggccacctggtgagcgagggcgtgctgctgttcggccaccagcacttctacatctgcgagaacttcaccctgagccccaccggcgacgtgtactgcaccagacactgcctgagcaacatcagcgaccccttcatcttcaacctgtgcagcaaggacagaagcaccgaccactacagctgccagtgccacagctacgccgacatgagagagctgagacaggccagattcctgctgcaggacatcgccctggagatcttcttccacaacggctacagcaagttcctggtgttctacaacaacgacagaagcaaggccttcaagagcttctgcagcttccagcccagcctgaagggcaaggccaccagcgaggacaccctgagcctgagaagataccccggcagcgacagaatcatgctgcagaagtggcagaagagagacatcagcaacttcgagtacctgatgtacctgaacaccgccgccggcagaacctgcaacgactacatgcagtaccccgtgttcccctgggtgctggccgactacaccagcgagaccctgaacctggccaaccccaagatcttcagagacctgagcaagcccatgggcgcccagaccaaggagagaaagctgaagttcatccagagattcaaggaggtggagaagaccgagggcgacatgaccgtgcagtgccactactacacccactacagcagcgccatcatcgtggccagctacctggtgagaatgccccccttcacccaggccttctgcgccctgcagggcggcagcttcgacgtggccgacagaatgttccacagcgtgaagagcacctgggagagcgccagcagagagaacatgagcgacgtgagagagctgacccccgagttcttctacctgcccgagttcctgaccaactgcaacggcgtggagttcggctgcatgcaggacggcaccgtgctgggcgacgtgcagctgcccccctgggccgacggcgaccccagaaagttcatcagcctgcacagaaaggccctggagagcgacttcgtgagcgccaacctgcaccactggatcgacctgatcttcggctacaagcagcagggccccgccgccgtggacgccgtgaacatcttccacccctacttctacggcgacagaatggacctgagcagcatcaccgaccccctgatcaagagcaccatcctgggcttcgtgagcaacttcggccaggtgcccaagcagctgttcaccaagccccaccccgccagaaccgccgccggcaagcccctgcccggcaaggacgtgagcacccccgtgagcctgcccggccacccccagcccttcttctacagcctgcagagcctgagacccagccaggtgaccgtgaaggacatgtacctgttcagcctgggcagcgagagccccaagggcgccatcggccacatcgtgagcaccgagaagaccatcctggccgtggagagaaacaaggtgctgctgccccccctgtggaacagaaccttcagctggggcttcgacgacttcagctgctgcctgggcagctacggcagcgacaaggtgctgatgaccttcgagaacctggccgcctggggcagatgcctgtgcgccgtgtgccccagccccaccaccatcgtgaccagcggcaccagcaccgtggtgtgcgtgtgggagctgagcatgaccaagggcagacccagaggcctgagactgagacaggccctgtacggccacacccaggccgtgacctgcctggccgccagcgtgaccttcagcctgctggtgagcggcagccaggactgcacctgcatcctgtgggacctggaccacctgacccacgtgaccagactgcccgcccacagagagggcatcagcgccatcaccatcagcgacgtgagcggcaccatcgtgagctgcgccggcgcccacctgagcctgtggaacgtgaacggccagcccctggccagcatcaccaccgcctggggccccgagggcgccatcacctgctgctgcctgatggagggccccgcctgggacaccagccagatcatcatcaccggcagccaggacggcatggtgagagtgtggaagaccgaggacgtgaagatgagcgtgcccggcctgcagatgggcagaaagagagaggccgccgaggccctggcccagcagtgccaggccgagggcggcagaggcgactggggcctgagcagcgcctacagaagaaacccccagggcctgctgccccacagcagccagggcagagccagcggcaaccacagcagcgccgcccagcccagcccctggcccatgggcctgctgtag

SEQ ID NO: 206662 - DNA, 9555 bp, Artificial Sequence
  derived and/or modified sequence
atggaggccgaggacctgagcaaggccgaggacagaaacgaggaccccggcagcaagaacgagggccagctggccgccgtgcagcccgacgtgccccacggcggccagagcagcagccccaccgccctgtgggacatgctggagagaaagttcctggagtaccagcagctgacccacaagagccccatcgagagacagaagagcctgctgagcctgctgcccctgttcctgaaggcctgggagcacagcgtgggcatcatctgcttccccagcctgcagagactggccgaggacgtgagcgaccagctggcccagcagctgcagaaggccctggtgggcaagcccgccgagcaggccagactggccgccggccagctgctgtggtggaagggcgacgtggaccaggacggctacctgctgctgaagagcgtgtacgtgctgaccggcaccgacagcgagaccctgggcagagtggccgagagcggcctgcccgccctgctgctgcagtgcctgtacctgttcttcgtgttccccctggacaaggacgagctgctggagagcgacctgcaggtgcagaagatgttcgtgcagatgctgctgaacatctgcagcgacagccagggcctggagggcctgctgagcggcagcgagctgcagagcctgctgatcgccaccacctgcctgagagagcacagctgctgcttctggaaggagcccaccttctgcgtgctgagagccatcagcaaggcccagaacctgagcatcatccagtacctgcaggccaccgactgcgtgagactgagcctgcagaacctgagcagactgaccgacaccctgcccgcccccgaggtgagcgaggccgtgagcctgatcctgggcttcgtgaaggacagctaccccgtgagcagcgccctgttcctggagttcgagaacagcgagggctaccccctgctgctgaaggtgctgctgagatacgacggcctgacccagagcgaggtggacccccacctggaggagctgctgggcctggtggtgtggctgaccacctgcggcagaagcgagctgaaggtgttcgacagcatcacctacccccagctggagggcttcaagttccaccacgaggccagcggcgtgaccgtgaagaacctgcaggccttccaggtgctgcagaacgtgttccacaaggccagcgacagcgtgctgtgcatccaggtgctgagcgtgatcagaaccatgtgggcctggaacgccagaaacttcttcctgctggagtggaccctgcagcccatcagccagttcgtggagatcatgcccctgaagcccgcccccgtgcaggagcacttcttccagctgctggaggccctggtgttcgagctgcactacgtgccccacgagatcctgagaaaggtgcagcacctgatcaaggagagccccggccccagctgcaccctgatggccctgcagagcatcctgagcatcgccggcggcgaccccctgttcaccgacatcttcagagacagcggcctgctgggcctgctgctggcccagctgagaaagcaggccaagatcatgagaaagagcggcaacaaggtgagcacccccggcgtgcaggaccccgagagagagctgacctgcgtgatgctgagaatcgtggtgaccctgctgaagggcagcgtgagaaacgccgtggtgctgaaggaccacggcatggtgcccttcatcaagatcttcctggacgacgagtgctacagagaggccagcctgagcatcctggagcagctgagcgccatcaacgccgaggagtacatgagcatcatcgtgggcgccctgtgcagcagcacccagggcgagctgcagctgaagctggacctgctgaagagcctgctgagaatcctggtgacccccaagggcagagccgccttcagagtgagcagcggcttcaacggcctgctgagcctgctgagcgacctggagggcagcctgcaggagccccccctgcaggcctggggcgccgtgagccccagacagaccctggagctggtgctgtacaccctgtgcgccgtgagcgccgccctgcactgggaccccgtgaacggctacttcttcagaagaaacggcctgttcgagaagctggccgaggacctgtgcctgctgggctgcttcggcgccctggaggaggagggcaacctgctgagaagctgggtggacaccaaggccagacccttcgccgacctgctgggcaccgccttcagcagcagcggcagcctgccccccagaatccagagctgcctgcagatcctgggcttcctggacagcatggccagcggcaccctgcacctgagaggcgacctgaaggagagcctgagaaccaagcagggccccgtggtggacgtgcagaagggcgagaccggcagcgacccccagagaaacttcaagcagtggcccgacctggaggagagaatggacgagggcgacgccgccatcatgcaccccggcgtggtgtgcatcatggtgagactgctgcccagactgtaccacgaggaccacccccagctgagcgaggagatccagtgcagcctggccagccacatccagagcctggtgaagagcgagaagaacagacaggtgatgtgcgaggccggcctgctgggcaccctgatggccagctgccacagagccctggtgaccagcggcagccccctgcacagcagactgatcagaatcttcgagaagctggccagccaggccatcgagcccgacgtgctgagacagttcctgggcctgggcatccccagcagcctgagcgccaccaccaagatcctggacagcagccacacccacagaggcaaccccggctgcagcggcagccagaccgcccagggcctggccgagggcccctggcccgccgcccccgacgccggcctgcaccccggcgtgacccaggccccccagcccctgggcgagagccaggacagcaccaccgccctgcagaccgccctgagcctgatcagcatgaccagccccagaaacctgcagccccagagagccgccctggcccccagcttcgtggagttcgacatgagcgtggagggctacggctgcctgttcatccccaccctgagcaccgtgatgggcaccagcaccgagtacagcgtgagcggcggcatcggcaccggcgccaccagacccttccccccccccggcggcctgaccttcagctgctggttcctgatcagcagacacggcgccgccaccgagggccaccccctgagattcctgaccctggtgagacacctggccagaaccgagcagcccttcgtgtgcttcagcgtgagcctgtgccccgacgacctgagcctggtggtgagcaccgaggagaaggagttccagcccctggacgtgatggagcccgaggacgacagcgagcccagcgccggctgccagctgcaggtgagatgcggccagctgctggcctgcggccagtggcaccacctggccgtggtggtgaccaaggagatgaagagacactgcaccgtgagcacctgcctggacggccaggtgatcggcagcgccaagatgctgtacatccaggccctgcccggccccttcctgagcatggaccccagcgccttcgtggacgtgtacggctacatcgccacccccagagtgtggaagcagaagagcagcctgatctggagactgggccccacctacctgttcgaggaggccatcagcatggagaccctggaggtgatcaacaagctgggccccagatactgcggcaacttccaggccgtgcacgtgcagggcgaggacctggacagcgaggccacccccttcgtggccgaggagagagtgagcttcggcctgcacatcgccagcagcagcatcaccagcgtggccgacatcagaaacgcctacaacgaggtggacagcagactgatcgccaaggagatgaacatcagcagcagagacaacgccatgcccgtgttcctgctgagaaactgcgccggccacctgagcggcagcctgagaaccatcggcgccgtggccgtgggccagctgggcgtgagagtgttccacagcagccccgccgccagcagcctggacttcatcggcggccccgccatcctgctgggcctgatcagcctggccaccgacgaccacaccatgtacgccgccgtgaaggtgctgcacagcgtgctgaccagcaacgccatgtgcgacttcctgatgcagcacatctgcggctaccagatcatggccttcctgctgagaaagaaggccagcctgctgaaccacagaatcttccagctgatcctgagcgtggccggcaccgtggagctgggcttcagaagcagcgccatcaccaacaccggcgtgttccagcacatcctgtgcaacttcgagctgtggatgaacaccgccgacaacctggagctgagcctgttcagccacctgctggagatcctgcagagccccagagagggccccagaaacgccgaggccgcccaccaggcccagctgatccccaagctgatcttcctgttcaacgagcccagcctgatccccagcaagatcagcaccatcatcggcatcctggcctgccagctgagaggccacttcagcacccaggacctgctgagaatcggcctgttcgtggtgtacaccctgaagcccagcagcgtgaacgagagacagatctgcatggacggcgccctggaccccagcctgcccgccggcagccagaccagcggcaagaccatctggctgagaaaccagctgctggagatgctgctgagcgtgatcagcagcccccagctgcacctgagcagcgagagcaaggaggagatgttcctgaagctgggccccgactggttcctgctgctgctgcagggccacctgcacgccagcaccaccgtgctggccctgaagctgctgctgtacttcctggccagccccagcctgagaaccagattcagagacggcctgtgcgccggcagctgggtggagagaagcaccgagggcgtggacatcgtgatggacaacctgaagagccagagccccctgcccgagcagagcccctgcctgctgcccggcttcagagtgctgaacgacttcctggcccaccacgtgcacatccccgaggtgtacctgatcgtgagcaccttcttcctgcagacccccctgaccgagctgatggacggccccaaggacagcctggacgccatgctgcagtggctgctgcagagacaccaccaggaggaggtgctgcaggccggcctgtgcaccgagggcgccctgctgctgctggagatgctgaaggccaccatgagccagcccctggccggcagcgaggacggcgcctgggcccagaccttccccgccagcgtgctgcagttcctgagcctggtgcacagaacctacccccaggaccccgcctggagagcccccgagttcctgcagaccctggccatcgccgccttccccctgggcgcccagaagggcgtgggcgccgagagcaccagaaacaccagcagccccgaggccgccgccgagggcgacagcaccgtggagggcctgcaggcccccaccaaggcccaccccgccagaagaaagctgagagagttcacccagctgctgctgagagagctgctgctgggcgccagcagccccaagcagtggctgcccctggaggtgctgctggaggccagccccgaccacgccaccagccagcagaagagagacttccagagcgaggtgctgctgagcgccatggagctgttccacatgaccagcggcggcgacgccgccatgttcagagacggcaaggagccccagcccagcgccgaggccgccgccgcccccagcctggccaacatcagctgcttcacccagaagctggtggagaagctgtacagcggcatgttcagcgccgaccccagacacatcctgctgttcatcctggagcacatcatggtggtgatcgagaccgccagcagccagagagacaccgtgctgagcaccctgtacagcagcctgaacaaggtgatcctgtactgcctgagcaagccccagcagagcctgagcgagtgcctgggcctgctgagcatcctgggcttcctgcaggagcactgggacgtggtgttcgccacctacaacagcaacatcagcttcctgctgtgcctgatgcactgcctgctgctgctgaacgagagaagctaccccgagggcttcggcctggagcccaagcccagaatgagcacctaccaccaggtgttcctgagccccaacgaggacgtgaaggagaagagagaggacctgcccagcctgagcgacgtgcagcacaacatccagaagaccgtgcagaccctgtggcagcagctggtggcccagagacagcagaccctggaggacgccttcaagatcgacctgagcgtgaagcccggcgagagagaggtgaagatcgaggaggtgacccccctgtgggaggagaccatgctgaaggcctggcagcactacctggccagcgagaagaagagcctggccagcagaagcaacgtggcccaccacagcaaggtgaccctgtggagcggcagcctgagcagcgccatgaagctgatgcccggcagacaggccaaggaccccgagtgcaagaccgaggacttcgtgagctgcatcgagaactacagaagaagaggccaggagctgtacgccagcctgtacaaggaccacgtgcagagaagaaagtgcggcaacatcaaggccgccaacgcctgggccagaatccaggagcagctgttcggcgagctgggcctgtggagccagggcgaggagaccaagccctgcagcccctgggagctggactggagagagggccccgccagaatgagaaagagaatcaagagactgagccccctggaggccctgagcagcggcagacacaaggagagccaggacaagaacgaccacatcagccagaccaacgccgagaaccaggacgagctgaccctgagagaggccgagggcgagcccgacgaggtgggcgtggactgcacccagctgaccttcttccccgccctgcacgagagcctgcacagcgaggacttcctggagctgtgcagagagagacaggtgatcctgcaggagctgctggacaaggagaaggtgacccagaagttcagcctggtgatcgtgcagggccacctggtgagcgagggcgtgctgctgttcggccaccagcacttctacatctgcgagaacttcaccctgagccccaccggcgacgtgtactgcaccagacactgcctgagcaacatcagcgaccccttcatcttcaacctgtgcagcaaggacagaagcaccgaccactacagctgccagtgccacagctacgccgacatgagagagctgagacaggccagattcctgctgcaggacatcgccctggagatcttcttccacaacggctacagcaagttcctggtgttctacaacaacgacagaagcaaggccttcaagagcttctgcagcttccagcccagcctgaagggcaaggccaccagcgaggacaccctgagcctgagaagataccccggcagcgacagaatcatgctgcagaagtggcagaagagagacatcagcaacttcgagtacctgatgtacctgaacaccgccgccggcagaacctgcaacgactacatgcagtaccccgtgttcccctgggtgctggccgactacaccagcgagaccctgaacctggccaaccccaagatcttcagagacctgagcaagcccatgggcgcccagaccaaggagagaaagctgaagttcatccagagattcaaggaggtggagaagaccgagggcgacatgaccgtgcagtgccactactacacccactacagcagcgccatcatcgtggccagctacctggtgagaatgccccccttcacccaggccttctgcgccctgcagggcggcagcttcgacgtggccgacagaatgttccacagcgtgaagagcacctgggagagcgccagcagagagaacatgagcgacgtgagagagctgacccccgagttcttctacctgcccgagttcctgaccaactgcaacggcgtggagttcggctgcatgcaggacggcaccgtgctgggcgacgtgcagctgcccccctgggccgacggcgaccccagaaagttcatcagcctgcacagaaaggccctggagagcgacttcgtgagcgccaacctgcaccactggatcgacctgatcttcggctacaagcagcagggccccgccgccgtggacgccgtgaacatcttccacccctacttctacggcgacagaatggacctgagcagcatcaccgaccccctgatcaagagcaccatcctgggcttcgtgagcaacttcggccaggtgcccaagcagctgttcaccaagccccaccccgccagaaccgccgccggcaagcccctgcccggcaaggacgtgagcacccccgtgagcctgcccggccacccccagcccttcttctacagcctgcagagcctgagacccagccaggtgaccgtgaaggacatgtacctgttcagcctgggcagcgagagccccaagggcgccatcggccacatcgtgagcaccgagaagaccatcctggccgtggagagaaacaaggtgctgctgccccccctgtggaacagaaccttcagctggggcttcgacgacttcagctgctgcctgggcagctacggcagcgacaaggtgctgatgaccttcgagaacctggccgcctggggcagatgcctgtgcgccgtgtgccccagccccaccaccatcgtgaccagcggcaccagcaccgtggtgtgcgtgtgggagctgagcatgaccaagggcagacccagaggcctgagactgagacaggccctgtacggccacacccaggccgtgacctgcctggccgccagcgtgaccttcagcctgctggtgagcggcagccaggactgcacctgcatcctgtgggacctggaccacctgacccacgtgaccagactgcccgcccacagagagggcatcagcgccatcaccatcagcgacgtgagcggcaccatcgtgagctgcgccggcgcccacctgagcctgtggaacgtgaacggccagcccctggccagcatcaccaccgcctggggccccgagggcgccatcacctgctgctgcctgatggagggccccgcctgggacaccagccagatcatcatcaccggcagccaggacggcatggtgagagtgtggaagaccgaggacgtgaagatgagcgtgcccggcagacccgccggcgaggagccccccgcccagccccccagccccagaggccacaagtgggagaagaacctggccctgagcagagagctggacgtgagcatcgccctgaccggcaagcccagcaagaccagccccgccgtgaccgccctggccgtgagcagaaaccacaccaagctgctggtgggcgacgagagaggcagaatcttctgctggagcgccgacggctag

SEQ ID NO: 206663 - DNA, 1965 bp, Artificial Sequence
  derived and/or modified sequence
atggaggccgaggacctgagcaaggccgaggacagaaacgaggaccccggcagcaagaacgagggccagctggccgccgtgcagcccgacgtgccccacggcggccagagcagcagccccaccgccctgtgggacatgctggagagaaagttcctggagtaccagcagctgacccacaagagccccatcgagagacagaagagcctgctgagcctgctgcccctgttcctgaaggcctgggagcacagcgtgggcatcatctgcttccccagcctgcagagactggccgaggacgtgagcgaccagctggcccagcagctgcagaaggccctggtgggcaagcccgccgagcaggccagactggccgccggccagctgctgtggtggaagggcgacgtggaccaggacggctacctgctgctgaagagcgtgtacgtgctgaccggcaccgacagcgagaccctgggcagagtggccgagagcggcctgcccgccctgctgctgcagtgcctgtacctgttcttcgtgttccccctggacaaggacgagctgctggagagcgacctgcaggtgcagaagatgttcgtgcagatgctgctgaacatctgcagcgacagccagggcctggagggcctgctgagcggcagcgagctgcagagcctgctgatcgccaccacctgcctgagagagcacagctgctgcttctggaaggagcccaccttctgcgtgctgagagccatcagcaaggcccagaacctgagcatcatccagtacctgcaggccaccgactgcgtgagactgagcctgcagaacctgagcagactgaccgacaccctgcccgcccccgaggtgagcgaggccgtgagcctgatcctgggcttcgtgaaggacagctaccccgtgagcagcgccctgttcctggagttcgagaacagcgagggctaccccctgctgctgaaggtgctgctgagatacgacggcctgacccagagcgaggtggacccccacctggaggagctgctgggcctggtggtgtggctgaccacctgcggcagaagcgagctgaaggtgttcgacagcatcacctacccccagctggagggcttcaagttccaccacgaggccagcggcgtgaccgtgaagaacctgcaggccttccaggtgctgcagaacgtgttccacaaggccagcgacagcgtgctgtgcatccaggtgctgagcgtgatcagaaccatgtgggcctggaacgccagaaacttcttcctgctggagtggaccctgcagcccatcagccagttcgtggagatcatgcccctgaagcccgcccccgtgcaggagcacttcttccagctgctggaggccctggtgttcgagctgcactacgtgccccacgagatcctgagaaaggtgcagcacctgatcaaggagagccccggccccagctgcaccctgatggccctgcagagcatcctgagcatcgccggcggcgaccccctgttcaccgacatcttcagagacagcggcctgctgggcctgctgctggcccagctgagaaagcaggccaagatcatgagaaagagcggcaacaaggtgagcacccccggcgtgcaggaccccgagagagagctgacctgcgtgatgctgagaatcgtggtgaccctgctgaagggcagcgtgagaaacgccgtggtgctgaaggaccacggcatggtgcccttcatcaagatcttcctggacgacgagtgctacagagaggccagcctgagcatcctggagcagctgagcgccatcaacgccgaggagtacatgagcatcatcgtgggcgccctgtgcagcagcacccagggcgagctgcagctgaagctggacctgctgaaggtgatcagcagcccccccctgagactggccagcctgtggatctgcaccaagagaagcaccttcgcccaggccttcgtgttcatgtag

SEQ ID NO: 206664 - DNA, 3129 bp, Artificial Sequence
  derived and/or modified sequence
atggaggccgaggacctgagcaaggccgaggacagaaacgaggaccccggcagcaagaacgagggccagctggccgccgtgcagcccgacgtgccccacggcggccagagcagcagccccaccgccctgtgggacatgctggagagaaagttcctggagtaccagcagctgacccacaagagccccatcgagagacagaagagcctgctgagcctgctgcccctgttcctgaaggcctgggagcacagcgtgggcatcatctgcttccccagcctgcagagactggccgaggacgtgagcgaccagctggcccagcagctgcagaaggccctggtgggcaagcccgccgagcaggccagactggccgccggccagctgctgtggtggaagggcgacgtggaccaggacggctacctgctgctgaagagcgtgtacgtgctgaccggcaccgacagcgagaccctgggcagagtggccgagagcggcctgcccgccctgctgctgcagtgcctgtacctgttcttcgtgttccccctggacaaggacgagctgctggagagcgacctgcaggtgcagaagatgttcgtgcagatgctgctgaacatctgcagcgacagccagggcctggagggcctgctgagcggcagcgagctgcagagcctgctgatcgccaccacctgcctgagagagcacagctgctgcttctggaaggagcccaccttctgcgtgctgagagccatcagcaaggcccagaacctgagcatcatccagtacctgcaggccaccgactgcgtgagactgagcctgcagaacctgagcagactgaccgacaccctgcccgcccccgaggtgagcgaggccgtgagcctgatcctgggcttcgtgaaggacagctaccccgtgagcagcgccctgttcctggagttcgagaacagcgagggctaccccctgctgctgaaggtgctgctgagatacgacggcctgacccagagcgaggtggacccccacctggaggagctgctgggcctggtggtgtggctgaccacctgcggcagaagcgagctgaaggtgttcgacagcatcacctacccccagctggagggcttcaagttccaccacgaggccagcggcgtgaccgtgaagaacctgcaggccttccaggtgctgcagaacgtgttccacaaggccagcgacagcgtgctgtgcatccaggtgctgagcgtgatcagaaccatgtgggcctggaacgccagaaacttcttcctgctggagtggaccctgcagcccatcagccagttcgtggagatcatgcccctgaagcccgcccccgtgcaggagcacttcttccagctgctggaggccctggtgttcgagctgcactacgtgccccacgagatcctgagaaaggtgcagcacctgatcaaggagagccccggccccagctgcaccctgatggccctgcagagcatcctgagcatcgccggcggcgaccccctgttcaccgacatcttcagagacagcggcctgctgggcctgctgctggcccagctgagaaagcaggccaagatcatgagaaagagcggcaacaaggtgagcacccccggcgtgcaggaccccgagagagagctgacctgcgtgatgctgagaatcgtggtgaccctgctgaagggcagcgtgagaaacgccgtggtgctgaaggaccacggcatggtgcccttcatcaagatcttcctggacgacgagtgctacagagaggccagcctgagcatcctggagcagctgagcgccatcaacgccgaggagtacatgagcatcatcgtgggcgccctgtgcagcagcacccagggcgagctgcagctgaagctggacctgctgaagagcctgctgagaatcctggtgacccccaagggcagagccgccttcagagtgagcagcggcttcaacggcctgctgagcctgctgagcgacctggagggcagcctgcaggagccccccctgcaggcctggggcgccgtgagccccagacagaccctggagctggtgctgtacaccctgtgcgccgtgagcgccgccctgcactgggaccccgtgaacggctacttcttcagaagaaacggcctgttcgagaagctggccgaggacctgtgcctgctgggctgcttcggcgccctggaggaggagggcaacctgctgagaagctgggtggacaccaaggccagacccttcgccgacctgctgggcaccgccttcagcagcagcggcagcctgccccccagaatccagagctgcctgcagatcctgggcttcctggacagcatggccagcggcaccctgcacctgagaggcgacctgaaggagagcctgagaaccaagcagggccccgtggtggacgtgcagaagggcgagaccggcagcgacccccagagaaacttcaagcagtggcccgacctggaggagagaatggacgagggcgacgccgccatcatgcaccccggcgtggtgtgcatcatggtgagactgctgcccagactgtaccacgaggaccacccccagctgagcgaggagatccagtgcagcctggccagccacatccagagcctggtgaagagcgagaagaacagacaggtgatgtgcgaggccggcctgctgggcaccctgatggccagctgccacagagccctggtgaccagcggcagccccctgcacagcagactgatcagaatcttcgagaagctggccagccaggccatcgagcccgacgtgctgagacagttcctgggcctgggcatccccagcagcctgagcgccaccaccaagatcctggacagcagccacacccacagaggcaaccccggctgcagcggcagccagaccgcccagggcctggccgagggcccctggcccgccgcccccgacgccggcctgcaccccggcgtgacccaggccccccagcccctgggcgagagccaggacagcaccaccgccctgcagaccgccctgagcctgatcagcatgaccagcccccacatctggaagcccaacatctggaaggacaacctggcccagaagcccgtggccggcgacgccgcccagtgcaacatcttcccccccgccagcagcgtgctgtag

SEQ ID NO: 206665 - DNA, 9531 bp, Artificial Sequence
  derived and/or modified sequence
atggaggccgaggacctgagcaaggccgaggacagaaacgaggaccccggcagcaagaacgagggccagctggccgccgtgcagcccgacgtgccccacggcggccagagcagcagccccaccgccctgtgggacatgctggagagaaagttcctggagtaccagcagctgacccacaagagccccatcgagagacagaagagcctgctgagcctgctgcccctgttcctgaaggcctgggagcacagcgtgggcatcatctgcttccccagcctgcagagactggccgaggacgtgagcgaccagctggcccagcagctgcagaaggccctggtgggcaagcccgccgagcaggccagactggccgccggccagctgctgtggtggaagggcgacgtggaccaggacggctacctgctgctgaagagcgtgtacgtgctgaccggcaccgacagcgagaccctgggcagagtggccgagagcggcctgcccgccctgctgctgcagtgcctgtacctgttcttcgtgttccccctggacaaggacgagctgctggagagcgacctgcaggtgcagaagatgttcgtgcagatgctgctgaacatctgcagcgacagccagggcctggagggcctgctgagcggcagcgagctgcagagcctgctgatcgccaccacctgcctgagagagcacagctgctgcttctggaaggagcccaccttctgcgtgctgagagccatcagcaaggcccagaacctgagcatcatccagtacctgcaggccaccgactgcgtgagactgagcctgcagaacctgagcagactgaccgacaccctgcccgcccccgaggtgagcgaggccgtgagcctgatcctgggcttcgtgaaggacagctaccccgtgagcagcgccctgttcctggagttcgagaacagcgagggctaccccctgctgctgaaggtgctgctgagatacgacggcctgacccagagcgaggtggacccccacctggaggagctgctgggcctggtggtgtggctgaccacctgcggcagaagcgagctgaaggtgttcgacagcatcacctacccccagctggagggcttcaagttccaccacgaggccagcggcgtgaccgtgaagaacctgcaggccttccaggtgctgcagaacgtgttccacaaggccagcgacagcgtgctgtgcatccaggtgctgagcgtgatcagaaccatgtgggcctggaacgccagaaacttcttcctgctggagtggaccctgcagcccatcagccagttcgtggagatcatgcccctgaagcccgcccccgtgcaggagcacttcttccagctgctggaggccctggtgttcgagctgcactacgtgccccacgagatcctgagaaaggtgcagcacctgatcaaggagagccccggccccagctgcaccctgatggccctgcagagcatcctgagcatcgccggcggcgaccccctgttcaccgacatcttcagagacagcggcctgctgggcctgctgctggcccagctgagaaagcaggccaagatcatgagaaagagcggcaacaaggtgagcacccccggcgtgcaggaccccgagagagagctgacctgcgtgatgctgagaatcgtggtgaccctgctgaagggcagcgtgagaaacgccgtggtgctgaaggaccacggcatggtgcccttcatcaagatcttcctggacgacgagtgctacagagaggccagcctgagcatcctggagcagctgagcgccatcaacgccgaggagtacatgagcatcatcgtgggcgccctgtgcagcagcacccagggcgagctgcagctgaagctggacctgctgaagagcctgctgagaatcctggtgacccccaagggcagagccgccttcagagtgagcagcggcttcaacggcctgctgagcctgctgagcgacctggagggcagcctgcaggagccccccctgcaggcctggggcgccgtgagccccagacagaccctggagctggtgctgtacaccctgtgcgccgtgagcgccgccctgcactgggaccccgtgaacggctacttcttcagaagaaacggcctgttcgagaagctggccgaggacctgtgcctgctgggctgcttcggcgccctggaggaggagggcaacctgctgagaagctgggtggacaccaaggccagacccttcgccgacctgctgggcaccgccttcagcagcagcggcagcctgccccccagaatccagagctgcctgcagatcctgggcttcctggacagcatggccagcggcaccctgcacctgagaggcgacctgaaggagagcctgagaaccaagcagggccccgtggtggacgtgcagaagggcgagaccggcagcgacccccagagaaacttcaagcagtggcccgacctggaggagagaatggacgagggcgacgccgccatcatgcaccccggcgtggtgtgcatcatggtgagactgctgcccagactgtaccacgaggaccacccccagctgagcgaggagatccagtgcagcctggccagccacatccagagcctggtgaagagcgagaagaacagacaggtgatgtgcgaggccggcctgctgggcaccctgatggccagctgccacagagccctggtgaccagcggcagccccctgcacagcagactgatcagaatcttcgagaagctggccagccaggccatcgagcccgacgtgctgagacagttcctgggcctgggcatccccagcagcctgagcgccaccaccaagatcctggacagcagccacacccacagaggcaaccccggctgcagcggcagccagaccgcccagggcctggccgagggcccctggcccgccgcccccgacgccggcctgcaccccggcgtgacccaggccccccagcccctgggcgagagccaggacagcaccaccgccctgcagaccgccctgagcctgatcagcatgaccagccccagaaacctgcagccccagagagccgccctggcccccagcttcgtggagttcgacatgagcgtggagggctacggctgcctgttcatccccaccctgagcaccgtgatgggcaccagcaccgagtacagcgtgagcggcggcatcggcaccggcgccaccagacccttccccccccccggcggcctgaccttcagctgctggttcctgatcagcagacacggcgccgccaccgagggccaccccctgagattcctgaccctggtgagacacctggccagaaccgagcagcccttcgtgtgcttcagcgtgagcctgtgccccgacgacctgagcctggtggtgagcaccgaggagaaggagttccagcccctggacgtgatggagcccgaggacgacagcgagcccagcgccggctgccagctgcaggtgagatgcggccagctgctggcctgcggccagtggcaccacctggccgtggtggtgaccaaggagatgaagagacactgcaccgtgagcacctgcctggacggccaggtgatcggcagcgccaagatgctgtacatccaggccctgcccggccccttcctgagcatggaccccagcgccttcgtggacgtgtacggctacatcgccacccccagagtgtggaagcagaagagcagcctgatctggagactgggccccacctacctgttcgaggaggccatcagcatggagaccctggaggtgatcaacaagctgggccccagatactgcggcaacttccaggccgtgcacgtgcagggcgaggacctggacagcgaggccacccccttcgtggccgaggagagagtgagcttcggcctgcacatcgccagcagcagcatcaccagcgtggccgacatcagaaacgcctacaacgaggtggacagcagactgatcgccaaggagatgaacatcagcagcagagacaacgccatgcccgtgttcctgctgagaaactgcgccggccacctgagcggcagcctgagaaccatcggcgccgtggccgtgggccagctgggcgtgagagtgttccacagcagccccgccgccagcagcctggacttcatcggcggccccgccatcctgctgggcctgatcagcctggccaccgacgaccacaccatgtacgccgccgtgaaggtgctgcacagcgtgctgaccagcaacgccatgtgcgacttcctgatgcagcacatctgcggctaccagatcatggccttcctgctgagaaagaaggccagcctgctgaaccacagaatcttccagctgatcctgagcgtggccggcaccgtggagctgggcttcagaagcagcgccatcaccaacaccggcgtgttccagcacatcctgtgcaacttcgagctgtggatgaacaccgccgacaacctggagctgagcctgttcagccacctgctggagatcctgcagagccccagagagggccccagaaacgccgaggccgcccaccaggcccagctgatccccaagctgatcttcctgttcaacgagcccagcctgatccccagcaagatcagcaccatcatcggcatcctggcctgccagctgagaggccacttcagcacccaggacctgctgagaatcggcctgttcgtggtgtacaccctgaagcccagcagcgtgaacgagagacagatctgcatggacggcgccctggaccccagcctgcccgccggcagccagaccagcggcaagaccatctggctgagaaaccagctgctggagatgctgctgagcgtgatcagcagcccccagctgcacctgagcagcgagagcaaggaggagatgttcctgaagctgggccccgactggttcctgctgctgctgcagggccacctgcacgccagcaccaccgtgctggccctgaagctgctgctgtacttcctggccagccccagcctgagaaccagattcagagacggcctgtgcgccggcagctgggtggagagaagcaccgagggcgtggacatcgtgatggacaacctgaagagccagagccccctgcccgagcagagcccctgcctgctgcccggcttcagagtgctgaacgacttcctggcccaccacgtgcacatccccgaggtgtacctgatcgtgagcaccttcttcctgcagacccccctgaccgagctgatggacggccccaaggacagcctggacgccatgctgcagtggctgctgcagagacaccaccaggaggaggtgctgcaggccggcctgtgcaccgagggcgccctgctgctgctggagatgctgaaggccaccatgagccagcccctggccggcagcgaggacggcgcctgggcccagaccttccccgccagcgtgctgcagttcctgagcctggtgcacagaacctacccccaggaccccgcctggagagcccccgagttcctgcagaccctggccatcgccgccttccccctgggcgcccagaagggcgtgggcgccgagagcaccagaaacaccagcagccccgaggccgccgccgagggcgacagcaccgtggagggcctgcaggcccccaccaaggcccaccccgccagaagaaagctgagagagttcacccagctgctgctgagagagctgctgctgggcgccagcagccccaagcagtggctgcccctggaggtgctgctggaggccagccccgaccacgccaccagccagcagaagagagacttccagagcgaggtgctgctgagcgccatggagctgttccacatgaccagcggcggcgacgccgccatgttcagagacggcaaggagccccagcccagcgccgaggccgccgccgcccccagcctggccaacatcagctgcttcacccagaagctggtggagaagctgtacagcggcatgttcagcgccgaccccagacacatcctgctgttcatcctggagcacatcatggtggtgatcgagaccgccagcagccagagagacaccgtgctgagcaccctgtacagcagcctgaacaaggtgatcctgtactgcctgagcaagccccagcagagcctgagcgagtgcctgggcctgctgagcatcctgggcttcctgcaggagcactgggacgtggtgttcgccacctacaacagcaacatcagcttcctgctgtgcctgatgcactgcctgctgctgctgaacgagagaagctaccccgagggcttcggcctggagcccaagcccagaatgagcacctaccaccaggtgttcctgagccccaacgaggacgtgaaggagaagagagaggacctgcccagcctgagcgacgtgcagcacaacatccagaagaccgtgcagaccctgtggcagcagctggtggcccagagacagcagaccctggaggacgccttcaagatcgacctgagcgtgaagcccggcgagagagaggtgaagatcgaggaggtgacccccctgtgggaggagaccatgctgaaggcctggcagcactacctggccagcgagaagaagagcctggccagcagaagcaacgtggcccaccacagcaaggtgaccctgtggagcggcagcctgagcagcgccatgaagctgatgcccggcagacaggccaaggaccccgagtgcaagaccgaggacttcgtgagctgcatcgagaactacagaagaagaggccaggagctgtacgccagcctgtacaaggaccacgtgcagagaagaaagtgcggcaacatcaaggccgccaacgcctgggccagaatccaggagcagctgttcggcgagctgggcctgtggagccagggcgaggagaccaagccctgcagcccctgggagctggactggagagagggccccgccagaatgagaaagagaatcaagagactgagccccctggaggccctgagcagcggcagacacaaggagagccaggacaagaacgaccacatcagccagaccaacgccgagaaccaggacgagctgaccctgagagaggccgagggcgagcccgacgaggtgggcgtggactgcacccagctgaccttcttccccgccctgcacgagagcctgcacagcgaggacttcctggagctgtgcagagagagacaggtgatcctgcaggagctgctggacaaggagaaggtgacccagaagttcagcctggtgatcgtgcagggccacctggtgagcgagggcgtgctgctgttcggccaccagcacttctacatctgcgagaacttcaccctgagccccaccggcgacgtgtactgcaccagacactgcctgagcaacatcagcgaccccttcatcttcaacctgtgcagcaaggacagaagcaccgaccactacagctgccagtgccacagctacgccgacatgagagagctgagacaggccagattcctgctgcaggacatcgccctggagatcttcttccacaacggctacagcaagttcctggtgttctacaacaacgacagaagcaaggccttcaagagcttctgcagcttccagcccagcctgaagggcaaggccaccagcgaggacaccctgagcctgagaagataccccggcagcgacagaatcatgctgcagaagtggcagaagagagacatcagcaacttcgagtacctgatgtacctgaacaccgccgccggcagaacctgcaacgactacatgcagtaccccgtgttcccctgggtgctggccgactacaccagcgagaccctgaacctggccaaccccaagatcttcagagacctgagcaagcccatgggcgcccagaccaaggagagaaagctgaagttcatccagagattcaaggaggtggagaagaccgagggcgacatgaccgtgcagtgccactactacacccactacagcagcgccatcatcgtggccagctacctggtgagaatgccccccttcacccaggccttctgcgccctgcagggcggcagcttcgacgtggccgacagaatgttccacagcgtgaagagcacctgggagagcgccagcagagagaacatgagcgacgtgagagagctgacccccgagttcttctacctgcccgagttcctgaccaactgcaacggcgtggagttcggctgcatgcaggacggcaccgtgctgggcgacgtgcagctgcccccctgggccgacggcgaccccagaaagttcatcagcctgcacagaaaggccctggagagcgacttcgtgagcgccaacctgcaccactggatcgacctgatcttcggctacaagcagcagggccccgccgccgtggacgccgtgaacatcttccacccctacttctacggcgacagaatggacctgagcagcatcaccgaccccctgatcaagagcaccatcctgggcttcgtgagcaacttcggccaggtgcccaagcagctgttcaccaagccccaccccgccagaaccgccgccggcaagcccctgcccggcaaggacgtgagcacccccgtgagcctgcccggccacccccagcccttcttctacagcctgcagagcctgagacccagccaggtgaccgtgaaggacatgtacctgttcagcctgggcagcgagagccccaagggcgccatcggccacatcgtgagcaccgagaagaccatcctggccgtggagagaaacaaggtgctgctgccccccctgtggaacagaaccttcagctggggcttcgacgacttcagctgctgcctgggcagctacggcagcgacaaggtgctgatgaccttcgagaacctggccgcctggggcagatgcctgtgcgccgtgtgccccagccccaccaccatcgtgaccagcggcaccagcaccgtggtgtgcgtgtgggagctgagcatgaccaagggcagacccagaggcctgagactgagacaggccctgtacggccacacccaggccgtgacctgcctggccgccagcgtgaccttcagcctgctggtgagcggcagccaggactgcacctgcatcctgtgggacctggaccacctgacccacgtgaccagactgcccgcccacagagagggcatcagcgccatcaccatcagcgacgtgagcggcaccatcgtgagctgcgccggcgcccacctgagcctgtggaacgtgaacggccagcccctggccagcatcaccaccgcctggggccccgagggcgccatcacctgctgctgcctgatggagggccccgcctgggacaccagccagatcatcatcaccggcagccaggacggcatggtgagagtgtggaagaccgaggacgtgaagatgagcgtgcccggcctgcagatgggcagaaagagagaggccgccgaggccctggcccagcagtgccaggccgagggcggcagaggcgactggggcctgagcagcgcctacagaagaaacccccagggcctgctgccccacagcagccagggcagagccagcggcaaccacagcagcgccgcccagcccagcccctggcccatgggcctgctgtag

SEQ ID NO: 206666 - DNA, 1875 bp, Artificial Sequence
  derived and/or modified sequence
atgctgcagaagtggcagaagagagacatcagcaacttcgagtacctgatgtacctgaacaccgccgccggcagaacctgcaacgactacatgcagtaccccgtgttcccctgggtgctggccgactacaccagcgagaccctgaacctggccaaccccaagatcttcagagacctgagcaagcccatgggcgcccagaccaaggagagaaagctgaagttcatccagagattcaaggaggtggagaagaccgagggcgacatgaccgtgcagtgccactactacacccactacagcagcgccatcatcgtggccagctacctggtgagaatgccccccttcacccaggccttctgcgccctgcagggcggcagcttcgacgtggccgacagaatgttccacagcgtgaagagcacctgggagagcgccagcagagagaacatgagcgacgtgagagagctgacccccgagttcttctacctgcccgagttcctgaccaactgcaacggcgtggagttcggctgcatgcaggacggcaccgtgctgggcgacgtgcagctgcccccctgggccgacggcgaccccagaaagttcatcagcctgcacagaaaggccctggagagcgacttcgtgagcgccaacctgcaccactggatcgacctgatcttcggctacaagcagcagggccccgccgccgtggacgccgtgaacatcttccacccctacttctacggcgacagaatggacctgagcagcatcaccgaccccctgatcaagagcaccatcctgggcttcgtgagcaacttcggccaggtgcccaagcagctgttcaccaagccccaccccgccagaaccgccgccggcaagcccctgcccggcaaggacgtgagcacccccgtgagcctgcccggccacccccagcccttcttctacagcctgcagagcctgagacccagccaggtgaccgtgaaggacatgtacctgttcagcctgggcagcgagagccccaagggcgccatcggccacatcgtgagcaccgagaagaccatcctggccgtggagagaaacaaggtgctgctgccccccctgtggaacagaaccttcagctggggcttcgacgacttcagctgctgcctgggcagctacggcagcgacaaggtgctgatgaccttcgagaacctggccgcctggggcagatgcctgtgcgccgtgtgccccagccccaccaccatcgtgaccagcggcaccagcaccgtggtgtgcgtgtgggagctgagcatgaccaagggcagacccagaggcctgagactgagacaggccctgtacggccacacccaggccgtgacctgcctggccgccagcgtgaccttcagcctgctggtgagcggcagccaggactgcacctgcatcctgtgggacctggaccacctgacccacgtgaccagactgcccgcccacagagagggcatcagcgccatcaccatcagcgacgtgagcggcaccatcgtgagctgcgccggcgcccacctgagcctgtggaacgtgaacggccagcccctggccagcatcaccaccgcctggggccccgagggcgccatcacctgctgctgcctgatggagggccccgcctgggacaccagccagatcatcatcaccggcagccaggacggcatggtgagagtgtggaagaccgaggacgtgaagatgagcgtgcccggcagacccgccggcgaggagccccccgcccagccccccaccctgagcatggccgacggcaccagcatgaagagaatgagcacccacaccagaagagccgagcagcacgccggcaactgcgacctggtgatgcccagctgcaccagaaactacacctag

SEQ ID NO: 206667 - DNA, 3816 bp, Artificial Sequence
  derived and/or modified sequence
tgaagggacttccagtcagaagttctgctttcagctatggagcttttccacatgacttcagggggggatgcggccatgtttcgggacggtaaagagccccaacctagcgcagaggctgcggcagctccatctctcgcaaacattagctgttttacccagaagctagttgagaaactgtactccggaatgtttagtgccgatccaaggcacattctgttgtttattctggaacatattatggtggtgatcgagacggccagttcacagcgcgacacagtgctcagcactctctactcgagcctgaacaaggtgatcctgtactgcttgagcaaaccccagcagtctctgtccgagtgtcttggcttactgagcattctgggcttcttgcaggaacactgggacgtggtgtttgccacctataactcaaatatatctttcctcctgtgcttgatgcactgtctgttacttttgaacgagcgttcgtaccccgagggcttcggattggaaccgaaaccgcgcatgtcgacctaccaccaagtcttccttagtcccaacgaggacgtgaaggaaaagcgggaagacttaccatcgctcagtgacgttcagcacaacattcagaagacagttcagactctttggcagcagctcgtagcccaacgccagcagacgctcgaggatgcattcaaaatagacctgtcagtgaagcccggtgaaagggaggttaaaatcgaagaggtcacgcctctgtgggaagaaacaatgcttaaggcctggcagcattatctggcatcggagaagaaatctctggctagtcgatctaacgtggcccatcactctaaggtaaccttatggtccggttcactgagttctgccatgaagctgatgccaggccggcaggccaaggatccagagtgtaaaacggaagatttcgtgtcctgcattgagaactaccgccgtcggggccaagagctctatgccagcctgtataaagaccacgtgcaacgtcgtaagtgcggcaacataaaggctgccaatgcatgggcaaggattcaggaacagctgttcggggagcttggcctgtggtctcagggagaggagacgaagccttgctcgccatgggaactggactggcgagaaggtcctgctcggatgagaaagcgaattaagcggctttccccccttgaggcactttcttccggccgccacaaggaatctcaggataagaacgaccacatatcccagacaaacgctgagaatcaggacgaactgacattacgggaggcggagggggagcccgacgaagtgggagtggactgcacccagctaacattctttccagcactgcacgaaagcctacatagcgaggatttcctggagctgtgcagagaaaggcaggtgatcctgcaagaactgctcgacaaggagaaggtcacccagaagttctcactggtgatcgtccaagggcacctggtgtcagagggagtcctcctcttcggacaccagcacttttacatttgtgaaaatttcactctgagcccaaccggcgacgtgtactgtaccagacactgtctctctaatatctctgatcccttcatctttaacctatgttcgaaagaccgatcaaccgaccactactcctgtcaatgccactcatatgctgatatgcgagaactgagacaggcaagatttctcctccaggacattgctctggaaatattcttccacaacggttactctaagttcctcgttttctacaacaacgatcgctcaaaggcatttaagagtttctgtagttttcagcccagtcttaagggaaaggcaaccagtgaagacactttaagcttaagaaggtaccctgggagcgatcggatcatgctacaaaagtggcagaagagggacatcagcaatttcgagtacctgatgtacctcaacactgccgctggtaggacttgcaatgattacatgcaatatcccgtgttcccttgggtgctggcggactatacttccgagacgcttaatttggctaaccccaagatcttccgagatctgagcaagccaatgggcgcacagaccaaggagaggaagcttaagtttatccagcgcttcaaggaggtggagaagacggagggagatatgactgttcagtgtcactactatacccattatagtagtgccatcatcgtggcctcctacctcgtacgcatgcccccatttacacaggccttctgtgcactccagggcggctccttcgatgtggccgacagaatgtttcatagtgtcaagtccacttgggaatcagcatctagggaaaatatgtctgatgtacgcgagctaacccccgagttcttttacctgccagagtttctgaccaattgcaacggtgtagagtttggatgtatgcaggacggcactgtattaggcgacgtgcagctgccgccctgggctgatggggaccctcgaaaattcatttccttgcacaggaaagcgcttgaatctgactttgtatccgctaatctgcatcattggatcgatctgatcttcgggtataagcaacagggtcccgccgccgtagatgccgtcaacatcttccatccatatttttacggagaccggatggatctttcctctatcacagatccgttgattaagtctaccatattgggctttgtcagcaacttcggacaggttccgaagcaactcttcacgaagccgcaccccgcccggacagcagccggaaagcccctacccggaaaggatgtcagtaccccagtgagcctgcctggacacccccagccttttttctattccctccaaagcctcaggcctagccaggtcacagtgaaagatatgtacctgttctccttgggctctgagagtccgaagggggcgataggacacatcgtttccaccgaaaagacaatcctggcagtggaacgaaataaagtccttcttcccccactatggaaccgcacttttagctgggggtttgacgatttttcctgttgtctcggcagttacggatcagataaagtgctgatgacctttgaaaatcttgccgcctggggtcgttgtctttgtgctgtttgccctagtccaaccacaattgtcactagcggtacatctacagttgtatgtgtctgggaattgtctatgactaaaggcaggccacgaggactgcgcctgcggcaggccctgtatggtcacactcaggccgttacctgcctcgctgcctcagtcaccttctccttgttagtctctgggtcccaggactgtacgtgtatactctgggatctagatcatttaacccacgtaacccgactgccagcccaccgcgaaggaatcagcgctattacaatcagcgatgtatcgggcaccatcgttagttgtgccggggcccacctgagtttgtggaatgtaaatggccagccattggctagcataactaccgcctggggcccagaaggtgctatcacttgttgttgcctcatggaggggccggcctgggacacctcccaaatcatcatcaccggtagccaggatggcatggtgagggtttggaaaactgaagatgtcaagatgtccgtaccagggcgtccagctggcgaggagccccccgcacaacctccctccccaagggggcataagtgggagaaaaacctggctctttcacgcgagctggacgttagcatcgccctcacaggtaagccatccaaaactagtcccgcggtgacagcactcgctgtcagccgaaatcacaccaagctgttagtgggcgacgagcggggcaggatcttttgttggagtgccgacgggtag

SEQ ID NO: 206668 - DNA, 6804 bp, Artificial Sequence
  derived and/or modified sequence
taaaaactcgcgtcacaggcaattgagccggatgttttgcggcagttcctggggcttggaataccctcgtctctgagcgctaccactaaaatactggattcaagccacacccatcgcggcaatccaggctgcagtggctctcagaccgcccagggacttgctgaagggccctggcccgcggccccagacgcgggactgcatccaggcgtgacacaggcgcctcagccactcggcgaaagtcaagatagcaccaccgcccttcagacggccctgtcattgatttccatgaccagtccccgcaatcttcaacctcagcgggctgctctggctccctcatttgtggaattcgacatgagcgtcgaggggtacggatgtttatttattcccactctgtccactgtcatgggaaccagtactgagtactctgtttctggaggaatcggcacaggagccacccgccccttccccccgcccggcgggctgaccttttcctgctggtttttgatctctcggcacggcgctgcaaccgaaggccatccccttagatttttaactctcgtacgccacctggcgcgaacggagcagcctttcgtgtgcttctccgtgagtctctgtcccgacgatctgagtctcgtggtgagcaccgaagagaaggaatttcaacccctcgatgtgatggagccagaggacgacagcgagccgagcgctgggtgccagctgcaggtccggtgcggccaactcctggcctgtggccagtggcaccacctggcggtggtggttaccaaggagatgaagcgccattgtacagtcagcacttgcctcgacggccaagtgattggctccgccaagatgctgtacattcaggccctgcctgggccgtttctctccatggaccccagtgccttcgttgacgtctacgggtacatagctacaccacgggtttggaaacaaaaatcatctctgatctggcgactgggaccgacctatttgtttgaggaggccatctcaatggaaacactagaagtgatcaacaaactaggaccgcgttattgtggcaactttcaagccgtgcacgtacagggggaggatctcgattcagaggcaactcccttcgtggctgaagaacgggttagttttggactgcatatcgcctcttcttccattactagcgttgccgatattagaaatgcgtacaatgaagttgactccagactgattgccaaagaaatgaacatttcctcccgggacaacgcgatgcccgtgtttcttctaagaaactgcgctggccatttgtcaggcagcctgcggaccattggggcagttgccgtgggccagctcggtgtgcgggtattccacagcagtccggccgcttccagcctggatttcattggcggcccagcgattctgcttggactgatcagtttagccaccgatgaccacactatgtacgccgctgtcaaagtcctgcattcagtgctcaccagtaatgctatgtgtgatttccttatgcaacatatttgcggctaccagatcatggcatttctccttcgaaaaaaggcatcgctattgaatcaccgtatatttcaactgatactgtccgttgccgggacggtcgaactgggatttaggtccagtgctataacaaatacgggtgtctttcaacacatcctgtgcaacttcgagctgtggatgaacacagcagataacctcgaactttccttgttttcccacctcctggaaattctacagtctcccagagaaggacctagaaatgcagaggccgcccatcaggcccagctgattcctaaactgattttccttttcaacgaaccctccctcatcccctcaaagatctctactattatcggtattctggcctgccagctgcggggccatttctctactcaagatctgctgcggatcgggctgttcgtcgtatacaccctgaaaccttctagcgttaacgagcggcagatctgtatggacggagcactggatcccagcctgccagcgggaagccagacttccggtaagacgatatggctgcggaatcaactactggagatgttgctgtcagtcatatcttcaccccagctgcacctctcatctgagagtaaagaggagatgttcctgaagcttggtcccgattggttcctgcttctcctgcagggacatcttcatgcctccaccactgtgttggccctgaagcttcttctttatttcttggcttcgccgtccctgcggactcgtttcagagacggactgtgcgcaggcagttgggtcgaacgctcaacagagggcgttgacattgttatggataacctgaagtcacagagccctctgccagagcagtcaccatgtctgctgccaggcttccgcgtcttgaacgattttcttgctcatcacgtgcatatccccgaggtatacctcatcgtgagtaccttcttcctgcagacgcccctgaccgagctgatggacgggccgaaggatagcctagatgcaatgttacaatggttattacagcggcatcaccaggaggaagtactccaggcgggcctgtgcacagaaggcgcgctgctccttctggagatgcttaaggcaaccatgtcccaaccgctggccgggtctgaggatggggcttgggcacagaccttcccagcttccgttttacaatttctgtccctggtgcacaggacttacccacaggacccggcctggcgggcccctgagtttctgcagacactggctattgctgccttccccctcggggcccagaaaggtgtcggcgcagaaagtactcgaaatacatccagcccagaggccgctgcagagggagacagcaccgtcgagggtcttcaggcccctacaaaggcacatcccgctcggcgtaagctccgggagttcacccaactgctcctgagagagctgctcctgggagcgagtagccccaaacaatggttgcccttggaggtgcttctggaggcgagtcccgatcatgcgaccagccagcaaaaaagggactttcagtcagaggttctcctttctgccatggagctgttccatatgacgtcagggggcgatgctgcaatgttccgagatggcaaagagccacagcctagtgccgaggccgccgccgctccctcactggctaatatctcttgtttcactcagaagcttgtcgagaagctctacagcgggatgttctcagccgacccacgccatattttgctcttcattctggagcacataatggtggtgatagaaacagcctcttcacagcgggacacagtgttgtctacactgtacagctccctaaataaagtcatcctctactgcctgagtaagcctcaacagagcctgtcagagtgtctcgggttgttgtcaatcctcggcttcctgcaagagcactgggacgtggtgttcgcaacttacaatagcaacatctcgtttctattgtgtcttatgcattgcctcttactgctcaacgagcgctcctatccagagggcttcggactggagccgaagccccggatgtcgacttaccatcaagttttcctgagccccaatgaggacgtcaaagagaaacgggaggacctgcctagtctttcagacgttcagcacaatatccagaagacagtgcaaaccctctggcagcagctggtcgcccaacggcaacaaacactggaagacgcctttaagatcgacctgtcagttaagcccggggagagggaagtcaagatcgaggaagtcacccccttgtgggaagagactatgttgaaggcctggcagcactatcttgcttctgagaaaaagtccctggccagcaggtctaatgtggcccaccactctaaagtgacgctctggtcagggagcttgagctccgctatgaagctcatgcctggcaggcaggccaaagacccagagtgtaagactgaagactttgtgagctgcatcgaaaattacagaagacgcggtcaagagctctatgctagcctatacaaggaccatgtacagcgcaggaagtgtgggaatatcaaggcagcaaacgcatgggcgaggatccaggaacagctgttcggcgaactaggcctgtggagccaaggtgaagaaactaagccctgttccccatgggaactagattggagagagggccccgcaagaatgcgcaagcggatcaagcgtctgtccccattggaggccctgtcgagtggtcgtcataaggaaagtcaggataagaacgatcacatctctcagactaatgcagagaaccaagacgagctgactcttcgggaagctgaaggggagcctgacgaggttggagtcgattgtactcagctgaccttcttcccagctctccatgaatccctgcacagcgaggattttctcgagctgtgtagggaacgccaagtgattctgcaggaactcctggacaaggaaaaggtgacccagaagttctcgctggttatcgtccagggccaccttgtgagtgagggcgtgcttctgtttggccaccagcatttctacatctgtgaaaatttcactcttagccccaccggtgacgtctactgtacccggcattgcctgagcaatatctcggaccctttcatctttaacttatgtagcaaggatcgctccactgatcattactcctgccagtgccactcctatgccgatatgagggaattgcgtcaggctaggtttctgctccaggatatcgctttggagatctttttccacaatggctacagtaaattcttagtgttctataataacgatcggtccaaggccttcaagtctttttgctcctttcagcctagtttgaagggcaaagccacgagcgaagacaccctgtctttacgccgctaccccgggagcgatcgcatcatgctacaaaagtggcagaaacgtgatatctcaaactttgaatacctgatgtatcttaacacagccgctggcaggacatgcaatgattacatgcagtatccggtcttcccctgggtgctagcggattacacgtccgaaaccctgaacctggctaaccccaaaatttttagggatctgagtaaacctatgggtgctcagactaaggagcgaaagttaaagttcatacaaagatttaaagaggttgagaaaaccgagggggatatgaccgtccagtgtcactactatacacactattcatctgcaattatcgtcgcatcttacctggtgcgcatgccgcctttcacacaggcattttgcgccctccagggcggttccttcgacgtggcagacagaatgtttcatagcgtcaagtcaacctgggaatccgcttcccgagaaaacatgtctgatgtgcgcgagctcacccctgaattcttctatctgcctgaatttctgactaattgcaatggtgttgagtttgggtgcatgcaggacgggactgtgctcggtgacgtccagcttcccccatgggccgacggcgacccccggaagtttatatccttgcaccgtaaggcccttgagtcggattttgtcagtgcaaacctgcatcactggatcgatctgatcttcggatataaacagcagggccctgctgccgtggacgccgtaaatatttttcatccttatttctatggtgatagaatggacctgagtagcatcacggacccgcttattaaatccaccatattgggcttcgtcagcaactttggccaggtgccaaagcagctgtttactaaacctcaccccgccaggactgcagcaggaaagcctctcccaggcaaggatgtttctacaccagtctcactgcccggacacccccaacctttcttctattctctgcagagcctaaggcccagccaggtaactgtaaaggatatgtatttgtttagcctgggctcggagtcacccaagggggcaatcgggcacatagtttccacagagaagacaattttggcggtcgagcgcaataaggtactccttccccctttgtggaatcggacatttagctggggattcgacgatttcagctgctgtctgggctcctacgggtcggataaggttctcatgacctttgagaacctggctgcctgggggcggtgtctgtgtgctgtttgcccttcacctacaactattgttactagcgggacctcgacagtagtgtgcgtgtgggagctgagtatgaccaagggtaggccgagggggctgcggctccgtcaggctctctatggacacacccaagccgtgacttgccttgcggcttcagtcacattcagcctccttgtgtctggatcccaagactgtacttgcatcttgtgggatctggaccacctgacccatgtgacccgactgcccgcccaccgggagggaatcagcgccatcactatcagtgacgtatccggcaccatcgtgagctgcgcgggagcacatctgagtttgtggaacgtgaatggccagcccctggcgtccattaccacagcctgggggccagagggcgccattacctgctgctgcctgatggaaggccctgcctgggacacttctcagataattataaccggtagtcaggatggcatggtgcgggtgtggaaaacagaggacgtaaagatgtctgttcccgggctacagatggggcggaagcgggaagcggccgaagccctggctcagcagtgtcaggcggaggggggtcgtggggattggggcctcagtagtgcttatagaaggaatccacaaggccttctgccccattcgagtcaagggagggcgtcgggaaatcattctagcgccgcacagcccagcccctggcctatggggttgttatag

SEQ ID NO: 206669 - DNA, 9555 bp, Artificial Sequence
  derived and/or modified sequence
atggaagccgaagacctcagtaaagccgaggatcgaaatgaggaccctgggtccaaaaacgaggggcagttggcagccgttcagccagacgtgcctcacggggggcagagcagcagccccaccgcattgtgggacatgctcgagcgtaaattcttagagtatcagcagttgacacataaatcccctattgaacgacagaaatccctgctgtctctgcttcccctgttcttgaaggcatgggagcatagcgtaggcattatctgcttcccttctctgcagaggctagccgaagacgtgtcggaccagctggctcagcagctgcagaaagccttagtggggaaaccagcggagcaggcacggctcgccgctggtcagctgctgtggtggaaaggggacgttgaccaagatggctacctcctgctgaagagcgtatacgtgctgaccggcactgattctgagactttgggccgggttgcagagtcaggtctcccggccctgctattacaatgcctttacctcttctttgtgttcccattggataaagatgagcttctggaatcagatctgcaggtgcagaaaatgttcgtccagatgttgctgaacatctgctcagacagtcagggcctggagggcctccttagtggctccgaactccagtcactgcttatcgctaccacgtgccttcgggagcactcatgttgcttttggaaggaaccaaccttctgtgtacttcgcgccatctccaaagcacagaatctgagcattattcagtatttgcaggctaccgattgcgtaagattgtctctccaaaatctgtcacggttgaccgatacactcccagccccggaggtgagcgaagcggtctctctcatccttggctttgtgaaggatagctacccagtctctagcgcactgtttttggaatttgagaactcagagggatatcctcttctgctgaaagtgctcctccggtatgatggcctgacccagtctgaggtggatccacacctggaggagctgctagggctcgtcgtatggttgactacctgcggcagaagcgaactgaaagtttttgacagcatcacctaccctcaactggaaggttttaagttccatcatgaagcttccggtgtgacggtgaagaacctccaggcattccaggtccttcaaaatgtctttcataaggcttctgatagtgtgctatgtattcaggtcctgtcagttatcagaacgatgtgggcttggaatgctcgcaatttttttctgctcgagtggacactccagcccatcagccagtttgtggagattatgcccttgaagcccgcacccgtgcaggagcactttttccaacttctggaggcactcgtctttgaactccactacgtgccgcatgagattttacgcaaggtgcagcatctcatcaaggagtcgcctgggccatcatgtaccctaatggccttacaaagtatactcagtattgccggtggggacccactgttcactgatatcttccgcgactcaggcctgctcggcctcctcctggcacagctgcgtaaacaggccaagatcatgcggaagtcaggcaataaagtgtcaactcctggagttcaggatccagagcgcgagctcacatgtgtgatgctcaggatcgttgttaccctgctgaagggctccgtgaggaacgcagtagtcctgaaggaccacggtatggtacccttcattaagatcttcctcgatgacgaatgctatcgggaagcctcattatcaatactggagcaactttccgcaatcaacgccgaggagtatatgtccatcatcgtaggagcactttgctcgagtacacagggcgagcttcagctgaaacttgatctgttaaaaagtctgctgcgcatactcgtcactccgaaaggcagggccgctttccgcgtgagcagcggcttcaatggcctcctgtcgctcttgtccgatttagaagggtccctgcaggagcctccactgcaggcctggggagctgtgtcgccccgacagaccctagagttagtactttacaccttgtgcgccgtgtcagccgccctccactgggatcccgtgaacggctattttttccggcgtaatggcctgtttgagaagctcgcggaggacctttgcttgttgggatgtttcggagcactcgaagaagagggtaatctgctgcgcagttgggtggataccaaggctcggcctttcgccgacctactaggcaccgctttttctagctccggctctctgccccctagaatacaatcctgtctgcagatcctgggttttctcgattccatggcaagcggaacactgcacctgcgaggtgatcttaaggagagtctgaggaccaagcaaggcccagtcgtggacgtgcaaaaaggagagaccgggagcgacccacagcgcaacttcaagcagtggccagacttagaggagaggatggacgagggagacgccgccattatgcatccaggggtcgtctgtattatggttcggctactgcccaggctataccacgaggatcatccacagttgtcagaagagattcaatgctcccttgccagccatatccagtcactagttaaatccgaaaagaaccggcaagttatgtgtgaggccggcctccttggcacgttaatggcatcttgtcatcgagccttagttactagtggatctcctctgcattccagattgatcagaatattcgaaaagctggcttcccaggccatcgaaccggacgttctcagacaatttctcggactcggcattccctcgagtctctccgccacgacaaaaatcttagactcaagccatacacatagaggcaatcccggttgctccgggagccagactgcccaaggcctggccgaggggccatggcccgcagcacctgatgccgggctacaccctggggtcacacaggccccccagccactgggtgaatcccaggattctactacggcgttgcagactgctctgagcctgatctcaatgacctccccacggaatctccagccccaaagggcagctctcgccccatcgtttgttgagtttgatatgtctgtggagggatacggctgcttgttcataccaacactttccacagttatggggacctccacagagtactctgtgagcggtggtatcgggacaggtgctactcggccattcccaccgccaggaggtctgaccttctcctgttggtttctgatcagcaggcatggtgccgcaaccgagggacatcctctgcgttttctcacgctagtaagacatctcgcacgcaccgaacagccctttgtttgtttcagcgtgagcctctgtcctgacgatctgtccctggtggtgtccaccgaagagaaagagttccaaccattggatgtcatggaacctgaagatgactccgaaccatccgcaggatgccagctgcaggtccgctgcggacagttattggcgtgcggccaatggcaccacttagccgtcgtggtgacaaaggaaatgaagaggcactgcacagtgtcaacatgtctcgacggccaggtgattggatcagccaagatgctgtatatacaggccctgcctggcccattcctgtcgatggacccctcagccttcgtagatgtgtacggctacatcgcaacaccccgggtctggaagcagaagagcagtctgatatggaggttgggccctacgtacttgttcgaggaagctattagcatggaaactctggaagtgatcaataagctgggacccaggtactgcgggaactttcaggctgtccacgttcagggtgaagatctggacagcgaagctacccctttcgtcgcggaagagcgggtgagcttcggcctccacattgcctcatcttcaattacctctgttgcagacataaggaatgcctacaacgaagtggattcacggcttatagcgaaggaaatgaacatctcttctagagataacgcaatgcctgtattcctgctcagaaattgcgcgggccacctgtcaggatccctgagaaccattggggccgtggccgtggggcagctcggtgtgagagtattccattcatcacctgcagcctccagtttggactttattgggggccccgccatactccttgggctgatatctctggctacagacgatcacacaatgtacgccgccgttaaggttcttcatagcgttttaacctccaacgccatgtgtgattttcttatgcagcatatctgcggctatcaaattatggccttcctcctaagaaagaaggcttcactgcttaatcatcgcatttttcaattaattctttctgtcgccggtactgtggaattgggcttccgatcgtcagcaataacgaatactggagtgttccagcacattctgtgtaatttcgaattgtggatgaacactgctgacaatttagagctgtccctctttagtcacttactggaaatcctgcaatcgcctcgggagggtccaagaaatgccgaggctgctcaccaggctcagctcatcccaaaactcatattcctgttcaacgagccaagccttatcccttcgaaaatcagcaccattattggaatccttgcatgccagcttaggggccacttctctactcaggatctcctgcggataggcttattcgtagtttacaccctgaagcctagttcagtaaacgaacgtcagatctgcatggacggtgcccttgacccttcactgcccgccggctctcagacgtctgggaaaaccatatggcttagaaatcagttgttagagatgctactgagcgtgatttctagtccccagctgcatttaagttcagaatctaaggaagaaatgttcctcaaactgggacctgattggttcctgctcctgctacaaggacatctccatgcttcgaccactgttctggcactcaaacttctgctgtacttcctagcgtctccaagcctgagaacacggtttcgcgatggtctgtgtgccggcagttgggtagaaaggtccactgaaggcgtggacatagttatggacaacttaaaatcacagtctcctctgcctgaacagtccccttgtctccttcccggtttccgggttctgaacgactttttggcacaccacgtgcacattcccgaagtatacctgattgtgagcacattcttcctacaaacccctcttacagagctcatggacggtcctaaggatagcttggacgcaatgctgcaatggctgctacaacgacaccaccaggaggaggtgctacaggcaggactctgcaccgagggggccttgctgctgctggaaatgttaaaggctactatgtctcagccgctggccggtagcgaggacggggcctgggctcagaccttcccagcatcagtcctccagttcttgagtctggtacaccggacctatccccaagaccccgcctggagggcccctgagttcctgcagaccttggcaatcgccgcatttcctttgggcgcacagaaaggcgtcggtgccgaatctactagaaatacatccagccctgaggccgccgccgaaggcgacagcaccgtcgagggcctccaggccccgactaaagcgcacccagcccggcgaaagttgagagaattcactcaattgctactgagggaattgctactcggggcttctagtcctaaacaatggctgccactggaagtcctccttgaagcctctccggaccacgctaccagccagcaaaagagggactttcagtctgaggtgctgctctccgctatggaattgtttcacatgacatctggcggtgacgccgccatgttcagagatgggaaggagccacaaccctccgcagaggctgctgctgctccatcattggcaaatatctcctgctttacacagaagcttgtcgaaaagctgtactctggtatgtttagcgcagatccccgacatatcctcctgttcatccttgaacacattatggtggtgattgagaccgcgtcttctcagcgggacactgtgctgtccacactctacagcagcctgaataaagtgatcctgtattgtttgtcgaagccacagcagagccttagcgagtgccttggcctgttatcaattttgggttttctgcaggagcactgggatgtggttttcgcaacctacaactctaatatatcttttttgctgtgcctaatgcattgtttgctgctcctgaacgaaaggtcgtatcccgagggcttcggtctggaacctaagccgcggatgagtacctaccatcaagtcttcttgagcccgaatgaggatgtgaaagagaagcgcgaggatttaccatctctaagtgacgtccagcacaatatacagaaaactgttcaaactctctggcaacagctggtggcccagcgccagcagaccctcgaagatgccttcaagatcgacctgtccgttaagcccggcgaacgtgaggttaaaatagaggaagttacacccctgtgggaggaaactatgctgaaagcctggcagcactacctagctagcgaaaaaaagagtctcgcaagcagatctaacgtcgcacaccattctaaggtgacattatggagcggttcactgtccagcgcgatgaaactcatgcctggcagacaggcgaaagatcccgagtgtaaaacggaggacttcgttagctgtattgagaactatcggaggcgcggacaggagttatacgccagcctgtacaaggatcatgtccagagaagaaagtgtggcaacatcaaggccgccaatgcttgggcccgcatccaagaacagctctttggtgagttagggctgtggtcccagggggaagaaacaaagccctgcagcccatgggagctggactggcgagagggtcccgccagaatgcgaaaaaggatcaagcggctctcccctctcgaagctctgagcagcggtagacacaaagagagccaggataaaaatgatcacatatcacagacaaatgccgagaaccaggatgaactgactttgcgagaggcagaaggcgagcctgacgaagtaggagtcgattgcacccagttgacctttttccccgccctgcacgaaagcttacacagcgaagatttccttgagctctgcagagagcggcaggtcattcttcaggaactgctcgataaggaaaaggtgacccagaaattcagcctcgtgatcgttcaggggcatctggtttccgaaggcgtgcttctcttcggacaccaacacttctacatttgtgaaaattttactctgtctccaactggggacgtgtactgcactaggcactgtctgagcaacatttcagacccattcattttcaacttatgcagtaaggatcgcagtaccgatcattactcctgtcagtgccattcttatgcagatatgagagaactccgccaggcccggttcttgcttcaggacattgcccttgagatcttttttcacaatgggtactccaagttccttgtgttctacaataacgacagaagcaaagcattcaagtctttttgtagttttcaaccatcgctcaaaggaaaagctacaagcgaggacactctctcccttcgaagataccccggatctgatcgaattatgctgcagaagtggcagaagcgtgatatcagcaattttgaatacctaatgtaccttaataccgccgcaggcaggacctgcaacgactacatgcagtatccagtctttccatgggtattggccgactacaccagcgagacactgaatttggcaaatcccaagatcttccgagatttatccaaacctatgggagctcagacaaaggaaaggaaattgaaatttatccagcggttcaaggaagtcgaaaaaaccgaaggggacatgactgttcagtgccattactacacccactacagctctgcaatcatagtggccagctatttggtgcgcatgcctccattcacccaggccttctgtgccctccagggaggctcttttgacgtggccgatagaatgtttcactccgtgaagagtacttgggagagcgcgtcaagagagaatatgtctgacgtaagggaacttacacctgagttcttttatctgcccgaatttctgaccaattgcaacggggtggagtttggttgcatgcaggacggcacggtcctgggcgatgtgcaactgcctccttgggccgatggagatccaagaaaattcatctcactacacagaaaggccctagagtctgatttcgtgtcggctaacctgcaccattggatcgacctgatcttcggttataagcaacagggaccggctgcggttgacgccgtgaacatctttcacccatacttctatggggatcggatggatttaagcagcatcaccgaccctctgattaagagtaccattctaggattcgtctcaaacttcggacaggtgcctaagcagttattcaccaagccacatcctgccaggaccgctgctggcaagcctctgccaggaaaggacgtgtctacgcccgtgtccctgcccggtcatcctcagcccttcttttactctctccagagcctgagaccatctcaggtgaccgtgaaggatatgtatctgttttcactgggcagcgaaagtcccaaaggggcaatcggccacattgtgagtaccgagaagaccattctggcagtggaaaggaataaggtgctgttgccccccctgtggaatcgcacattcagttggggtttcgacgacttctcatgctgcctgggaagctatggaagcgacaaagtactgatgacttttgaaaatttggctgcatgggggcgctgcctgtgcgcagtctgcccttctccaaccactattgtgacctcggggacatccacagttgtctgcgtctgggagcttagcatgacaaaggggcggccccgggggctacggctcaggcaggcactgtacggtcacacacaagcagtcacttgcctcgctgcctctgtgaccttctccctgctggtgagcgggtcgcaggactgtacatgcattttgtgggaccttgatcacttgacccacgtcacaagacttccagctcaccgtgagggcatttcagcgattaccattagcgacgtttctggcacaattgttagttgtgctggggctcatctatcactctggaacgtgaacggccagcccctcgcctcaataaccacagcatggggaccagagggcgcgattacatgctgctgcctgatggaaggtcctgcatgggatacttcacagatcatcataactggtagccaagatggcatggtaagagtgtggaaaacggaggatgtcaaaatgagcgtccctggccggcccgcaggcgaggagccgccagcccagcctccatcaccaagaggacacaaatgggagaaaaatctggctttatcccgggagcttgacgtttccatcgccctgactggaaagccatccaagacatcccccgccgtgactgcgctagccgtcagtagaaatcatactaaacttttggtgggggacgagagggggcggatattttgctggagcgctgacggctag

SEQ ID NO: 206670 - DNA, 1965 bp, Artificial Sequence
  derived and/or modified sequence
atggaggctgaagaccttagcaaggctgaggacagaaacgaggatccaggaagcaaaaatgaaggtcagctggcagcagtgcagcctgacgtgccacatgggggccagtcttccagcccaaccgctttgtgggacatgctcgagcgaaagttccttgagtatcagcagctgacccacaagagtccaatcgaaagacagaagtcactgctctccctccttcctctttttttgaaggcttgggagcacagtgtcggaatcatttgctttccttctctgcagaggcttgctgaggacgtttctgatcagttggcgcaacagctccaaaaggccctggtgggcaaacctgctgaacaggctagacttgccgcaggccagcttctgtggtggaagggagatgtcgatcaggatggatatctactgcttaagtcagtgtatgtgctgacaggcactgatagtgagaccttaggccgcgtcgccgagagcggtcttcccgccctgctccttcaatgtctgtacttgttcttcgtcttccccctggacaaggatgagctactggagagtgatctgcaggtccagaaaatgttcgtgcagatgctgctcaatatttgtagcgattcccaggggttggagggcctgctgtcgggcagtgagcttcagtctttgcttattgcaaccacgtgtctgcgagaacattcgtgctgcttttggaaagagcccactttttgcgttctgcgggccataagcaaggcccagaatcttagtattatacagtatttacaggccaccgattgtgtcaggctctctttgcaaaatctgtcacgactgactgacacactacccgccccagaggtgagtgaggctgtatccttgattctcgggttcgtgaaggactcatatccagtctctagtgccctgttcttagagttcgaaaattcagaggggtatccattgctgctaaaggttcttctgagatacgacgggttgacccagtccgaagtggacccccaccttgaagagctcctcggcctggtagtttggctgaccacttgtggtcgttctgaactcaaggtgtttgacagcatcacataccctcagctcgagggcttcaagtttcaccacgaagccagtggcgtcacagtgaagaacctgcaggccttccaggtgctccagaacgttttccataaggccagtgattccgtactgtgcatacaggtgctttccgtgattaggaccatgtgggcctggaacgcacgaaatttcttcctgctagagtggaccctgcagcctatctcacagttcgtggaaatcatgcccttaaagcccgctccggtacaggagcactttttccagctgctggaagctttggtgttcgagttgcattatgtgccacatgaaatactgcgaaaggtacagcacctcataaaagaaagccccggaccctcttgcacactcatggctttgcagtctatccttagcatagccggtggggatccgctgtttaccgacattttcagggactctgggctgctggggctgttgctggcgcagctcagaaaacaagcaaaaatcatgaggaaatccggaaacaaggtgagtaccccgggagtccaggatccagaaagggaactcacctgtgttatgctgaggatcgtggtcacattgctcaaggggtcagtacggaatgccgtcgtactgaaagaccatggcatggtgccctttatcaaaatcttcttggatgacgagtgttatcgagaagccagtctgtctatcctggagcagctttctgctattaatgcggaggaatacatgtcgatcatcgtgggagccctgtgctccagtacccaaggcgaattacagctcaagttggacctactgaaagttatctcctccccccctctgagattagcatcactctggatatgtacaaaacggtcgacttttgctcaggccttcgtcttcatgtag

SEQ ID NO: 206671 - DNA, 3129 bp, Artificial Sequence
  derived and/or modified sequence
atggaagctgaagacctcagtaaggccgaggaccggaacgaagatccgggttctaaaaacgaaggtcagctcgccgcagtgcagcctgacgtgccacacggaggccagtcatcctcacccactgccctctgggacatgctggaaagaaaattcctcgaataccagcagttaactcacaaatccccaattgagaggcaaaagagtcttctttcacttctgccgttgtttctgaaagcttgggaacactctgttgggataatttgcttcccaagcctccagaggctagcggaggacgtgagtgatcaacttgcccagcagcttcagaaagccctggtcggaaagccagctgagcaggcccgcctcgccgctgggcagctcctgtggtggaaaggagacgtggaccaggatggctatcttttgctgaaaagcgtttatgtactgaccggcacagattccgaaactctgggcagagtcgccgaatccggcctgccggctctcctgctgcagtgcctctacctgtttttcgtctttcctttggacaaggacgagctactggagtccgacttgcaggttcagaagatgttcgtgcagatgttattgaatatttgtagcgactcccaaggattagagggactcctgtctggttctgagctgcagtccttgctcattgcaacaacctgtttgcgcgaacattcatgttgcttttggaaggagcctactttttgcgtgctgcgcgccatcagtaaggctcagaatctttctatcattcaatacttacaggccacggactgcgtgaggctgagcctgcagaatctcagccggttgactgacactctcccagcacctgaggtgtcggaggcagtgtcattaatcttagggttcgtgaaggacagctacccggtgtcatcagctctgtttttggagtttgagaactctgagggctaccccctgctcctgaaagtgttgctaagatacgacggcctcacacaaagcgaagtcgatccacatctcgaggaactcctgggcttggtcgtgtggcttacaacatgtggtcgttcagaactgaaagttttcgattctatcacatatccacagctggagggcttcaagttccatcacgaagcgagcggcgtgactgttaaaaacctgcaggctttccaagtgctacagaacgtgttccacaaggccagtgatagtgttttatgtattcaggttttgagtgtaattcggacgatgtgggcttggaacgcccgaaactttttcctactggagtggacattgcagccaatttcccagttcgtggagattatgccactcaaacctgccccggtccaagagcatttttttcaattgttggaagctctggttttcgagctccattacgtcccgcatgagatcctgcgcaaagtccagcacctcattaaggagagtccaggaccttcctgtaccttgatggcattgcagagcattctttctatagccggtggagaccccctttttaccgatatctttcgcgacagcggcctgctcggcctcttgctggcgcagctgcggaaacaagcgaaaatcatgaggaagtctgggaataaagtgtccacgcccggtgtccaggatccggaacgcgagctgacatgcgtgatgttgagaatagtggttaccctgctgaaagggtctgtccgtaacgccgtcgtgctgaaagatcacggaatggtgccatttattaaaatcttcctggatgacgaatgctatagagaagcatctctgtctatcctggagcagctgtccgccattaacgccgaagaatatatgtcgattatcgtgggcgctttgtgcagctcaacccaaggggagctgcagctaaagttggatttgttaaagtcactcctccggatacttgtgactccaaaagggagggccgcttttagggtttcatccgggttcaacggtcttcttagccttttatctgacctcgagggaagcctgcaggagccgccactacaagcatggggcgcagtttctcctcgccagaccctagaattggtgctgtacactctgtgcgccgtgagtgccgcgctccattgggacccagtgaatggatactttttccgtagaaacgggttgtttgagaagctagctgaggacctctgtctgctaggatgctttggtgccctagaagaggaaggtaatcttttgaggtcttgggttgatacaaaagcccgcccattcgccgatttactgggcacggctttcagttcatccgggtctctccccccgcggattcagagctgtttacagattctgggtttccttgactccatggctagcggtactctgcacctgcgcggtgacctgaaagagagtctaagaacgaagcagggtcctgtagtggatgtacaaaagggcgagaccggcagcgatccacaacgcaattttaaacaatggcccgacctcgaagaacgtatggacgagggagacgctgccattatgcaccctggcgtggtttgcataatggttagactgcttccacgattataccatgaggaccacccccaacttagcgaggaaattcagtgttccctggcttcccacattcagtctctcgtcaaatctgagaagaatcgccaggtaatgtgcgaagccggacttctgggcacgctgatggctagttgccacagagccctggtgacttccggctccccacttcattctcgactaattcgaatcttcgaaaaactggcgagtcaggcaattgaacctgatgtgctgcggcagtttcttggattgggtattccatcttctttgtccgccaccacaaagatactggacagctcccacacacacagggggaacccaggctgtagtggctcacagactgctcagggcctggctgaaggcccatggccagctgcccctgacgctggactgcacccaggcgtaacccaggccccgcagcctttaggcgaatcacaggatagcaccacagccctgcaaacagcattgagcctgatctccatgacatctccgcatatctggaagcccaatatctggaaggacaatctagcccagaaacccgtggccggcgatgccgctcagtgcaacattttccctcccgcgtcctccgtgctttag

SEQ ID NO: 206672 - DNA, 9531 bp, Artificial Sequence
  derived and/or modified sequence
atggaggccgaagacttgtccaaggctgaggaccgcaatgaagatcccgggagtaagaacgaaggtcaactggctgcggtacagccggatgtgccccatggcggccagagctcctcccccactgctctctgggatatgctggagcggaaatttctcgagtaccagcagctgacacacaaaagtcctattgagagacaaaagagcctgctctcccttctccctctctttttgaaggcctgggagcacagtgtcgggatcatatgcttcccaagccttcagaggctggcagaggatgtgagtgaccagctggcccaacagttacagaaggctctggtgggaaagcctgctgagcaggcccgattggctgctggacaactgttatggtggaaaggggatgtggatcaagatggttatcttttgctcaagtcagtatatgttcttacaggcactgattcagaaaccctgggcagggtagccgaatcagggctgcccgcactgctgttacaatgtctgtacttgttctttgtctttcccctggataaggacgagttgctcgaatcagacctccaagtgcaaaagatgtttgtgcaaatgctgttgaatatctgcagcgatagccaggggctggaaggactcctgtccggcagtgagctgcaaagtctccttattgcgactacgtgtctacgtgaacactcttgctgtttttggaaggaacccacgttttgtgttctgcgtgctatttcaaaggctcagaacctgagcatcatccagtacctccaggcaacagactgcgtaaggctctcacttcagaatctgagcagactgaccgacaccttgccagcccctgaggtaagcgaggccgtctccctgatactgggctttgtgaaagacagttaccctgtgagttccgctttgttcttggaattcgagaactcagaaggttatccactgttgctaaaggttctcctgcgctacgacggactaacacaaagtgaagtagaccctcatcttgaggagcttctcggactggtggtgtggctgaccacatgcggccggtccgagctgaaggtgtttgattctattacttatccccagctcgaaggcttcaagttccatcatgaggcttctggggtgacagtgaaaaatctgcaagccttccaggtcctacagaacgtcttccacaaagcctcagattcggtgctgtgcatacaagtgctctcggtgatacgcaccatgtgggcctggaatgcccgaaatttcttcctgctcgaatggacccttcagccaatttcacagtttgtggagatcatgcctttgaagccagccccagtgcaagaacacttttttcaactattggaagctttggtgttcgaactacactatgttccacatgagatcctgagaaaggtgcaacacttgattaaagagtccccaggcccaagttgcacactgatggcactgcagtctattttgtccatcgctggcggggatcctctgtttacagatatttttcgggattctgggctgctcgggctgctgttggcccaactaagaaagcaggcaaaaatcatgagaaagtcaggaaacaaggttagcactccaggagtgcaggacccagaacgggagctaacatgcgtgatgctgaggatcgtggttacacttttaaaaggcagtgtccggaatgccgtcgtgctgaaagaccacggaatggtccctttcatcaaaatcttcctggacgatgaatgttatcgcgaggccagcctgtcaattcttgagcagctgagcgcaattaatgcagaagagtatatgtcaatcatcgtgggtgccctctgcagtagtactcagggggaactgcagctgaaattagatttactgaagtccttattgcggattctggttacccccaagggacgcgcagcgttccgggtgagttcgggcttcaacggactcttgtcactgctgagtgacttggagggtagcttgcaggagccccccctgcaggcctggggagctgtcagcccacggcagacacttgaactggttctgtacaccttgtgcgctgtgtcagctgcacttcactgggaccctgtgaatggatatttcttcagaaggaacggactgtttgagaagttagccgaggacctgtgcctcctgggctgttttggtgcgttagaagaagaaggcaatctgctgagatcatgggtcgatactaaggctcgccccttcgcagacctcctcgggactgcattcagttcttccggatccctaccccctagaattcagagctgtctacagattttggggtttcttgattccatggcaagcggcacactccatctccggggggaccttaaggagtccctgagaacgaagcaaggccctgtagtcgacgtgcagaaaggcgagacgggctccgatccccagagaaattttaaacaatggcccgatctcgaagagcgaatggacgagggcgacgcggcaatcatgcaccccggcgtggtctgcataatggtccgactcctgcctagactgtaccatgaagaccacccacagttaagcgaggaaatccagtgttcactagcctcccatatacagagcctggtcaagagcgagaagaatcggcaggtgatgtgtgaggcaggccttctcggcacactgatggcgtcttgccaccgggcactcgtgacttcaggaagcccattacactcaaggctgatccgcatattcgaaaaactggcctcccaagctatcgaaccagatgtacttcgacagtttctcgggctgggtattcctagctcactgagcgcaacgacaaaaatactggactcatcccacacccaccgggggaatcccggttgcagtggctcgcagactgctcaaggcttggccgaggggccctggcccgccgcacccgatgccgggttacacccgggtgtgactcaggccccacagccccttggagagtcccaggatagtacaacggccctgcagactgccctgtcactaatcagtatgacttcgccccggaacctgcagccgcaaagagccgccctggcaccgtccttcgtggaattcgacatgtctgtcgagggatatggatgcctctttataccgaccttgtctaccgtcatgggcacctctactgaatacagcgtaagcggtggcataggcactggcgccacacggcccttcccccctccgggaggcctgactttcagttgctggttcttgatttcaaggcacggagctgctacggagggccatccactgcgcttcttgactctggtgcggcatctggcacggacagaacagccattcgtctgcttttccgtgtcactctgtcctgatgatcttagtcttgttgtgagtaccgaagagaaggagtttcaaccgctagacgtcatggagccagaagatgatagtgagccttctgccggatgtcagctgcaagtgcgctgcggtcagctccttgcatgcggccagtggcatcacctggccgtggttgtcacaaaagaaatgaagcggcactgcactgtcagtacatgcctcgatggccaggtgatcggctccgccaagatgctgtacattcaggccctcccggggccatttctcagtatggatcccagtgcattcgtggatgtatacggctacatcgctactccaagagtgtggaaacagaagagttcattgatatggcgtctcggaccaacttacttattcgaagaggcgatttctatggaaacactcgaggttatcaataaactgggtccccggtactgcggaaacttccaagccgtgcacgtgcagggagaggaccttgattcagaggccacaccattcgttgccgaggaacgcgtgtccttcggattacatatcgcaagttcatccatcacaagtgtggcagacatcaggaatgcctacaacgaagtggactcacgtctgatagccaaagagatgaacatttcatcccgcgataatgccatgccagtgttcctgttacgcaactgcgctggacatctgagcggctcactgcgaaccataggcgccgtggcggtagggcagttgggcgttcgggtgtttcattcaagtcctgccgcgtccagtctggacttcatcggcggacctgcaattttactgggcctgatttcgctggcaaccgatgatcacaccatgtatgctgccgtgaaagtcctccacagcgtcctgacgagcaacgccatgtgtgactttctgatgcagcatatctgcgggtaccagattatggccttcctactccggaagaaagcctctctgctgaaccatcggatattccaacttatcctgagcgtcgcaggtacagtggaactcggcttccgctcatctgctataaccaataccggtgtatttcagcacattctttgtaattttgagctgtggatgaatactgccgacaacctggagttgtctctcttctcgcatttgcttgagattttacagagtcctcgcgaggggccccggaacgccgaggctgcacaccaggcccagctgatacctaagctcatcttcttatttaacgaaccttccctgatcccttccaagatctcaaccatcattggtatcttagcctgccaacttcgaggccactttagtacccaagacctcctgaggatagggcttttcgtggtctacacactcaaacccagctcagtgaatgaaaggcagatatgcatggatggagctttagatccatccttaccagccggatcccagacatctggaaagaccatctggctaagaaaccaactgctggaaatgttactcagtgtgattagctctccacaactgcatctgtcctctgagagcaaggaagagatgtttttgaagctggggcctgattggttcctgcttctgttgcagggccacctgcacgcctctactacagtgctcgccctcaaactgctcctgtactttctggcaagccccagtctgaggacccggtttcgggacggactttgtgcaggaagctgggtggaacgtagtaccgaaggagtcgatattgtcatggacaatttaaagtctcagtcaccccttcctgaacagagtccctgtctcctccctgggtttagggtcttaaacgattttctcgcccaccatgtacacatcccggaggtttaccttatagtgagtaccttctttctccaaactcctctgacagaactgatggacgggccaaaggattccctcgacgcgatgttacagtggcttctccaacggcatcatcaggaagaagtgttgcaggccggactgtgcacagagggggctttgctcctcctagaaatgctcaaagccacgatgtcccagcccctcgcaggtagtgaggacggcgcgtgggctcagacatttcccgccagtgtgctacagttcctttccctcgtacacagaacttaccctcaggatccagcttggcgagctcccgagtttcttcaaacgctggccatcgccgcctttccattgggcgcccaaaagggagtaggtgccgagagcactcgaaatacatcatcgcctgaggctgctgctgagggggatagtactgtggagggcctgcaagccccaactaaagcccacccagcacgacggaagctgagagaatttacgcagttgttgctcagagagctcctcctgggggcctcgtctccaaagcagtggctaccactggaggtgctcctcgaggcatctcccgaccatgcgacctcccaacagaagcgcgattttcagagcgaggttctgctctccgccatggagctgttccatatgacatccggcggggacgccgctatgtttagagacggtaaggaacctcagcctagtgccgaggcagccgctgctcccagcctcgctaatatcagctgttttacacagaagctagtcgagaaattgtactctgggatgttctcagcagaccctaggcacatcctgctgtttattctggagcacatcatggtggtgatagaaactgcttccagccaaagagacaccgttctctctacgttgtactcaagtctcaataaagttatcctctactgtctctcaaagcctcagcagagcttgtcagaatgcttgggcctcttgtctatcctcggatttctccaagagcactgggacgtggtatttgccacctacaacagcaatattagcttcctcttatgcttgatgcactgcctgctcttgctgaacgagaggagttaccccgagggttttggcctggaaccaaagccaagaatgagcacgtaccaccaagtgttcctttctccgaacgaggatgtaaaggaaaagagagaggacctgccctccctgtcagatgttcagcataatattcaaaagacagtccaaacactatggcagcagttagtggctcagcggcagcaaaccctggaggatgctttcaagattgacctctctgtgaagcccggcgaacgcgaggtgaaaatcgaggaagttacccccttatgggaggagacaatgctcaaagcatggcaacattatttggcttccgaaaagaaatccctggcttccagaagcaacgtggcccaccacagcaaggtgactctgtggtccggctctctatcatcagcgatgaaactgatgccaggcagacaggccaaggacccagaatgcaaaactgaagatttcgtgtcatgcattgaaaactacaggagaagggggcaagaactttacgcgagtttatacaaggaccacgtacagcgacggaagtgtgggaatattaaagctgccaacgcgtgggcgaggatccaggagcaactgttcggggagctcggcctgtggtcgcagggcgaggagactaagccatgctcaccttgggagctagactggcgagagggaccagctagaatgagaaagcgtattaagagactttctccccttgaggcactgagtagtgggcgacataaagagagtcaggacaagaacgatcacattagccagactaatgcagagaaccaggatgagttgaccctgcgggaggccgaaggggagccagatgaggtgggtgtcgattgtacccaactcacattttttccagccttgcatgagagtctgcactctgaagatttcctggagctgtgtcgcgagcgacaggtcattctccaggaactccttgacaaggaaaaggtcactcagaaattctccctagtgatagttcagggtcacctcgtaagcgagggtgtgctcctcttcgggcatcaacatttttatatttgtgaaaatttcaccctatctcccacaggagacgtgtactgcacgcggcattgcctctctaacatctcagaccccttcattttcaatctctgctccaaggacagaagtacagaccattactcttgccagtgtcattcctatgccgacatgcgggaactccgacaagcccgcttccttctgcaggacatcgctttggagattttttttcataacggatactccaaattcctagtcttttacaacaatgacagaagcaaagcgttcaagagtttttgctcctttcagcccagcctcaaggggaaggccacatcagaagacacactgtctctccggcggtaccctggctccgatcgaatcatgctccagaagtggcagaagagggacatcagcaactttgaatatctgatgtacctgaacaccgcagccggccgcacgtgcaatgattacatgcagtatcccgtatttccatgggtcctggccgattacacttcagaaaccctgaacctggcaaaccccaagatattccgcgatctgtctaagccgatgggcgcacaaactaaagagcggaagctcaaatttatccaacgattcaaggaggtggagaaaacagagggagatatgacagttcaatgtcattactacacacactattcctccgcaattatcgtggccagttatctggtgcggatgccccccttcacccaggccttttgtgcgctccagggaggatctttcgacgtggcggataggatgttccattcggttaaaagcacatgggaatcggcaagtagggaaaacatgtccgatgtacgtgagcttaccccagagttcttttaccttcccgaattcttgactaactgcaacggggtcgagttcgggtgtatgcaggacgggactgtacttggagatgtccagctacccccttgggctgacggtgatccacgaaaatttatatctctacatcggaaagcgctggaatctgactttgtgtcagccaacttgcaccactggatcgaccttatctttggttataaacagcagggaccagctgccgtcgacgctgtgaatatattccatccttacttttatggagatcgaatggatctttccagcattactgatccactcattaaaagtactatccttggttttgtgtccaactttggacaggtgcccaagcaactcttcaccaagccacaccctgcacggactgctgctgggaagccactgcctgggaaggacgtgtctactccagttagtctgcctggtcatccgcagccatttttctatagtctccaaagtttgagacccagccaggtaacggtgaaggacatgtacctcttcagcctggggtctgaatctcccaaaggagccattgggcatattgtatcaactgaaaaaacgatcctcgccgtcgagaggaacaaggtcctcctgccacccctgtggaaccgtaccttttcctggggctttgatgatttcagctgttgcctggggagctacgggagcgacaaggtcctgatgacatttgaaaacctggcggcttgggggagatgcttatgcgccgtctgtccaagtccaactacaatagtaacctccggcacaagcacagtcgtctgtgtatgggagctcagtatgacgaaagggaggccaagagggttaaggcttagacaggcactctatgggcatacgcaggcagtcacctgtctggctgcctctgtgacattctccttgctcgtctcagggagtcaggactgtacgtgcatcctgtgggacctggatcatctgacacatgtaaccagacttcctgctcatcgagagggcatttcagcaattacaatttccgacgtcagtggcaccatcgtgtcctgcgccggggcgcatcttagcctatggaatgtgaatgggcagccgcttgcttctattactactgcttggggtcccgaaggggcaatcacatgctgctgcctcatggaagggcctgcctgggacacatcgcagattatcattaccggttctcaagatgggatggtccgagtttggaaaacagaggatgtgaagatgtctgtgcccggtttgcaaatgggtaggaaacgcgaagctgctgaggcacttgcccagcagtgtcaagcggagggtgggcggggggattggggactgagttccgcctaccgaaggaatccccagggcctgttgccacactcctcccagggccgcgccagtggcaatcattcctcggctgcgcagccttcgccatggcccatgggactgctgtag

SEQ ID NO: 206673 - DNA, 1875 bp, Artificial Sequence
  derived and/or modified sequence
atgctgcagaaatggcagaagcgggacatatctaatttcgaatacttaatgtatctcaatacagcggctggtcgtacatgtaacgactacatgcagtatcccgtgtttccttgggtgctggcagactacacatcggaaaccctaaatcttgccaatcccaaaatcttccgggacttgtctaagcctatgggagcccagaccaaggaacggaagttaaaattcatacagaggtttaaggaagtagaaaaaactgagggtgacatgactgttcagtgtcactattacacccactattcttctgctataatcgtagcatcttacctcgtacgcatgcctccctttactcaggccttctgcgcgctccagggggggtccttcgacgtcgcggatcgcatgttccactctgtgaaaagtacttgggagtctgcttcacgtgagaacatgtccgacgtgagggagctaacaccagagttcttctaccttcccgagtttctgacaaattgtaacggcgtagagttcggctgcatgcaagatgggacagtcttaggggatgttcagctcccaccgtgggccgacggtgacccaaggaaatttatcagtcttcacagaaaagccctggagagcgactttgtctctgccaacttacatcactggatcgacctgatctttgggtacaagcaacagggcccagcggcagtggacgctgttaacattttccatccatacttttacggtgacaggatggacctgagctctattactgacccccttattaaaagtacaatcttaggattcgtgtctaactttgggcaggtgcccaaacagctctttacaaagcctcatcctgcccggaccgcagccgggaaacctctgccgggcaaggatgttagcacaccagtgtctctgccgggccaccctcaacctttcttctacagtcttcagtcactaaggccttcgcaggtgacagttaaagatatgtatcttttcagtttgggttctgagtcccccaagggtgcaatcggacatatagttagtactgaaaaaacaatcttggctgtcgagcgtaacaaggttctccttcctccactgtggaaccgcacttttagttggggctttgatgatttctcttgctgcttgggcagctatggctcggacaaggtgctgatgacatttgagaacttagccgcatggggccggtgcctctgcgccgtttgtcctagtcctaccacaatagtgacatcaggaacctccacagtggtctgtgtatgggaattatccatgactaaaggtagacctcgtggattgcggctgcggcaggccctgtacgggcacacacaggctgtaacatgcctcgcagccagtgtgacattcagcctcttggtgtcaggatcacaggattgcacgtgcatcctttgggacctcgaccacctcacacacgtgacacgcctgcctgcccacagagaggggatttccgccattactatatctgatgttagcgggacgatcgtgagctgcgccggggcccacctgtccttatggaacgtaaatggtcaacccctcgcttcaatcaccactgcctgggggccagaaggtgctatcacttgttgttgtctgatggagggccctgcgtgggacacatcacagattattataacaggatcccaggacggaatggttcgcgtgtggaaaaccgaggacgtcaaaatgtcagtgcctggccggcctgccggtgaagagccccctgcccaaccacctaccctctccatggctgatggtacatcaatgaagagaatgtccacacacacacgacgggccgagcagcatgctggcaactgcgacctcgtcatgccgtcatgtactcggaattacacctag

SEQ ID NO: 206674 - DNA, 3816 bp, Artificial Sequence
  derived and/or modified sequence
tgaagagacttccagagcgaggtgctgctgagcgccatggagctgttccacatgaccagcggaggagatgctgccatgttcagagatggcaaggagccccagcccagcgctgaggccgctgctgcccccagcctggccaacatcagctgcttcacccagaagctggtggagaagctgtacagcggcatgttttctgctgaccccaggcacatcctgctcttcatcctggagcacatcatggtggtgattgaaacagccagcagccagagggacacagtgctgagcaccctgtacagcagcctgaacaaggtgatcctgtactgcctgagcaagccccagcagagcctgtctgagtgcctgggcctgctgagcatcctgggcttcctgcaggagcactgggatgtggtgtttgccacctacaacagcaacatctccttcctgctgtgcctgatgcactgcctgctgctgctgaatgaaagaagctacccagagggcttcggcctggagcccaagcccaggatgagcacctaccaccaggtgttcctgagccccaatgaagatgtgaaggagaagcgggaggacctgcccagcctgagtgatgtgcagcacaacatccagaagacagtgcagaccctgtggcagcagctggtggcccagaggcagcagaccctggaggatgccttcaagattgacctgtctgtgaagccaggagagcgggaggtgaagattgaggaggtgacccccctgtgggaggagaccatgctgaaggcctggcagcactacctggccagcgagaagaagagcctggccagccgcagcaatgtggcccaccacagcaaggtgaccctgtggagcggcagcctgagcagcgccatgaagctgatgcctggccggcaggccaaggaccctgagtgcaagacagaggactttgtgtcctgcatcgagaactacagaagaagaggccaggagctgtatgccagcctgtacaaggaccacgtgcagaggaggaaatgtggcaacatcaaggccgccaatgcctgggcccgcatccaggagcagctgtttggagagctgggcctgtggagccagggcgaggagaccaagccctgcagcccctgggagctggactggagggagggccctgccaggatgaggaagaggatcaagaggctgagccccctggaggccctgagcagcggccgccacaaggagagccaggacaagaatgaccacatcagccagaccaatgctgagaaccaggatgagctgaccctgcgggaggccgagggggagccagatgaggtgggcgtggactgcacccagctgaccttcttccctgccctgcacgagagcctgcacagcgaggacttcctggagctgtgccgggagcggcaggtgatcctgcaggagctgctggacaaggagaaggtgacccagaagttcagcctggtgattgtgcagggccacctggtgtctgagggcgtgctgctgtttggccaccagcacttctacatctgtgagaacttcaccctgagccccactggagatgtgtactgcaccaggcactgcctgagcaacatcagtgaccccttcatcttcaacctgtgcagcaaggacaggagcacagaccactacagctgccagtgccacagctatgctgacatgagggagctgcggcaggcccgcttcctgctgcaggacatcgccctggagatcttcttccacaacggctacagcaagttcctggtgttctacaacaatgacaggagcaaggccttcaagagcttctgcagcttccagcccagcctgaagggcaaggccaccagcgaggacaccctgagcctgcggcgctacccaggcagtgaccgcatcatgctgcagaagtggcagaagagggacatcagcaactttgagtacctgatgtacctgaacacagctgctggccgcacctgcaatgactacatgcagtaccctgtgttcccctgggtgctggccgactacaccagcgagaccctgaacctggccaaccccaagatcttccgggacctgagcaagcccatgggcgcccagaccaaggagaggaagctgaagttcatccagcgcttcaaggaggtggagaagacagaaggagacatgacagtgcagtgccactactacacccactacagcagcgccatcatcgtggccagctacctggtgaggatgccacccttcacccaggccttctgtgccctgcagggcggcagctttgatgtggccgacaggatgttccacagcgtgaagagcacctgggagagcgccagccgggagaacatgtctgatgtgcgggagctgaccccagagttcttctacctgcctgagttcctgaccaactgcaatggagtggagtttggctgcatgcaggacggcaccgtgctgggagatgtgcagctgcccccctgggcagatggagaccccaggaagttcatcagcctgcacaggaaggccctggagagtgactttgtgtctgccaacctgcaccactggattgacctgatcttcggctacaagcagcagggccctgctgctgtggatgctgtgaacatcttccacccctacttctacggggacaggatggacctgagcagcatcacagaccccctcatcaagagcaccatcctgggctttgtgagcaactttggccaggtgcccaagcagctgttcaccaagccccacccagccaggacagctgctgggaagcccctgcccgggaaggatgtgtccacccctgtgtccctgcccggccacccccagcccttcttctacagcctgcagagcctgcggcccagccaggtgacagtgaaggacatgtacctgttcagcctgggcagcgagagccccaagggggccatcggccacatcgtgtccacagagaagaccatcctggccgtggagaggaacaaggtgctgctgccccccctgtggaacagaaccttctcctggggctttgatgacttcagctgctgcctgggcagctatggcagtgacaaggtgctgatgacctttgagaacctggccgcctggggccgctgcctgtgtgctgtgtgccccagccccaccaccatcgtgaccagcggcaccagcacagtggtgtgtgtgtgggagctgtccatgaccaagggccggccccggggcctgcggctgcggcaggccctgtatggccacacccaggccgtgacctgcctggccgcctctgtgaccttcagcctgctggtgtctggcagccaggactgcacctgcatcctgtgggacctggaccacctgacccacgtgacccggctgcctgcccaccgggagggcatcagcgccatcaccatcagtgatgtgtctggcaccatcgtgtcctgtgccggggcccacctgagcctgtggaatgtgaatggccagcccctggccagcatcaccacagcctggggccctgagggcgccatcacctgctgctgcctgatggagggccctgcctgggacaccagccagatcatcatcaccggcagccaggacggcatggtgcgggtgtggaagacagaagatgtgaagatgtctgtgcccggccggcctgctggggaggagcccccagcccagccccccagcccccggggccacaagtgggagaagaacctggccctgagccgggagctggatgtgtccatcgccctgaccgggaagcccagcaagaccagccctgctgtgacagccctggccgtgtccaggaaccacaccaagctgctggtgggagatgagcggggccgcatcttctgctggagcgcagatggatag

SEQ ID NO: 206675 - DNA, 6804 bp, Artificial Sequence
  derived and/or modified sequence
tgaaagctggccagccaggccatcgagccagatgtgctgcggcagttcctgggcctgggcatccccagcagcctgagcgccaccaccaagatcctggacagcagccacacccaccggggcaaccctggctgcagcggcagccagacagcccagggcctggccgagggcccctggccagctgccccagatgctggcctgcaccctggggtgacccaggccccccagcccctgggggagagccaggacagcaccacagccctgcagacagccctgagcctcatctccatgaccagccccaggaacctgcagccccagagagctgccctggcccccagctttgtggagtttgacatgtctgtggagggctacggctgcctcttcatccccaccctgagcacagtgatgggcaccagcacagagtacagcgtgtctgggggcattggaactggagccacccggcccttccccccacctgggggcctgaccttcagctgctggttcctgatcagccgccacggggccgccacagagggccaccccctgcgcttcctgaccctggtgcgccacctggccaggacagagcagccctttgtgtgcttctctgtgtccctgtgcccagatgacctgagcctggtggtgtccacagaggagaaggagttccagcccctggatgtgatggagccagaagatgacagcgagcccagcgctggctgccagctgcaggtgcgctgtggccagctgctggcctgtggccagtggcaccacctggccgtggtggtgaccaaggagatgaagaggcactgcaccgtgtccacctgcctggatggccaggtgattggcagcgccaagatgctgtacatccaggccctgcccggccccttcctgtccatggaccccagcgcctttgtggatgtgtatggctacatcgccaccccccgggtgtggaagcagaagagcagcctcatctggaggctgggccccacctacctgtttgaggaggccatctccatggagaccctggaggtgatcaacaagctgggcccccgctactgcggcaacttccaggccgtgcacgtgcagggcgaggacctggacagcgaggccaccccatttgtggccgaggagcgggtgtcctttggcctgcacatcgccagcagcagcatcacctctgtggccgacatcagaaatgcctacaatgaggtggacagccgcctcatcgccaaggagatgaacatcagcagccgggacaatgccatgcctgtgttcctgctgaggaactgtgccggccacctgagcggcagcctgcggaccatcggggctgtggccgtgggccagctgggcgtgcgggtcttccacagcagccctgctgccagcagcctggacttcatcggcggccctgccatcctgctgggcctcatcagcctggccacagatgaccacaccatgtatgctgctgtgaaggtgctgcacagcgtgctgaccagcaatgccatgtgtgacttcctgatgcagcacatctgtggctaccagatcatggccttcctgctgaggaagaaggccagcctgctgaaccaccgcatcttccagctgatcctgtctgtggccggcaccgtggagctgggcttccgcagcagcgccatcaccaacacaggagtcttccagcacatcctgtgcaactttgagctgtggatgaacacagctgacaacctggagctgagcctcttcagccacctgctggagatcctgcagagcccccgggagggccccagaaatgctgaggccgcccaccaggcccagctgatccccaagctgatcttcctgttcaatgagcccagcctcatccccagcaagatcagcaccatcatcggcatcctggcctgccagctgcggggccacttcagcacccaggacctgctgagaattggcctgtttgtggtgtacaccctgaagcccagctctgtgaatgaaaggcagatctgcatggatggagccctggaccccagcctgcctgctggcagccagaccagcggcaagaccatctggctgaggaaccagctgctggagatgctgctgagcgtcatcagcagcccccagctgcacctgagcagcgagagcaaggaggagatgttcctgaagctgggccctgactggttcctgctgctgctgcagggccacctgcacgccagcaccaccgtgctggccctgaagctgctgctgtacttcctggccagccccagcctgcggacccgcttcagagatggcctgtgtgccggctcctgggtggagaggagcacagaaggagtggacatcgtgatggacaacctgaagagccagagccccctgcctgagcagagcccctgcctgctgcccggcttccgggtgctgaatgacttcctggcccaccacgtgcacatccctgaggtgtacctgattgtgtccaccttcttcctgcagacccccctgacagagctgatggatggccccaaggacagcctggatgccatgctgcagtggctgctgcagaggcaccaccaggaggaggtgctgcaggccggcctgtgcacagaaggagccctgctgctgctggagatgctgaaggccaccatgagccagcccctggccggctctgaagatggagcctgggcccagaccttccctgcctctgtgctgcagttcctgagcctggtgcacaggacctacccccaggaccctgcctggagggcccctgagttcctgcagaccctggccatcgccgccttccccctgggcgcccagaagggcgtgggcgctgagagcaccaggaacaccagcagccctgaggccgctgctgagggggacagcacagtggagggcctgcaggcccccaccaaggcccacccagcccggaggaagctgcgggagttcacccagctgctgctgcgggagctgctgctgggcgccagcagccccaagcagtggctgcccctggaggtgctgctggaggccagcccagaccacgccaccagccagcagaagagggacttccagagcgaggtgctgctgagcgccatggagctgttccacatgaccagcggaggagatgctgccatgttcagagatggcaaggagccccagcccagcgctgaggccgctgctgcccccagcctggccaacatcagctgcttcacccagaagctggtggagaagctgtacagcggcatgttttctgctgaccccaggcacatcctgctcttcatcctggagcacatcatggtggtgattgaaacagccagcagccagagggacacagtgctgagcaccctgtacagcagcctgaacaaggtgatcctgtactgcctgagcaagccccagcagagcctgtctgagtgcctgggcctgctgagcatcctgggcttcctgcaggagcactgggatgtggtgtttgccacctacaacagcaacatctccttcctgctgtgcctgatgcactgcctgctgctgctgaatgaaagaagctacccagagggcttcggcctggagcccaagcccaggatgagcacctaccaccaggtgttcctgagccccaatgaagatgtgaaggagaagcgggaggacctgcccagcctgagtgatgtgcagcacaacatccagaagacagtgcagaccctgtggcagcagctggtggcccagaggcagcagaccctggaggatgccttcaagattgacctgtctgtgaagccaggagagcgggaggtgaagattgaggaggtgacccccctgtgggaggagaccatgctgaaggcctggcagcactacctggccagcgagaagaagagcctggccagccgcagcaatgtggcccaccacagcaaggtgaccctgtggagcggcagcctgagcagcgccatgaagctgatgcctggccggcaggccaaggaccctgagtgcaagacagaggactttgtgtcctgcatcgagaactacagaagaagaggccaggagctgtatgccagcctgtacaaggaccacgtgcagaggaggaaatgtggcaacatcaaggccgccaatgcctgggcccgcatccaggagcagctgtttggagagctgggcctgtggagccagggcgaggagaccaagccctgcagcccctgggagctggactggagggagggccctgccaggatgaggaagaggatcaagaggctgagccccctggaggccctgagcagcggccgccacaaggagagccaggacaagaatgaccacatcagccagaccaatgctgagaaccaggatgagctgaccctgcgggaggccgagggggagccagatgaggtgggcgtggactgcacccagctgaccttcttccctgccctgcacgagagcctgcacagcgaggacttcctggagctgtgccgggagcggcaggtgatcctgcaggagctgctggacaaggagaaggtgacccagaagttcagcctggtgattgtgcagggccacctggtgtctgagggcgtgctgctgtttggccaccagcacttctacatctgtgagaacttcaccctgagccccactggagatgtgtactgcaccaggcactgcctgagcaacatcagtgaccccttcatcttcaacctgtgcagcaaggacaggagcacagaccactacagctgccagtgccacagctatgctgacatgagggagctgcggcaggcccgcttcctgctgcaggacatcgccctggagatcttcttccacaacggctacagcaagttcctggtgttctacaacaatgacaggagcaaggccttcaagagcttctgcagcttccagcccagcctgaagggcaaggccaccagcgaggacaccctgagcctgcggcgctacccaggcagtgaccgcatcatgctgcagaagtggcagaagagggacatcagcaactttgagtacctgatgtacctgaacacagctgctggccgcacctgcaatgactacatgcagtaccctgtgttcccctgggtgctggccgactacaccagcgagaccctgaacctggccaaccccaagatcttccgggacctgagcaagcccatgggcgcccagaccaaggagaggaagctgaagttcatccagcgcttcaaggaggtggagaagacagaaggagacatgacagtgcagtgccactactacacccactacagcagcgccatcatcgtggccagctacctggtgaggatgccacccttcacccaggccttctgtgccctgcagggcggcagctttgatgtggccgacaggatgttccacagcgtgaagagcacctgggagagcgccagccgggagaacatgtctgatgtgcgggagctgaccccagagttcttctacctgcctgagttcctgaccaactgcaatggagtggagtttggctgcatgcaggacggcaccgtgctgggagatgtgcagctgcccccctgggcagatggagaccccaggaagttcatcagcctgcacaggaaggccctggagagtgactttgtgtctgccaacctgcaccactggattgacctgatcttcggctacaagcagcagggccctgctgctgtggatgctgtgaacatcttccacccctacttctacggggacaggatggacctgagcagcatcacagaccccctcatcaagagcaccatcctgggctttgtgagcaactttggccaggtgcccaagcagctgttcaccaagccccacccagccaggacagctgctgggaagcccctgcccgggaaggatgtgtccacccctgtgtccctgcccggccacccccagcccttcttctacagcctgcagagcctgcggcccagccaggtgacagtgaaggacatgtacctgttcagcctgggcagcgagagccccaagggggccatcggccacatcgtgtccacagagaagaccatcctggccgtggagaggaacaaggtgctgctgccccccctgtggaacagaaccttctcctggggctttgatgacttcagctgctgcctgggcagctatggcagtgacaaggtgctgatgacctttgagaacctggccgcctggggccgctgcctgtgtgctgtgtgccccagccccaccaccatcgtgaccagcggcaccagcacagtggtgtgtgtgtgggagctgtccatgaccaagggccggccccggggcctgcggctgcggcaggccctgtatggccacacccaggccgtgacctgcctggccgcctctgtgaccttcagcctgctggtgtctggcagccaggactgcacctgcatcctgtgggacctggaccacctgacccacgtgacccggctgcctgcccaccgggagggcatcagcgccatcaccatcagtgatgtgtctggcaccatcgtgtcctgtgccggggcccacctgagcctgtggaatgtgaatggccagcccctggccagcatcaccacagcctggggccctgagggcgccatcacctgctgctgcctgatggagggccctgcctgggacaccagccagatcatcatcaccggcagccaggacggcatggtgcgggtgtggaagacagaagatgtgaagatgtctgtgcccggcctgcagatgggcaggaagcgggaggccgctgaggccctggcccagcagtgccaggccgagggcggccgcggggactggggcctgagcagcgcctacagaagaaacccccagggcctgctgccccacagcagccagggccgggccagcggcaaccacagcagcgctgcccagcccagcccctggcccatgggcctgctgtag

SEQ ID NO: 206676 - DNA, 9555 bp, Artificial Sequence
  derived and/or modified sequence
atggaggccgaggacctgagcaaggccgaggacagaaatgaagaccccggcagcaagaatgaaggccagctggccgctgtgcagccagatgtgccccatggaggccagagcagcagccccacagccctgtgggacatgctggagaggaagttcctggagtaccagcagctgacccacaagagccccatcgagcggcagaagagcctgctgagcctgctgcccctcttcctgaaggcctgggagcacagcgtgggcatcatctgcttccccagcctgcagaggctggctgaagatgtgtctgaccagctggcccagcagctgcagaaggccctggtgggcaagccagctgagcaggcccggctggccgccggccagctgctgtggtggaagggagatgtggaccaggacggctacctgctgctgaagtctgtgtatgtgctgaccggcacagacagcgagaccctgggccgggtggccgagagcggcctgcctgccctgctgctgcagtgcctgtacctgttctttgtgttccccctggacaaggatgagctgctggagagtgacctgcaggtgcagaagatgtttgtgcagatgctgctgaacatctgcagcgacagccagggcctggagggcctgctgagcggcagcgagctgcagagcctgctgattgccaccacctgcctgcgggagcacagctgctgcttctggaaggagcccaccttctgtgtgctgcgggccatcagcaaggcccagaacctgagcatcatccagtacctgcaggccacagactgtgtgcggctgagcctgcagaacctgagccggctgacagacaccctgcctgcccctgaggtgtctgaggccgtgtccctcatcctgggctttgtgaaggacagctaccctgtgtcctctgccctcttcctggagtttgagaacagcgagggctaccccctgctgctgaaggtgctgctgcgctatgatggcctgacccagagcgaggtggacccccacctggaggagctgctgggcctggtggtgtggctgaccacctgtggccgctctgagctgaaggtgtttgacagcatcacctacccccagctggagggcttcaagttccaccacgaggccagcggcgtgacagtgaagaacctgcaggccttccaggtgctgcagaatgtgttccacaaggccagtgacagcgtgctgtgcatccaggtgctgagcgtcatccgcaccatgtgggcctggaatgccaggaacttcttcctgctggagtggaccctgcagcccatcagccagtttgtggagatcatgcccctgaagccagcccctgtgcaggagcacttcttccagctgctggaggccctggtgtttgagctgcactacgtgccccatgagatcctgaggaaggtgcagcacctgatcaaggagagccctggccccagctgcaccctgatggccctgcagagcatcctgagcattgctggaggagaccccctcttcacagacatcttccgggacagcggcctgctgggcctgctgctggcccagctgaggaagcaggccaagatcatgaggaagagcggcaacaaggtgtccaccccaggagtgcaggaccctgagcgggagctgacctgtgtgatgctgcgcatcgtggtgaccctgctgaagggctctgtgagaaatgctgtggtgctgaaggaccacggcatggtgcccttcatcaagatcttcctggatgatgagtgctaccgggaggccagcctgagcatcctggagcagctgagcgccatcaatgctgaggagtacatgagcatcatcgtgggcgccctgtgcagcagcacccagggcgagctgcagctgaagctggacctgctgaagagcctgctgcgcatcctggtgacccccaagggccgggccgccttccgggtgagcagcggcttcaacggcctgctgagcctgctgagtgacctggagggcagcctgcaggagccccccctgcaggcctggggcgctgtgagcccccggcagaccctggagctggtgctgtacaccctgtgtgctgtgtctgctgccctgcactgggaccctgtgaatggctacttcttcagaagaaatggcctgtttgagaagctggccgaggacctgtgcctgctgggctgctttggagccctggaggaggagggcaacctgctgcgctcctgggtggacaccaaggcccggccctttgctgacctgctgggcacagccttcagcagcagcggcagcctgcccccacgcatccagagctgcctgcagatcctgggcttcctggacagcatggccagcggcaccctgcacctgcggggggacctgaaggagagcctgcggaccaagcagggccctgtggtggatgtgcagaagggggagactggaagtgacccccagaggaacttcaagcagtggccagacctggaggagaggatggatgaaggagatgctgccatcatgcaccctggggtggtgtgcatcatggtgcggctgctgccccggctgtaccacgaggaccacccccagctgtctgaggagatccagtgcagcctggccagccacatccagagcctggtgaagtctgagaagaaccggcaggtgatgtgtgaggccggcctgctgggcaccctgatggccagctgccaccgggccctggtgaccagcggcagccccctgcacagccgcctcatccgcatctttgagaagctggccagccaggccattgaaccagatgtgctgcggcagttcctgggcctgggcatccccagcagcctgagcgccaccaccaagatcctggacagcagccacacccaccggggcaaccctggctgcagcggcagccagacagcccagggcctggccgagggcccctggccagctgccccagatgctggcctgcaccctggggtgacccaggccccccagcccctgggggagagccaggacagcaccacagccctgcagacagccctgagcctcatctccatgaccagccccaggaacctgcagccccagagagctgccctggcccccagctttgtggagtttgacatgtctgtggagggctacggctgcctcttcatccccaccctgagcacagtgatgggcaccagcacagagtacagcgtgtctgggggcatcggcaccggggccacccggcccttccccccacctgggggcctgaccttcagctgctggttcctgatcagcagacatggagctgccacagagggccaccccctgcgcttcctgaccctggtgcgccacctggccaggacagagcagccctttgtgtgcttctctgtgtccctgtgcccagatgacctgagcctggtggtgtccacagaggagaaggagttccagcccctggatgtgatggagccagaagatgattctgagcccagcgctggctgccagctgcaggtgcgctgtggccagctgctggcctgtggccagtggcaccacctggccgtggtggtgaccaaggagatgaagaggcactgcaccgtgtccacctgcctggatggccaggtgattggcagcgccaagatgctgtacatccaggccctgcccggccccttcctgtccatggaccccagcgcctttgtggatgtgtatggctacatcgccaccccccgggtgtggaagcagaagagcagcctcatctggaggctgggccccacctacctgtttgaggaggccatctccatggagaccctggaggtgatcaacaagctgggcccccgctactgcggcaacttccaggccgtgcacgtgcagggcgaggacctggacagcgaggccaccccatttgtggccgaggagcgggtgtcctttggcctgcacatcgccagcagcagcatcacctctgtggccgacatcagaaatgcctacaatgaggtggacagccggctgattgccaaggagatgaacatcagcagccgggacaatgccatgcctgtgttcctgctgaggaactgtgccggccacctgagcggcagcctgcggaccatcggggctgtggccgtgggccagctgggcgtgcgggtcttccacagcagccctgctgccagcagcctggacttcatcggcggccctgccatcctgctgggcctcatcagcctggccacagatgaccacaccatgtatgctgctgtgaaggtgctgcacagcgtgctgaccagcaatgccatgtgtgacttcctgatgcagcacatctgtggctaccagatcatggccttcctgctgaggaagaaggccagcctgctgaaccaccgcatcttccagctgatcctgtctgtggccggcaccgtggagctgggcttccgcagcagcgccatcaccaacacaggagtcttccagcacatcctgtgcaactttgagctgtggatgaacacagctgacaacctggagctgagcctcttcagccacctgctggagatcctgcagagcccccgggagggccccagaaatgctgaggccgcccaccaggcccagctgatccccaagctgatcttcctgttcaatgagcccagcctcatccccagcaagatcagcaccatcatcggcatcctggcctgccagctgcggggccacttcagcacccaggacctgctgcgcatcggcctgtttgtggtgtacaccctgaagcccagctctgtgaatgaaaggcagatctgcatggatggagccctggaccccagcctgcctgctggcagccagaccagcggcaagaccatctggctgaggaaccagctgctggagatgctgctgagcgtcatcagcagcccccagctgcacctgagcagcgagagcaaggaggagatgttcctgaagctgggccctgactggttcctgctgctgctgcagggccacctgcacgccagcaccaccgtgctggccctgaagctgctgctgtacttcctggccagccccagcctgcggacccgcttcagagatggcctgtgtgccggctcctgggtggagaggagcacagagggcgtggacatcgtgatggacaacctgaagagccagagccccctgcctgagcagagcccctgcctgctgcccggcttccgggtgctgaatgacttcctggcccaccacgtgcacatccctgaggtgtacctgattgtgtccaccttcttcctgcagacccccctgacagagctgatggatggccccaaggacagcctggatgccatgctgcagtggctgctgcagaggcaccaccaggaggaggtgctgcaggccggcctgtgcacagagggcgccctgctgctgctggagatgctgaaggccaccatgagccagcccctggccggctctgaagatggagcctgggcccagaccttccctgcctctgtgctgcagttcctgagcctggtgcacaggacctacccccaggaccctgcctggagggcccctgagttcctgcagaccctggccatcgccgccttccccctgggcgcccagaagggcgtgggcgctgagagcaccaggaacaccagcagccctgaggccgctgctgagggggacagcacagtggagggcctgcaggcccccaccaaggcccacccagcccggaggaagctgcgggagttcacccagctgctgctgcgggagctgctgctgggcgccagcagccccaagcagtggctgcccctggaggtgctgctggaggccagcccagaccacgccaccagccagcagaagagggacttccagagcgaggtgctgctgagcgccatggagctgttccacatgaccagcggaggagatgctgccatgttcagagatggcaaggagccccagcccagcgctgaggccgccgccgcccccagcctggccaacatcagctgcttcacccagaagctggtggagaagctgtacagcggcatgttttctgctgaccccaggcacatcctgctcttcatcctggagcacatcatggtggtgattgaaacagccagcagccagagggacacagtgctgagcaccctgtacagcagcctgaacaaggtgatcctgtactgcctgagcaagccccagcagagcctgtctgaatgtctgggcctgctgagcatcctgggcttcctgcaggagcactgggatgtggtgtttgccacctacaacagcaacatctccttcctgctgtgcctgatgcactgcctgctgctgctgaatgaaagaagctacccagagggcttcggcctggagcccaagcccaggatgagcacctaccaccaggtgttcctgagccccaatgaagatgtgaaggagaagcgggaggacctgcccagcctgagtgatgtgcagcacaacatccagaagacagtgcagaccctgtggcagcagctggtggcccagaggcagcagaccctggaggatgccttcaagattgacctgtctgtgaagccaggagagcgggaggtgaagattgaggaggtgacccccctgtgggaggagaccatgctgaaggcctggcagcactacctggccagcgagaagaagagcctggccagccgcagcaatgtggcccaccacagcaaggtgaccctgtggagcggcagcctgagcagcgccatgaagctgatgcctggccggcaggccaaggaccctgagtgcaagacagaagattttgtgtcctgcatcgagaactacagaagaagaggccaggagctgtatgccagcctgtacaaggaccacgtgcagaggaggaaatgtggcaacatcaaggccgccaatgcctgggcccgcatccaggagcagctgtttggagagctgggcctgtggagccagggcgaggagaccaagccctgcagcccctgggagctggactggagggagggccctgccaggatgaggaagaggatcaagaggctgagccccctggaggccctgagcagcggccgccacaaggagagccaggacaagaatgaccacatcagccagaccaatgctgagaaccaggatgagctgaccctgcgggaggccgagggggagccagatgaggtgggcgtggactgcacccagctgaccttcttccctgccctgcacgagagcctgcacagcgaggacttcctggagctgtgccgggagcggcaggtgatcctgcaggagctgctggacaaggagaaggtgacccagaagttcagcctggtgattgtgcagggccacctggtgtctgaaggagtgctgctgtttggccaccagcacttctacatctgtgagaacttcaccctgagccccactggagatgtgtactgcaccaggcactgcctgagcaacatcagtgaccccttcatcttcaacctgtgcagcaaggacaggagcacagaccactacagctgccagtgccacagctatgctgacatgagggagctgcggcaggcccgcttcctgctgcaggacatcgccctggagatcttcttccacaacggctacagcaagttcctggtgttctacaacaatgacaggagcaaggccttcaagagcttctgcagcttccagcccagcctgaagggcaaggccaccagcgaggacaccctgagcctgcggcgctacccaggcagtgaccgcatcatgctgcagaagtggcagaagagggacatcagcaactttgagtacctgatgtacctgaacacagctgctggccgcacctgcaatgactacatgcagtaccctgtgttcccctgggtgctggccgactacaccagcgagaccctgaacctggccaaccccaagatcttccgggacctgagcaagcccatgggcgcccagaccaaggagaggaagctgaagttcatccagcgcttcaaggaggtggagaagacagaaggagacatgacagtgcagtgccactactacacccactacagcagcgccatcatcgtggccagctacctggtgaggatgccacccttcacccaggccttctgtgccctgcagggcggcagctttgatgtggccgacaggatgttccacagcgtgaagagcacctgggagagcgccagccgggagaacatgtctgatgtgcgggagctgaccccagagttcttctacctgcctgagttcctgaccaactgcaatggagtggagtttggctgcatgcaggacggcaccgtgctgggagatgtgcagctgcccccctgggcagatggagaccccaggaagttcatcagcctgcacaggaaggccctggagagtgactttgtgtctgccaacctgcaccactggattgacctgatcttcggctacaagcagcagggccctgctgctgtggatgctgtgaacatcttccacccctacttctatggagacaggatggacctgagcagcatcacagaccccctcatcaagagcaccatcctgggctttgtgagcaactttggccaggtgcccaagcagctgttcaccaagccccacccagccaggacagctgctgggaagcccctgcccgggaaggatgtgtccacccctgtgtccctgcccggccacccccagcccttcttctacagcctgcagagcctgcggcccagccaggtgacagtgaaggacatgtacctgttcagcctgggcagcgagagccccaagggggccatcggccacatcgtgtccacagagaagaccatcctggccgtggagaggaacaaggtgctgctgccccccctgtggaacagaaccttctcctggggctttgatgacttcagctgctgcctgggcagctatggcagtgacaaggtgctgatgacctttgagaacctggccgcctggggccgctgcctgtgtgctgtgtgccccagccccaccaccatcgtgaccagcggcaccagcacagtggtgtgtgtgtgggagctgtccatgaccaagggccggccccggggcctgcggctgcggcaggccctgtatggccacacccaggccgtgacctgcctggccgcctctgtgaccttcagcctgctggtgtctggcagccaggactgcacctgcatcctgtgggacctggaccacctgacccacgtgacccggctgcctgcccaccgggagggcatcagcgccatcaccatcagtgatgtgtctggcaccatcgtgtcctgtgccggggcccacctgagcctgtggaatgtgaatggccagcccctggccagcatcaccacagcctggggccctgagggcgccatcacctgctgctgcctgatggagggccctgcctgggacaccagccagatcatcatcaccggcagccaggacggcatggtgcgggtgtggaagacagaagatgtgaagatgtctgtgcccggccggcctgctggggaggagcccccagcccagccccccagcccccggggccacaagtgggagaagaacctggccctgagccgggagctggatgtgtccatcgccctgaccgggaagcccagcaagaccagccctgctgtgacagccctggccgtgtccaggaaccacaccaagctgctggtgggagatgagcggggccgcatcttctgctggagcgcagatggatag

SEQ ID NO: 206677 - DNA, 1965 bp, Artificial Sequence
  derived and/or modified sequence
atggaggccgaggacctgagcaaggccgaggacagaaatgaagaccccggcagcaagaatgaaggccagctggccgctgtgcagccagatgtgccccatggaggccagagcagcagccccacagccctgtgggacatgctggagaggaagttcctggagtaccagcagctgacccacaagagccccatcgagcggcagaagagcctgctgagcctgctgcccctcttcctgaaggcctgggagcacagcgtgggcatcatctgcttccccagcctgcagaggctggctgaagatgtgtctgaccagctggcccagcagctgcagaaggccctggtgggcaagccagctgagcaggcccggctggccgccggccagctgctgtggtggaagggagatgtggaccaggacggctacctgctgctgaagtctgtgtatgtgctgaccggcacagacagcgagaccctgggccgggtggccgagagcggcctgcctgccctgctgctgcagtgcctgtacctgttctttgtgttccccctggacaaggatgagctgctggagagtgacctgcaggtgcagaagatgtttgtgcagatgctgctgaacatctgcagcgacagccagggcctggagggcctgctgagcggcagcgagctgcagagcctgctgattgccaccacctgcctgcgggagcacagctgctgcttctggaaggagcccaccttctgtgtgctgcgggccatcagcaaggcccagaacctgagcatcatccagtacctgcaggccacagactgtgtgcggctgagcctgcagaacctgagccggctgacagacaccctgcctgcccctgaggtgtctgaggccgtgtccctcatcctgggctttgtgaaggacagctaccctgtgtcctctgccctcttcctggagtttgagaacagcgagggctaccccctgctgctgaaggtgctgctgcgctatgatggcctgacccagagcgaggtggacccccacctggaggagctgctgggcctggtggtgtggctgaccacctgtggccgctctgagctgaaggtgtttgacagcatcacctacccccagctggagggcttcaagttccaccacgaggccagcggcgtgacagtgaagaacctgcaggccttccaggtgctgcagaatgtgttccacaaggccagtgacagcgtgctgtgcatccaggtgctgagcgtcatccgcaccatgtgggcctggaatgccaggaacttcttcctgctggagtggaccctgcagcccatcagccagtttgtggagatcatgcccctgaagccagcccctgtgcaggagcacttcttccagctgctggaggccctggtgtttgagctgcactacgtgccccatgagatcctgaggaaggtgcagcacctgatcaaggagagccctggccccagctgcaccctgatggccctgcagagcatcctgagcattgctggaggagaccccctcttcacagacatcttccgggacagcggcctgctgggcctgctgctggcccagctgaggaagcaggccaagatcatgaggaagagcggcaacaaggtgtccaccccaggagtgcaggaccctgagcgggagctgacctgtgtgatgctgcgcatcgtggtgaccctgctgaagggctctgtgagaaatgctgtggtgctgaaggaccacggcatggtgcccttcatcaagatcttcctggatgatgagtgctaccgggaggccagcctgagcatcctggagcagctgagcgccatcaatgctgaggagtacatgagcatcatcgtgggcgccctgtgcagcagcacccagggcgagctgcagctgaagctggacctgctgaaggtgatcagcagcccccccctgcggctggccagcctgtggatctgcaccaagaggagcacctttgcccaggcctttgtgttcatgtag

SEQ ID NO: 206678 - DNA, 3129 bp, Artificial Sequence
  derived and/or modified sequence
atggaggccgaggacctgagcaaggccgaggacagaaatgaagaccccggcagcaagaatgaaggccagctggccgctgtgcagccagatgtgccccatggaggccagagcagcagccccacagccctgtgggacatgctggagaggaagttcctggagtaccagcagctgacccacaagagccccatcgagcggcagaagagcctgctgagcctgctgcccctcttcctgaaggcctgggagcacagcgtgggcatcatctgcttccccagcctgcagaggctggctgaagatgtgtctgaccagctggcccagcagctgcagaaggccctggtgggcaagccagctgagcaggcccggctggccgccggccagctgctgtggtggaagggagatgtggaccaggacggctacctgctgctgaagtctgtgtatgtgctgaccggcacagacagcgagaccctgggccgggtggccgagagcggcctgcctgccctgctgctgcagtgcctgtacctgttctttgtgttccccctggacaaggatgagctgctggagagtgacctgcaggtgcagaagatgtttgtgcagatgctgctgaacatctgcagcgacagccagggcctggagggcctgctgagcggcagcgagctgcagagcctgctgattgccaccacctgcctgcgggagcacagctgctgcttctggaaggagcccaccttctgtgtgctgcgggccatcagcaaggcccagaacctgagcatcatccagtacctgcaggccacagactgtgtgcggctgagcctgcagaacctgagccggctgacagacaccctgcctgcccctgaggtgtctgaggccgtgtccctcatcctgggctttgtgaaggacagctaccctgtgtcctctgccctcttcctggagtttgagaacagcgagggctaccccctgctgctgaaggtgctgctgcgctatgatggcctgacccagagcgaggtggacccccacctggaggagctgctgggcctggtggtgtggctgaccacctgtggccgctctgagctgaaggtgtttgacagcatcacctacccccagctggagggcttcaagttccaccacgaggccagcggcgtgacagtgaagaacctgcaggccttccaggtgctgcagaatgtgttccacaaggccagtgacagcgtgctgtgcatccaggtgctgagcgtcatccgcaccatgtgggcctggaatgccaggaacttcttcctgctggagtggaccctgcagcccatcagccagtttgtggagatcatgcccctgaagccagcccctgtgcaggagcacttcttccagctgctggaggccctggtgtttgagctgcactacgtgccccatgagatcctgaggaaggtgcagcacctgatcaaggagagccctggccccagctgcaccctgatggccctgcagagcatcctgagcattgctggaggagaccccctcttcacagacatcttccgggacagcggcctgctgggcctgctgctggcccagctgaggaagcaggccaagatcatgaggaagagcggcaacaaggtgtccaccccaggagtgcaggaccctgagcgggagctgacctgtgtgatgctgcgcatcgtggtgaccctgctgaagggctctgtgagaaatgctgtggtgctgaaggaccacggcatggtgcccttcatcaagatcttcctggatgatgagtgctaccgggaggccagcctgagcatcctggagcagctgagcgccatcaatgctgaggagtacatgagcatcatcgtgggcgccctgtgcagcagcacccagggcgagctgcagctgaagctggacctgctgaagagcctgctgcgcatcctggtgacccccaagggccgggccgccttccgggtgagcagcggcttcaacggcctgctgagcctgctgagtgacctggagggcagcctgcaggagccccccctgcaggcctggggcgctgtgagcccccggcagaccctggagctggtgctgtacaccctgtgtgctgtgtctgctgccctgcactgggaccctgtgaatggctacttcttcagaagaaatggcctgtttgagaagctggccgaggacctgtgcctgctgggctgctttggagccctggaggaggagggcaacctgctgcgctcctgggtggacaccaaggcccggccctttgctgacctgctgggcacagccttcagcagcagcggcagcctgcccccacgcatccagagctgcctgcagatcctgggcttcctggacagcatggccagcggcaccctgcacctgcggggggacctgaaggagagcctgcggaccaagcagggccctgtggtggatgtgcagaagggggagactggaagtgacccccagaggaacttcaagcagtggccagacctggaggagaggatggatgaaggagatgctgccatcatgcaccctggggtggtgtgcatcatggtgcggctgctgccccggctgtaccacgaggaccacccccagctgtctgaggagatccagtgcagcctggccagccacatccagagcctggtgaagtctgagaagaaccggcaggtgatgtgtgaggccggcctgctgggcaccctgatggccagctgccaccgggccctggtgaccagcggcagccccctgcacagccgcctcatccgcatctttgagaagctggccagccaggccattgaaccagatgtgctgcggcagttcctgggcctgggcatccccagcagcctgagcgccaccaccaagatcctggacagcagccacacccaccggggcaaccctggctgcagcggcagccagacagcccagggcctggccgagggcccctggccagctgccccagatgctggcctgcaccctggggtgacccaggccccccagcccctgggggagagccaggacagcaccacagccctgcagacagccctgagcctcatctccatgaccagcccccacatctggaagcccaacatctggaaggacaacctggcccagaagcctgtggccggagatgctgcccagtgcaacatcttccccccagccagctctgtgctgtag

SEQ ID NO: 206679 - DNA, 9531 bp, Artificial Sequence
  derived and/or modified sequence
atggaggccgaggacctgagcaaggccgaggacagaaatgaagaccccggcagcaagaatgaaggccagctggccgctgtgcagccagatgtgccccatggaggccagagcagcagccccacagccctgtgggacatgctggagaggaagttcctggagtaccagcagctgacccacaagagccccatcgagcggcagaagagcctgctgagcctgctgcccctcttcctgaaggcctgggagcacagcgtgggcatcatctgcttccccagcctgcagaggctggctgaagatgtgtctgaccagctggcccagcagctgcagaaggccctggtgggcaagccagctgagcaggcccggctggccgccggccagctgctgtggtggaagggagatgtggaccaggacggctacctgctgctgaagtctgtgtatgtgctgaccggcacagacagcgagaccctgggccgggtggccgagagcggcctgcctgccctgctgctgcagtgcctgtacctgttctttgtgttccccctggacaaggatgagctgctggagagtgacctgcaggtgcagaagatgtttgtgcagatgctgctgaacatctgcagcgacagccagggcctggagggcctgctgagcggcagcgagctgcagagcctgctgattgccaccacctgcctgcgggagcacagctgctgcttctggaaggagcccaccttctgtgtgctgcgggccatcagcaaggcccagaacctgagcatcatccagtacctgcaggccacagactgtgtgcggctgagcctgcagaacctgagccggctgacagacaccctgcctgcccctgaggtgtctgaggccgtgtccctcatcctgggctttgtgaaggacagctaccctgtgtcctctgccctcttcctggagtttgagaacagcgagggctaccccctgctgctgaaggtgctgctgcgctatgatggcctgacccagagcgaggtggacccccacctggaggagctgctgggcctggtggtgtggctgaccacctgtggccgctctgagctgaaggtgtttgacagcatcacctacccccagctggagggcttcaagttccaccacgaggccagcggcgtgacagtgaagaacctgcaggccttccaggtgctgcagaatgtgttccacaaggccagtgacagcgtgctgtgcatccaggtgctgagcgtcatccgcaccatgtgggcctggaatgccaggaacttcttcctgctggagtggaccctgcagcccatcagccagtttgtggagatcatgcccctgaagccagcccctgtgcaggagcacttcttccagctgctggaggccctggtgtttgagctgcactacgtgccccatgagatcctgaggaaggtgcagcacctgatcaaggagagccctggccccagctgcaccctgatggccctgcagagcatcctgagcattgctggaggagaccccctcttcacagacatcttccgggacagcggcctgctgggcctgctgctggcccagctgaggaagcaggccaagatcatgaggaagagcggcaacaaggtgtccaccccaggagtgcaggaccctgagcgggagctgacctgtgtgatgctgcgcatcgtggtgaccctgctgaagggctctgtgagaaatgctgtggtgctgaaggaccacggcatggtgcccttcatcaagatcttcctggatgatgagtgctaccgggaggccagcctgagcatcctggagcagctgagcgccatcaatgctgaggagtacatgagcatcatcgtgggcgccctgtgcagcagcacccagggcgagctgcagctgaagctggacctgctgaagagcctgctgcgcatcctggtgacccccaagggccgggccgccttccgggtgagcagcggcttcaacggcctgctgagcctgctgagtgacctggagggcagcctgcaggagccccccctgcaggcctggggcgctgtgagcccccggcagaccctggagctggtgctgtacaccctgtgtgctgtgtctgctgccctgcactgggaccctgtgaatggctacttcttcagaagaaatggcctgtttgagaagctggccgaggacctgtgcctgctgggctgctttggagccctggaggaggagggcaacctgctgcgctcctgggtggacaccaaggcccggccctttgctgacctgctgggcacagccttcagcagcagcggcagcctgcccccacgcatccagagctgcctgcagatcctgggcttcctggacagcatggccagcggcaccctgcacctgcggggggacctgaaggagagcctgcggaccaagcagggccctgtggtggatgtgcagaagggggagactggaagtgacccccagaggaacttcaagcagtggccagacctggaggagaggatggatgaaggagatgctgccatcatgcaccctggggtggtgtgcatcatggtgcggctgctgccccggctgtaccacgaggaccacccccagctgtctgaggagatccagtgcagcctggccagccacatccagagcctggtgaagtctgagaagaaccggcaggtgatgtgtgaggccggcctgctgggcaccctgatggccagctgccaccgggccctggtgaccagcggcagccccctgcacagccgcctcatccgcatctttgagaagctggccagccaggccattgaaccagatgtgctgcggcagttcctgggcctgggcatccccagcagcctgagcgccaccaccaagatcctggacagcagccacacccaccggggcaaccctggctgcagcggcagccagacagcccagggcctggccgagggcccctggccagctgccccagatgctggcctgcaccctggggtgacccaggccccccagcccctgggggagagccaggacagcaccacagccctgcagacagccctgagcctcatctccatgaccagccccaggaacctgcagccccagagagctgccctggcccccagctttgtggagtttgacatgtctgtggagggctacggctgcctcttcatccccaccctgagcacagtgatgggcaccagcacagagtacagcgtgtctgggggcatcggcaccggggccacccggcccttccccccacctgggggcctgaccttcagctgctggttcctgatcagcagacatggagctgccacagagggccaccccctgcgcttcctgaccctggtgcgccacctggccaggacagagcagccctttgtgtgcttctctgtgtccctgtgcccagatgacctgagcctggtggtgtccacagaggagaaggagttccagcccctggatgtgatggagccagaagatgattctgagcccagcgctggctgccagctgcaggtgcgctgtggccagctgctggcctgtggccagtggcaccacctggccgtggtggtgaccaaggagatgaagaggcactgcaccgtgtccacctgcctggatggccaggtgattggcagcgccaagatgctgtacatccaggccctgcccggccccttcctgtccatggaccccagcgcctttgtggatgtgtatggctacatcgccaccccccgggtgtggaagcagaagagcagcctcatctggaggctgggccccacctacctgtttgaggaggccatctccatggagaccctggaggtgatcaacaagctgggcccccgctactgcggcaacttccaggccgtgcacgtgcagggcgaggacctggacagcgaggccaccccatttgtggccgaggagcgggtgtcctttggcctgcacatcgccagcagcagcatcacctctgtggccgacatcagaaatgcctacaatgaggtggacagccggctgattgccaaggagatgaacatcagcagccgggacaatgccatgcctgtgttcctgctgaggaactgtgccggccacctgagcggcagcctgcggaccatcggggctgtggccgtgggccagctgggcgtgcgggtcttccacagcagccctgctgccagcagcctggacttcatcggcggccctgccatcctgctgggcctcatcagcctggccacagatgaccacaccatgtatgctgctgtgaaggtgctgcacagcgtgctgaccagcaatgccatgtgtgacttcctgatgcagcacatctgtggctaccagatcatggccttcctgctgaggaagaaggccagcctgctgaaccaccgcatcttccagctgatcctgtctgtggccggcaccgtggagctgggcttccgcagcagcgccatcaccaacacaggagtcttccagcacatcctgtgcaactttgagctgtggatgaacacagctgacaacctggagctgagcctcttcagccacctgctggagatcctgcagagcccccgggagggccccagaaatgctgaggccgcccaccaggcccagctgatccccaagctgatcttcctgttcaatgagcccagcctcatccccagcaagatcagcaccatcatcggcatcctggcctgccagctgcggggccacttcagcacccaggacctgctgcgcatcggcctgtttgtggtgtacaccctgaagcccagctctgtgaatgaaaggcagatctgcatggatggagccctggaccccagcctgcctgctggcagccagaccagcggcaagaccatctggctgaggaaccagctgctggagatgctgctgagcgtcatcagcagcccccagctgcacctgagcagcgagagcaaggaggagatgttcctgaagctgggccctgactggttcctgctgctgctgcagggccacctgcacgccagcaccaccgtgctggccctgaagctgctgctgtacttcctggccagccccagcctgcggacccgcttcagagatggcctgtgtgccggctcctgggtggagaggagcacagagggcgtggacatcgtgatggacaacctgaagagccagagccccctgcctgagcagagcccctgcctgctgcccggcttccgggtgctgaatgacttcctggcccaccacgtgcacatccctgaggtgtacctgattgtgtccaccttcttcctgcagacccccctgacagagctgatggatggccccaaggacagcctggatgccatgctgcagtggctgctgcagaggcaccaccaggaggaggtgctgcaggccggcctgtgcacagagggcgccctgctgctgctggagatgctgaaggccaccatgagccagcccctggccggctctgaagatggagcctgggcccagaccttccctgcctctgtgctgcagttcctgagcctggtgcacaggacctacccccaggaccctgcctggagggcccctgagttcctgcagaccctggccatcgccgccttccccctgggcgcccagaagggcgtgggcgctgagagcaccaggaacaccagcagccctgaggccgctgctgagggggacagcacagtggagggcctgcaggcccccaccaaggcccacccagcccggaggaagctgcgggagttcacccagctgctgctgcgggagctgctgctgggcgccagcagccccaagcagtggctgcccctggaggtgctgctggaggccagcccagaccacgccaccagccagcagaagagggacttccagagcgaggtgctgctgagcgccatggagctgttccacatgaccagcggaggagatgctgccatgttcagagatggcaaggagccccagcccagcgctgaggccgccgccgcccccagcctggccaacatcagctgcttcacccagaagctggtggagaagctgtacagcggcatgttttctgctgaccccaggcacatcctgctcttcatcctggagcacatcatggtggtgattgaaacagccagcagccagagggacacagtgctgagcaccctgtacagcagcctgaacaaggtgatcctgtactgcctgagcaagccccagcagagcctgtctgaatgtctgggcctgctgagcatcctgggcttcctgcaggagcactgggatgtggtgtttgccacctacaacagcaacatctccttcctgctgtgcctgatgcactgcctgctgctgctgaatgaaagaagctacccagagggcttcggcctggagcccaagcccaggatgagcacctaccaccaggtgttcctgagccccaatgaagatgtgaaggagaagcgggaggacctgcccagcctgagtgatgtgcagcacaacatccagaagacagtgcagaccctgtggcagcagctggtggcccagaggcagcagaccctggaggatgccttcaagattgacctgtctgtgaagccaggagagcgggaggtgaagattgaggaggtgacccccctgtgggaggagaccatgctgaaggcctggcagcactacctggccagcgagaagaagagcctggccagccgcagcaatgtggcccaccacagcaaggtgaccctgtggagcggcagcctgagcagcgccatgaagctgatgcctggccggcaggccaaggaccctgagtgcaagacagaagattttgtgtcctgcatcgagaactacagaagaagaggccaggagctgtatgccagcctgtacaaggaccacgtgcagaggaggaaatgtggcaacatcaaggccgccaatgcctgggcccgcatccaggagcagctgtttggagagctgggcctgtggagccagggcgaggagaccaagccctgcagcccctgggagctggactggagggagggccctgccaggatgaggaagaggatcaagaggctgagccccctggaggccctgagcagcggccgccacaaggagagccaggacaagaatgaccacatcagccagaccaatgctgagaaccaggatgagctgaccctgcgggaggccgagggggagccagatgaggtgggcgtggactgcacccagctgaccttcttccctgccctgcacgagagcctgcacagcgaggacttcctggagctgtgccgggagcggcaggtgatcctgcaggagctgctggacaaggagaaggtgacccagaagttcagcctggtgattgtgcagggccacctggtgtctgaaggagtgctgctgtttggccaccagcacttctacatctgtgagaacttcaccctgagccccactggagatgtgtactgcaccaggcactgcctgagcaacatcagtgaccccttcatcttcaacctgtgcagcaaggacaggagcacagaccactacagctgccagtgccacagctatgctgacatgagggagctgcggcaggcccgcttcctgctgcaggacatcgccctggagatcttcttccacaacggctacagcaagttcctggtgttctacaacaatgacaggagcaaggccttcaagagcttctgcagcttccagcccagcctgaagggcaaggccaccagcgaggacaccctgagcctgcggcgctacccaggcagtgaccgcatcatgctgcagaagtggcagaagagggacatcagcaactttgagtacctgatgtacctgaacacagctgctggccgcacctgcaatgactacatgcagtaccctgtgttcccctgggtgctggccgactacaccagcgagaccctgaacctggccaaccccaagatcttccgggacctgagcaagcccatgggcgcccagaccaaggagaggaagctgaagttcatccagcgcttcaaggaggtggagaagacagaaggagacatgacagtgcagtgccactactacacccactacagcagcgccatcatcgtggccagctacctggtgaggatgccacccttcacccaggccttctgtgccctgcagggcggcagctttgatgtggccgacaggatgttccacagcgtgaagagcacctgggagagcgccagccgggagaacatgtctgatgtgcgggagctgaccccagagttcttctacctgcctgagttcctgaccaactgcaatggagtggagtttggctgcatgcaggacggcaccgtgctgggagatgtgcagctgcccccctgggcagatggagaccccaggaagttcatcagcctgcacaggaaggccctggagagtgactttgtgtctgccaacctgcaccactggattgacctgatcttcggctacaagcagcagggccctgctgctgtggatgctgtgaacatcttccacccctacttctatggagacaggatggacctgagcagcatcacagaccccctcatcaagagcaccatcctgggctttgtgagcaactttggccaggtgcccaagcagctgttcaccaagccccacccagccaggacagctgctgggaagcccctgcccgggaaggatgtgtccacccctgtgtccctgcccggccacccccagcccttcttctacagcctgcagagcctgcggcccagccaggtgacagtgaaggacatgtacctgttcagcctgggcagcgagagccccaagggggccatcggccacatcgtgtccacagagaagaccatcctggccgtggagaggaacaaggtgctgctgccccccctgtggaacagaaccttctcctggggctttgatgacttcagctgctgcctgggcagctatggcagtgacaaggtgctgatgacctttgagaacctggccgcctggggccgctgcctgtgtgctgtgtgccccagccccaccaccatcgtgaccagcggcaccagcacagtggtgtgtgtgtgggagctgtccatgaccaagggccggccccggggcctgcggctgcggcaggccctgtatggccacacccaggccgtgacctgcctggccgcctctgtgaccttcagcctgctggtgtctggcagccaggactgcacctgcatcctgtgggacctggaccacctgacccacgtgacccggctgcctgcccaccgggagggcatcagcgccatcaccatcagtgatgtgtctggcaccatcgtgtcctgtgccggggcccacctgagcctgtggaatgtgaatggccagcccctggccagcatcaccacagcctggggccctgagggcgccatcacctgctgctgcctgatggagggccctgcctgggacaccagccagatcatcatcaccggcagccaggacggcatggtgcgggtgtggaagacagaagatgtgaagatgtctgtgcccggcctgcagatgggcaggaagcgggaggccgctgaggccctggcccagcagtgccaggccgagggcggccgcggggactggggcctgagcagcgcctacagaagaaacccccagggcctgctgccccacagcagccagggccgggccagcggcaaccacagcagcgctgcccagcccagcccctggcccatgggcctgctgtag

SEQ ID NO: 206680 - DNA, 1875 bp, Artificial Sequence
  derived and/or modified sequence
atgctgcagaagtggcagaagagggacatcagcaactttgagtacctgatgtacctgaacacagctgctggccgcacctgcaatgactacatgcagtaccctgtgttcccctgggtgctggccgactacaccagcgagaccctgaacctggccaaccccaagatcttccgggacctgagcaagcccatgggcgcccagaccaaggagaggaagctgaagttcatccagcgcttcaaggaggtggagaagacagaaggagacatgacagtgcagtgccactactacacccactacagcagcgccatcatcgtggccagctacctggtgaggatgccacccttcacccaggccttctgtgccctgcagggcggcagctttgatgtggccgacaggatgttccacagcgtgaagagcacctgggagagcgccagccgggagaacatgtctgatgtgcgggagctgaccccagagttcttctacctgcctgagttcctgaccaactgcaatggagtggagtttggctgcatgcaggacggcaccgtgctgggagatgtgcagctgcccccctgggcagatggagaccccaggaagttcatcagcctgcacaggaaggccctggagagtgactttgtgtctgccaacctgcaccactggattgacctgatcttcggctacaagcagcagggccctgctgctgtggatgctgtgaacatcttccacccctacttctacggggacaggatggacctgagcagcatcacagaccccctcatcaagagcaccatcctgggctttgtgagcaactttggccaggtgcccaagcagctgttcaccaagccccacccagccaggacagctgctgggaagcccctgcccgggaaggatgtgtccacccctgtgtccctgcccggccacccccagcccttcttctacagcctgcagagcctgcggcccagccaggtgacagtgaaggacatgtacctgttcagcctgggcagcgagagccccaagggggccatcggccacatcgtgtccacagagaagaccatcctggccgtggagaggaacaaggtgctgctgccccccctgtggaacagaaccttctcctggggctttgatgacttcagctgctgcctgggcagctatggcagtgacaaggtgctgatgacctttgagaacctggccgcctggggccgctgcctgtgtgctgtgtgccccagccccaccaccatcgtgaccagcggcaccagcacagtggtgtgtgtgtgggagctgtccatgaccaagggccggccccggggcctgcggctgcggcaggccctgtatggccacacccaggccgtgacctgcctggccgcctctgtgaccttcagcctgctggtgtctggcagccaggactgcacctgcatcctgtgggacctggaccacctgacccacgtgacccggctgcctgcccaccgggagggcatcagcgccatcaccatcagtgatgtgtctggcaccatcgtgtcctgtgccggggcccacctgagcctgtggaatgtgaatggccagcccctggccagcatcaccacagcctggggccctgagggcgccatcacctgctgctgcctgatggagggccctgcctgggacaccagccagatcatcatcaccggcagccaggacggcatggtgcgggtgtggaagacagaagatgtgaagatgtctgtgcccggccggcctgctggggaggagcccccagcccagccccccaccctgtccatggctgatggcacctccatgaagaggatgagcacccacaccaggagagctgagcagcacgccggcaactgtgacctggtgatgcccagctgcaccaggaactacacctag

SEQ ID NO: 206681 - DNA, 3816 bp, Artificial Sequence
  derived and/or modified sequence
tgacgggacttccagagcgaggtgctgctgagcgccatggagctgttccatatgactagtggaggtgatgccgccatgttccgagatggtaaggagccgcaaccttccgccgaggcagccgctgctccttccctagccaacattagctgctttacacagaagcttgttgagaagctttatagtggcatgttctccgccgacccgaggcacatcctcctgttcatattggagcacatcatggtggtaatcgagactgcgagctctcagagggacactgtgctgagtaccctgtacagttctctgaacaaagtgatcctctattgcctctctaaacctcagcagtcactttctgagtgcctcggcctgttgtccatacttggcttcctgcaagaacactgggatgtggtttttgccacgtacaacagtaatattagcttccttctatgcttaatgcattgcctgctgctccttaacgagcggtcctaccccgaaggattcgggctcgagcccaagccaaggatgtcaacgtaccatcaggtttttctgtctccaaatgaagacgtaaaggagaagcgcgaggatctcccaagtcttagtgatgtgcagcacaacatccagaagacagtgcagacgttatggcaacaattggtggcacagcggcagcagaccttggaagacgcatttaaaatcgatttgagcgtcaaaccaggagaacgcgaggttaagattgaagaagtaaccccactgtgggaggaaacgatgctcaaggcttggcagcactacttagcgtctgagaagaaatccctcgcctccaggtcgaatgtggcacatcactctaaggtgacactctggagtggctcgctgagctcggctatgaagctcatgcctggtcggcaagcgaaagatcccgaatgcaagacagaagacttcgtcagttgcattgagaactatagaagacggggacaggagctctacgcgtcgctttacaaggaccacgtccagcggaggaaatgtggaaacattaaggccgccaatgcgtgggcaaggatccaggagcagctgttcggtgagctcgggttgtggagtcagggggaggagacaaaaccttgcagcccttgggagctggattggcgcgagggaccagctcgcatgcgaaagcggattaagaggttaagtcctttggaagccctcagctctggcagacataaggagagtcaggacaagaatgaccatatcagccagacaaatgcggagaaccaagatgaactcacactgagggaagcggagggcgagcccgacgaagttggcgtggattgcacacagctcaccttctttcctgccttacatgaaagcctccactcggaagattttttggagttgtgccgcgagcgtcaggtcatactgcaggaacttctggataaagaaaaagttacgcaaaagtttagtctggtcatagtgcagggacacctggtgtcggagggggttttactcttcgggcaccagcacttctacatttgtgaaaacttcactctgagcccaaccggcgacgtctattgcacccgtcactgtctatcaaatatcagcgatccctttattttcaatctgtgttcaaaggaccggagcacagatcactacagctgccagtgccactcatatgcagacatgcgggagttacgccaagctcgctttttactacaagacatcgcccttgaaatcttctttcacaatgggtactccaagtttcttgtgttttataataacgaccgaagcaaggccttcaagtccttttgcagcttccaaccgtctctgaaagggaaggccacttctgaagacacactgtccctgcgccgctacccggggtccgatcggataatgctgcagaagtggcagaaacgagacattagtaacttcgagtatcttatgtatctcaataccgctgctgggcggacctgcaacgactacatgcagtaccccgtgttcccttgggttctggctgattacacaagcgagaccttgaacctggcaaacccaaaaatcttccgggacttgtccaagcccatgggcgcacagactaaagagcgaaaattaaaattcattcagcgattcaaggaagtcgaaaagaccgagggggatatgaccgtccagtgtcactattatacccactattcctccgccattatcgtggcctcttacctggtgcgcatgcccccgtttactcaggctttttgtgcgctgcaaggtgggtcctttgatgtggccgaccgcatgtttcacagcgttaagagcacatgggagtccgcaagtagagaaaatatgtctgatgtgcgcgaactcacacccgaattcttctacctgcctgagttcctcaccaactgtaatggggtcgagtttgggtgcatgcaagatggtaccgtgttgggggacgtgcagcttccaccttgggctgacggggaccccagaaaattcatttctctacatcgcaaagccctggaatcagattttgtgtccgcgaacctacatcactggatagatctcatcttcggctacaagcagcagggccccgccgcagtggacgctgtcaacatcttccacccctatttttacggagatagaatggatctgtcgtccatcaccgaccctctaattaagtcaacaatactgggattcgttagtaacttcggccaagtacccaaacagctctttaccaaaccacatcccgcccgcaccgccgctggaaagcctctgccaggcaaagacgtgtcaacgcctgtgagtctccccggtcaccctcagcctttcttctacagcctccagtcactgagaccttcacaggttactgtaaaagatatgtatctgttctccctcggaagcgagtcgcccaagggagccatcgggcatattgtctctacggagaaaaccatcctcgccgttgagcgcaacaaggtactcctcccacccttgtggaaccggacgttctcctggggttttgatgattttagctgttgcttggggagctatgggtctgataaggtcctgatgacgttcgaaaatctcgccgcctggggacgctgtctctgcgctgtgtgtccctccccaacaacaattgtgacctccggaacttctactgttgtatgtgtgtgggagctgtctatgacaaagggtcggccccgcggcctgagactgcggcaagccctatatgggcacacacaggcagtcacttgtttggctgcaagcgtcacattttctctgctggtgtctggcagccaggactgcacatgcattctgtgggatctagaccacttgacacatgtgacacggctcccagcccatcgtgaagggatcagcgcgatcaccatcagcgatgtgtccggcacaattgtttcgtgcgcaggcgcccacctgtctctatggaatgtgaacggccagccccttgcctccatcactaccgcttggggacccgagggcgcgatcacctgttgttgtctgatggagggccctgcttgggatacatcccagatcatcataaccgggtcccaagatggcatggtccgcgtctggaagacagaggacgtgaagatgtctgtccctggtagacctgctggagaggagcctcccgcccagcctccgagtccccgcgggcacaaatgggagaagaatcttgccctatctcgggagctggacgtgtctatagctcttaccgggaaacctagtaaaacatcaccagccgtgacagccctggccgtgtctcgcaaccacaccaaactgctggtgggtgacgagcggggtaggattttttgctggagcgctgacggttag

SEQ ID NO: 206682 - DNA, 6804 bp, Artificial Sequence
  derived and/or modified sequence
tgaaagctggccagccaggccatcgagcccgacgtgctgcggcagttcctaggactgggcatcccaagcagcttgtccgcaactaccaagattctagactcctcccatacccatcgaggcaatccaggatgctccggctcccaaactgcgcaggggctcgcagagggcccatggcccgcagctcctgacgctgggctgcacccaggcgtaacacaagccccccaacctctcggagaaagtcaggactccacaaccgcgttgcaaacagctctcagcctcataagtatgaccagccctaggaatcttcagccccagcgggcggcactcgcaccaagtttcgtggagttcgacatgtctgtggaggggtacggatgtctgtttattcctaccctcagcaccgttatgggcacgagtacagaatactctgtgagtggcggcattgggaccggtgcgactcgtccttttccacctccagggggactgacctttagttgttggtttctcataagccgacatggggccgctactgagggccacccattacgattcctgactctggtgagacacctggcgcgaaccgaacaaccttttgtctgtttcagtgttagcctgtgccctgatgacctgagcttggtggtgtcgacagaggagaaagaattccagccactggatgtaatggaaccagaggatgactccgaaccatccgccggttgtcagctccaggtgagatgtggacagctattggcttgcggacagtggcaccatctggcagtggttgtcaccaaggagatgaagcggcactgtactgtttctacctgtctggacggacaggttatcggaagcgccaagatgctatatatccaggcactccctggcccatttttaagcatggatccttctgcctttgtggatgtgtacggatatatcgcaaccccaagggtctggaagcaaaagagcagtcttatctggagactgggaccaacttatttatttgaggaggccatctctatggagactctggaagttattaacaaacttggaccaagatattgtggcaatttccaggctgtgcacgtgcagggagaggacctagatagcgaggcgaccccattcgtcgcagaagaaagggtttcctttggactccacatagcctctagtagcatcacgagtgtagcagatatccgtaatgcttataacgaggttgattcccggctaatcgctaaggagatgaatatttcctcacgggataacgcaatgcccgttttcctgttaaggaactgtgcagggcatctgtccgggtctctaaggactataggtgccgtcgctgtaggtcagctaggtgtgagggtctttcattcatccccggccgctagtagtctggacttcatcggtggtccggcaatcctgttgggactgatttctttggcaaccgatgatcatacaatgtacgccgccgtgaaagtgctccactctgtactgacttccaacgcaatgtgtgactttctcatgcaacatatctgcggataccagatcatggcctttttgctgcggaagaaggctagtctcctgaatcacaggatttttcagttgattctctcagttgctgggaccgtcgaactgggttttcgaagcagtgcaatcaccaataccggagtcttccagcatattctgtgcaatttcgaactttggatgaatacagcagataatcttgaactatccctattttcccaccttctggagatactgcagtcgcctcgtgaggggccccgcaatgctgaggcagctcatcaggcccagctgataccaaagctgatctttctgtttaacgagcccagtctgatcccaagcaaaattagcaccatcattgggattttggcttgccagctcagaggccacttttctacccaagatctactgcgaattggactgttcgtcgtctatactctgaagcccagttccgttaacgagcggcagatttgcatggatggggccctcgatccgtccctgccagcggggagtcagactagtggcaagacaatctggctgaggaaccagttgttggagatgctcctttcagtgattagctcacctcagctccacctgagcagtgagtccaaagaggaaatgtttctgaaactcgggccagactggtttctgctcttgctgcaggggcatcttcacgcgtcgactacagtcctggcacttaagctgctgctgtactttctcgccagtccctctctaaggacgagatttcgggacggtttgtgcgccggcagctgggtggaaagatctaccgagggtgtcgacatcgtgatggacaacctcaagagccagagtccccttcctgaacagagcccgtgcctgcttcccggtttcagggtcttgaatgatttcctcgcccaccacgtccacattccggaagtttacctgatcgtctccacctttttcctccaaacgcctctcaccgagctcatggatggcccaaaagattcccttgatgccatgcttcagtggctgctccagcgacatcatcaggaagaggtgttgcaggccgggctgtgtaccgaaggagctctgctgttactggagatgctcaaggctacaatgtcccagccactggctggcagcgaagatggcgcgtgggctcagacttttcctgcctctgtgttgcagttcttgagcctggtccaccggacctacccacaggacccagcttggagggctcccgagtttttgcaaacgcttgcgatcgccgccttccccttgggtgctcagaaaggtgttggcgctgagagtaccaggaacactagcagtcccgaggcagctgccgagggtgatagtacagtagaagggttgcaagcccctactaaagcccacccagctcgaaggaagctgagggaattcacacagctcctactgagagaactccttctgggagccagctcaccaaaacagtggcttcctctggaggtgctgcttgaggcgtctcctgatcacgctacaagccagcagaaaagagacttccaatccgaagtcctgctgtccgcaatggaacttttccatatgactagtggtggagatgcagcgatgttccgtgatgggaaggagccacagcccagcgccgaagccgctgccgctccttccttagcgaacatctcctgctttactcagaaactagtggagaagctctactccggtatgttttcggcagacccccggcacattcttctgtttatcctggaacacattatggtggtgatagaaaccgcgagctctcaaagagatactgtactgtcaactctctactcttctctcaacaaagtcatcctctactgcctgagcaagcctcaacagtcactgagcgaatgtctgggtctgctgtcaattttaggatttctgcaagagcattgggatgtagtctttgccacatacaactccaacatcagcttcctcctgtgcctcatgcactgcctgctgttactcaatgaacgcagttaccccgagggatttggactggagcccaagccacggatgtcaacgtatcaccaagtttttctgtcacccaacgaagatgtgaaggagaagcgggaagacttacccagcctcagtgacgtgcaacacaatatccagaagacagtgcagaccctttggcagcagctggtcgctcagcgccagcaaacacttgaagatgccttcaagatcgacctgagcgtgaagcctggagaacgcgaagttaaaattgaagaagtgacgcccctgtgggaggagacgatgctgaaggcctggcagcactacctggcaagcgaaaagaagtctttggcatctagaagtaatgttgcgcaccatagtaaggtgaccctgtggagcggcagcctctcctccgccatgaagttgatgcccggtcggcaagcgaaggacccagagtgtaagaccgaggattttgtatcatgtattgaaaattacagaaggcgtggccaggaactgtatgcaagtctgtataaggatcacgtccagcgccgcaaatgcgggaacattaaggccgctaacgcctgggcacggattcaggagcagctctttggagagctcggactttggtcccagggcgaagaaaccaagccatgttccccttgggagctggattggagagagggtcctgcgcgcatgaggaagagaatcaagaggctgtcaccactggaggctctgtctagcggtcgacataaagagtcccaggacaaaaatgatcacatctcccagacaaatgccgaaaatcaggatgagttgaccttgcgagaggccgaaggggagccggacgaggtcggcgtagactgcactcagctaactttttttccggccctgcacgagagcttgcattcagaagacttccttgagttgtgtcgcgagcgccaggttattctgcaagagctgcttgataaagaaaaagtgactcagaaattctcattagtcattgtccagggccatttggtgagcgaaggtgtgctactcttcggtcaccagcacttctacatatgcgaaaattttacgctctctcccaccggtgatgtatactgtacccgtcattgtttaagcaatatatccgatcccttcatctttaatctttgctccaaggaccgctcaactgaccactactcgtgccagtgtcatagttatgccgatatgcgggaactcagacaggcacggtttctcctgcaggatatagccctcgagattttctttcataacggatattcgaagtttttagtgttctataataatgaccggtcaaaggcctttaagtccttctgtagcttccaaccgagccttaagggaaaagctactagcgaagacaccctgtccctgaggcggtatcccgggtccgatcgaatcatgctgcaaaagtggcagaagcgggacatttcaaactttgagtacctcatgtacctcaatacggctgccggacgaacatgtaacgactacatgcagtatccggtttttccttgggtgctggcagattatacctctgaaactttgaatcttgccaaccctaagatttttcgtgatctgagcaagccaatgggagcacaaacaaaagaaagaaagttgaaatttattcaacgctttaaagaggtcgaaaagactgaaggcgacatgactgtgcagtgtcactattacacccattactcaagtgccatcatcgtagcctcttatttggtgaggatgccaccattcacacaagccttttgtgcgttacaagggggtagcttcgacgtcgctgataggatgtttcatagcgttaagagtacatgggaatccgcctctcgcgagaacatgtcggatgtcagggagcttacacccgagtttttttatctgccagagttcctcactaactgcaatggcgtggaatttggttgtatgcaggacggtacagtgctcggtgacgttcagctcccgccatgggcagatggtgaccccagaaagtttattagcctccaccggaaggccttggaatccgatttcgtgtccgctaacctgcatcactggattgatctcattttcggttacaaacaacagggcccggcagccgtggacgcggtcaatatctttcacccatatttctacggtgaccggatggatctctcgtctatcaccgaccctctgattaagagtaccatcctcggctttgtttctaatttcggtcaggtccctaaacagctgttcaccaaaccccaccccgcccgtacagccgcaggaaaacccctgcctgggaaagacgtgagtacgccagtgtccctgcctgggcacccccaaccattcttctactcacttcaatccctcagaccatctcaggtcacggtaaaagatatgtacctcttctcacttggctcagagagcccaaaaggagccattggccacattgtgtcaacagagaagaccatccttgcggttgagcggaacaaggtactgcttcctccgctctggaaccgaaccttcagttggggcttcgacgacttctcgtgttgtttgggctcgtatggttccgataaagtgttgatgacattcgagaatctggctgcgtggggccggtgtctctgtgcagtgtgcccatctcctacaacgatagtgaccagtggcaccagtaccgtggtctgcgtgtgggagctgtcaatgacaaaaggtcggcccaggggactgcgcctacggcaggctctgtacggccacacccaagcagtgacatgtctggcggccagtgtcacattcagtttactggtctcaggctcacaggactgcacctgcatcctgtgggatttggatcacctgactcacgttactcggctgccagcgcatagagaaggaatatcggcgattaccatcagcgatgttagtggcaccatcgtgtcctgtgccggagcgcacttgtccctgtggaatgtaaatggccaacctctggcctccattaccactgcttgggggcccgagggtgcaattacatgttgttgtctcatggagggacctgcttgggacacgagtcagattataattaccgggagtcaggacgggatggtgcgcgtgtggaaaacagaggatgtcaaaatgtccgtaccaggtctccagatgggcaggaagcgggaggcggcagaggccctcgcgcagcagtgccaggcggaaggcggcagaggtgactggggcctttctagtgcctaccgcagaaatcctcaaggccttctgccccacagtagccaaggtagagcatcaggcaaccacagttctgcagcccagccgtccccgtggccaatgggactactgtag

SEQ ID NO: 206683 - DNA, 9555 bp, Artificial Sequence
  derived and/or modified sequence
atggaggccgaggacctgagcaaggccgaggaccggaacgaggacccagggtccaagaacgagggacagttagctgccgttcagcccgatgtgccacacggcggtcagtcctcatcaccaacagcattgtgggacatgctagaacggaagttcctggaataccaacagctaactcataagtcacctatcgagcggcagaagagcttactcagcctgctgcctctgtttcttaaagcgtgggagcattctgtcggcatcatttgctttccgtcattgcagcgactcgcagaagacgtctccgatcaattggctcagcaattgcaaaaggccttggttgggaagcctgccgaacaggccaggctggcagctggacagctgctctggtggaaaggcgacgtcgatcaggacggatatctccttctcaagtcagtttatgtactgacggggaccgacagcgagaccttgggacgcgtagctgagtcaggcttacctgctttgctgctgcagtgtctgtacctgttctttgtctttcctctggacaaagacgaactccttgagtcagacctccaggtgcagaagatgttcgtgcagatgttactgaacatatgctccgattcacagggcttggaggggcttttatccgggagcgagttgcagtctctgctcattgctactacttgtttgcgcgagcatagctgttgtttctggaaggagcccaccttttgtgtattacgggccatctctaaagctcagaacctctcaatcatccaatatctgcaggccactgactgtgttcgcctgtcccttcagaatttgtctagactgaccgatacattgcctgcaccagaagtgagcgaagctgtgtccctaatcctgggatttgtgaaggactcttaccccgtttcctcggctttatttctggaatttgaaaatagcgaaggttatcccctacttctgaaagtcctattgcggtatgacggactaacgcagtctgaggtagacccccaccttgaggaactcctcggcttagtcgtttggctgaccacatgcggcaggagcgagttgaaggtgtttgattcaattacctaccctcagctcgagggattcaaatttcatcatgaggctagcggggttacagtgaagaaccttcaggccttccaagttttgcagaatgtcttccataaggcctctgattccgtgctctgcatacaagtactctctgtgattaggacaatgtgggcctggaatgctcggaactttttcctcctcgaatggactttacagccaatttcccagtttgttgaaataatgcccctgaagcctgcgcctgtacaagagcacttctttcagctgttggaagccctggtgtttgagctccactacgtgccacacgagatactgcgcaaggttcagcatctcattaaagagtcccctggccccagctgtaccctgatggcgctgcagtctattctgtccatcgctgggggggatccattatttaccgacattttcagggacagtggcctgctaggactgctcctggcccagttgagaaagcaggcgaaaattatgcggaaatcgggcaataaagtctctacccccggagtgcaagaccctgagagagagctgacatgcgttatgctgcgcattgtggtcaccttgctgaagggaagcgtgcggaatgccgtcgtgctgaaggaccatggtatggttccattcataaaaatcttcctggacgacgagtgttacagagaagcgtccctgtctatccttgaacagctcagcgccattaacgccgaagagtacatgagtattatagttggggctctgtgtagtagcactcaaggcgaactgcagctaaagctagacctccttaagagcttgctgcgcattcttgtcaccccaaaggggagagctgctttcagggtcagctctggctttaacgggcttctgtccctgctgtccgatctggagggaagcctgcaggaaccccctctccaagcatggggcgcagtctcacctcgacaaactctggagctggtgctctacacactgtgtgcggtctctgctgccctccattgggatcctgttaacggatacttcttccgcaggaacggccttttcgagaagttagcggaggatctctgcttactgggttgttttggagctctggaagaggagggcaacctgttgagatcttgggtagataccaaagcccggccctttgccgacttgctgggaacagctttctctagtagtggcagtttacctccacgaattcagagctgtctgcagattctcggatttttggattctatggccagtggtaccctgcatcttcgcggagaccttaaagaaagcctgcgtacaaagcagggtcctgttgtggacgtgcagaagggggagacaggcagcgatcctcaacgtaattttaaacaatggccagacctggaggaacgcatggatgaaggagatgccgctatcatgcatcccggcgtggtttgtataatggttaggctattgccacggctatatcacgaagaccacccacagctgtctgaagagatacagtgtagcctggctagccacatccagagtctagtgaaatcagaaaagaatcggcaggtgatgtgtgaagcaggattattggggaccctaatggcgtcatgtcacagagcgctggttaccagtggctcaccactgcactcccgccttattaggatattcgagaagttggccagccaggccatcgaacccgacgtgctacgccagtttttgggattgggcataccctctagtctcagtgctactacgaaaatcctcgatagcagccacactcatcggggaaatcccggctgctctggcagccagacagcccaaggcctcgcagagggaccatggccagcagcccctgacgccggcttgcatccaggcgtaactcaagcaccccagcccctgggagagtcccaggactcgaccactgccttacagaccgcgcttagcctgataagtatgactagccctcgcaatctgcaaccccagcgggcagctctcgccccatcctttgtggaattcgatatgagcgtggagggttacgggtgtctgtttattcccactctcagcaccgtgatggggacatcgaccgagtacagcgtgtccggcgggattggaaccggggccacccggccgttcccacctcccgggggtcttaccttttcttgttggttcttgatcagtaggcacggagccgctaccgaaggccatcccctccggtttctgacactggtaagacatctggcaaggaccgagcagccttttgtatgtttctctgtgtcgctgtgtccagacgatttgtcattggtggtcagcaccgaggaaaaggagttccaacctttggacgtgatggagcccgaggacgattccgaaccctctgcaggttgtcaactgcaggtccgatgcggtcagctgctggcttgcggccagtggcaccacctcgcggtggtggtgacgaaggagatgaagcgacactgcaccgtctctacctgtctggacggccaggtgatagggtccgcaaagatgctctacattcaggcactgcctggcccctttctgtccatggacccaagcgcatttgtcgatgtctatggctatatagctaccccgagggtgtggaagcagaaatcgtctctgatttggcgcctagggccgacctacctctttgaagaagctatctcgatggagacgctcgaggttataaacaaactaggaccccgctattgtgggaacttccaagccgtgcacgtgcagggtgaagatctcgattccgaggccactcccttcgtggctgaagagagggtttcgttcggtctgcatatcgcctcatctagtattacctctgtggcagacattcgaaacgcctacaacgaagtggattctcgcctgatcgcaaaggaaatgaacatatccagccgcgataatgccatgccagttttccttctccggaattgcgctggacacctgtctgggtcacttcgtaccattggtgccgtggcagttggtcagctcggcgttagggtgttccactcttcaccagccgcctccagtctggatttcatcggaggaccagctattctgctggggttgatctcactggctactgatgatcatactatgtacgcagccgtgaaggtactgcacagcgtgttaacctccaacgctatgtgcgatttccttatgcagcacatatgcggctatcagatcatggccttcctgctgcggaagaaagcatcactgctcaatcaccggatctttcagctgattctctctgtggctggcacagtggagctcggctttaggtctagcgcaattaccaatacaggagtcttccagcatatcctctgtaactttgaactctggatgaacaccgccgataatttggagctaagtctgttcagccatctgctggagatactgcagtctccacgcgaaggtccacgaaatgccgaggcggcccatcaggcccagctcattccgaagctcatctttctatttaatgagccaagcttgattccctcgaaaatttccaccattatcgggatccttgcttgccaactgcgcggccatttttcaacacaggaccttttacgaataggcctgtttgtcgtctacacacttaaaccgagctctgtgaacgaaagacagatttgcatggacggagcgttggaccccagtctgcccgccgggtcacaaacttccggcaagaccatttggctgaggaatcagcttctggagatgctcctgagcgtcatttccagcccacagttacacctttctagtgaaagcaaggaggagatgttcctgaaattgggcccagattggtttttattgcttctgcaaggccacctgcacgcgtcaactaccgtcctggctctgaagcttctcctctacttcctggcttcccctagtctcaggactcgattcagagacggcctgtgcgccggctcttgggtggagagatccaccgaaggagtcgatatcgtgatggataacctaaaatcacagtccccactcccagaacaatctccatgcttgttgccggggtttcgggttctaaatgactttctcgctcatcatgtccatattcctgaggtgtatctgatcgtatccacttttttcctgcagaccccattgacggagctaatggacggacctaaggattccctagatgctatgctgcagtggttattgcagcggcaccatcaggaggaggtccttcaggcaggactgtgcaccgaaggcgctctgttactcctcgagatgctaaaggctacaatgagtcagccacttgctggatcagaggatggcgcctgggcccaaacttttcccgctagtgtattgcagttcctttcactggtgcataggacttatccccaggatccagcatggcgcgctcctgagttccttcagaccctggccatagcggcgttcccccttggggcacagaagggagtgggcgcagaaagtacaaggaacacctcctctcccgaggctgccgccgaaggagattctacggtggagggcttacaggctcccaccaaagctcatcctgcgcggcgtaaacttcgggagttcacccaactgttgctgcgagagctcctcctaggggcctcaagccctaaacaatggctgccccttgaagtgctcctggaggcatcgcctgatcatgcaacctctcagcagaaacgcgatttccagtcagaggtgttgctctccgccatggagctgtttcacatgacgtccggaggcgacgctgctatgtttcgggacggcaaagaacctcagccatcagccgaggcggcagccgcaccatcccttgcaaatatcagttgctttacacaaaagctcgttgagaagctgtatagcggtatgttttcggctgatccgcgacatatcctgttgtttattcttgagcacattatggttgtgattgaaaccgcaagttcacagcgggacacggtgttgagcaccctgtatagctcactgaacaaagtcatcttgtactgtctgagcaagccccagcaatctttgtcggagtgtctgggcctcctctcaatcttgggctttctgcaagagcattgggacgtcgtgttcgctacttacaatagcaatatctcgttcttattgtgcctcatgcactgtctccttctgcttaacgagcggtcttatcccgagggatttggccttgagcctaagcctcgcatgtcaacttatcaccaagtgttcctgagtccaaatgaggatgtgaaggagaaaagagaagacctgcccagcttgtcagatgtccaacataatattcagaaaactgtccagaccttgtggcagcagttggtggcgcaaagacagcaaacactcgaagacgccttcaaaatcgatctttcagtcaagccaggcgagcgagaggtgaaaatcgaggaagtaacacctttgtgggaagagaccatgctcaaggcatggcaacactatctcgccagtgaaaagaagagcctggctagtagaagcaacgtcgcccatcatagcaaagtcacactgtggagtgggtctctgtcatccgccatgaaactgatgcctggacgacaggcaaaggatccagagtgtaagacagaggactttgtgtcttgtatcgagaattaccgccgaagggggcaggagttgtacgctagcctgtataaagaccatgttcagcgtcgcaaatgcggcaacataaaggcagctaacgcctgggcgcggattcaggaacagctcttcggggagctgggtttgtggtctcaaggagaggagactaaaccttgctctccctgggagctcgattggcgcgagggccccgccagaatgcgcaaaaggatcaaaaggctgagtccactcgaggcactctcatctgggcggcacaaagaatcccaagacaagaacgatcacatctcccaaaccaatgctgagaatcaagacgagcttacccttcgggaagcagaaggggagcccgacgaggtcggcgtcgattgcactcaactgaccttcttccccgcattacacgaaagcctgcacagtgaggatttccttgagttatgcagggagcggcaggtgattcttcaggaacttctggacaaggagaaagtgacgcagaaattctctttagtgattgtgcaggggcatcttgtttctgagggtgtgctgctcttcggccaccagcatttttacatttgtgaaaactttacactgtctcctacgggagacgtgtattgcactcggcactgtctttcaaatattagcgacccatttattttcaacctatgtagcaaggatcgctctacagatcactattcttgccaatgccactcttacgccgatatgagagaactgcggcaggctcgcttcctcttgcaggatattgccctagaaattttcttccataatggatacagtaaatttcttgtgttctacaataatgacagatcaaaagcattcaagtccttttgctcattccagccctcattgaaaggcaaggcaacttctgaggatactctgagcctgcggaggtatccggggtcggaccggattatgctgcaaaaatggcagaagcgggacatttcaaattttgaatacctgatgtacctcaatacagccgctggcaggacctgcaacgactatatgcagtaccccgtgttcccttgggttttggcagactatacaagcgaaaccttaaacctggctaacccgaagatcttccgggacctgtctaaacctatgggagcccagacgaaagagaggaagctcaaattcatccaacgctttaaggaggtggaaaaaaccgagggggacatgacggtccagtgccactactacacccactactcatccgccatcatcgtggcatcctacctcgtgcggatgccgccattcacccaggccttctgtgcactacaaggtgggtcattcgatgtggccgatcggatgttccattccgttaagagcacttgggagtctgcttcccgcgagaacatgtccgacgtgagagagttgacacctgaatttttctacctgcccgagttcctgactaattgtaatggggtcgaattcggatgtatgcaggatggcacggtgttaggcgacgtgcaacttccaccatgggccgatggcgacccccggaaatttatttctctgcacagaaaagccttggaaagcgatttcgtttctgctaacctgcaccactggattgatctgatatttgggtacaaacaacaagggccagccgctgtagatgcggtgaacatctttcatccctacttctatggagacaggatggaccttagctccattaccgaccccctgatcaagtcaacaatcttaggcttcgtgagcaatttcggccaggtgcctaaacagcttttcaccaagccccatcccgcaaggactgctgccgggaagccgcttcccggcaaagacgtctccacccctgtctctctaccaggacaccctcagccattcttctacagcctccagtccctacgtcctagccaggtaactgttaaggatatgtacttgttttccctcggaagcgaatctccaaagggggccatcggtcatatcgtgtctacagagaagacgatactggctgtggaacgcaataaggtgctcctgccaccattgtggaaccggacattttcctggggatttgacgatttctcgtgttgtctcggctcatatggttccgacaaagtgctgatgacattcgaaaatctggccgcgtggggccggtgtctatgtgctgtctgcccgtctccaaccacaattgttacctccggaacctctacagttgtttgcgtgtgggagctgtctatgacgaagggccgcccaagaggcttgagacttaggcaggccttatacggtcacacgcaggccgtgacctgcctggctgcttccgtaacctttagcctcctggtgtcgggaagccaagactgtacatgtatcctgtgggacctcgaccatctgacacacgtgactaggctgcctgcccaccgcgagggcatctcagccattactattagtgacgtctccgggactatagtgtcttgcgctggcgcccacctgagtctttggaatgtgaatggccagccattagccagcatcactacagcatggggacccgagggagctatcacatgttgctgtttgatggaggggcccgcatgggatacaagtcagataattattaccggcagtcaagacgggatggtgcgggtgtggaagacagaggatgttaagatgtccgtaccgggacgcccagctggggaggagccgccagctcagcctccatcccctagaggccacaaatgggaaaagaacttggccctttcccgagagcttgacgtgtctattgctctgactggaaaaccaagtaagacttctcctgctgttaccgccctagccgtgtctagaaaccacaccaagctgctggttggagatgaacgcggcagaatcttttgctggagtgcagatggttag

SEQ ID NO: 206684 - DNA, 1965 bp, Artificial Sequence
  derived and/or modified sequence
atggaggccgaggacctgagcaaggccgaggaccggaacgaggacccaggaagtaaaaacgaaggccagctagcagccgtccaaccggacgtgcctcacggtggccagagcagtagtccgaccgctctctgggacatgctcgaacgaaagtttcttgaatatcagcagcttacccacaagagccccattgaacgccaaaaatcactgctgagcctgctccccttgttcctgaaagcctgggaacactctgtggggattatttgcttcccatcactgcagcggttggccgaggacgtctccgaccagctggctcaacagctgcaaaaagctcttgtagggaagccagcagagcaggccagactggccgcaggccagcttctctggtggaagggtgatgtagaccaagacggctaccttctccttaagtcagtgtatgtgctcaccggtactgactccgagactctcggtcgcgttgctgagagtggcctccctgctttgcttctccagtgcttgtacctgttttttgtcttccccttagacaaggatgaactcctggaaagcgacctccaagtccagaagatgtttgtgcagatgctgttgaacatttgctctgacagccaaggcctcgagggtctactgtccggttccgaactgcagtcacttctcattgctacaacctgtctcagagaacactcctgctgtttctggaaagagcccacattctgcgtactccgggccatctccaaggcccaaaacctgagtattattcaatacctccaagcaacggactgcgtgaggttatcactccagaatttgagccggctcacagacaccctgcccgcgcctgaagtgtccgaagcagtctcgttaatcctgggattcgtgaaggattcttatcctgtcagttcagcccttttcttggaattcgagaattctgaaggttatccactattgctgaaggtcctgctgcgctacgacggccttacccagagcgaggtcgacccccatctggaagaattgctaggcttggttgtgtggttgaccacatgcggccgctctgaactgaaagtgttcgactccatcacctacccccagctggagggattcaagtttcatcacgaggccagcggcgtgaccgttaaaaatttacaagcttttcaagtccttcaaaacgtcttccataaagcttctgattcagtgttgtgtattcaggtcctatctgtgattagaacaatgtgggcgtggaacgctaggaattttttcctgttagagtggacgctgcaacccatttcccagtttgtcgaaattatgccactcaagccagcacctgtgcaggagcacttcttccagctgctggaagccttagtgttcgaactgcactacgtcccacacgagattctccgaaaagtgcagcatcttatcaaggagtctcccggacccagttgcacactgatggccctgcaatcaattctgagcatagcaggcggtgacccattgttcacagacatcttccgcgatagcggtctgcttgggctgctgttagcccaactcagaaaacaggcaaaaatcatgaggaaatccggaaacaaggtgagtactcccggcgtccaagatccagagagggagctgacatgtgtaatgctgcgcatagtcgttaccctcctgaaaggttccgtgcgaaacgcggttgtgttgaaggatcacggaatggtaccattcattaagatcttcttagatgacgagtgttatcgggaggcctctcttagtattttggaacagctgtctgctattaacgctgaagaatacatgagcataatcgtgggagctctgtgcagtagcacacaaggagaacttcaactgaaacttgacctgttaaaagtaatcagcagccctcccctgcggctcgcatccttgtggatatgcaccaagaggtctacttttgcccaggctttcgtatttatgtag

SEQ ID NO: 206685 - DNA, 3129 bp, Artificial Sequence
  derived and/or modified sequence
atggaggccgaggacctgagcaaggccgaggaccggaacgaggaccctggttccaagaacgagggtcagttggccgctgttcagcccgacgtccctcatggtggacagtcttcaagcccaaccgcattgtgggacatgctggagcgcaaattcttagaatatcagcaactaacgcataaatcacctatcgagcgccagaaatcgctgctcagcttactcccccttttccttaaggcatgggaacactcggtcgggatcatatgtttcccctcactacagagactggccgaggacgtaagtgatcaattggctcagcagctgcagaaggctctggtcggaaagcctgccgagcaggctaggcttgcagcaggccagctgctctggtggaagggcgacgtcgatcaggacggctacctgcttttgaagtcagtttacgttctcaccggcacagactcagaaacactgggtagggtggcggagtctgggttacccgccctgctgttgcagtgcctctatctgttcttcgtattcccccttgataaggatgaactactggaaagcgatttacaggtgcaaaagatgtttgttcagatgctgttaaacatatgctcggactcccagggattagaaggactgttgtctggaagtgagcttcagagtctgctgatagcgaccacatgcctgcgagagcactcctgctgcttctggaaagaaccaacattctgtgtactacgagccattagcaaagctcagaacctgagtatcatccagtatttacaagcaaccgattgtgtcagactgagcctgcaaaacctatcaagactcactgacactctgcctgccccagaggtaagtgaggcagtcagcctcatcctgggtttcgtgaaggattcatatcctgtgtcaagcgcactgtttctcgaatttgaaaattcggaaggatatcctttactgttaaaagttcttctcagatacgatggcttaacccagtccgaggttgacccacacctggaggagcttctgggactggtcgtctggttaacaacttgcggacggagtgagcttaaggtatttgatagtattacatacccacagctcgagggctttaaattccaccacgaggcgtccggagttacagtgaagaacctacaggcattccaggtgctgcagaatgtgttccataaggcaagcgactcagtcctgtgtatccaggtgctgagtgtgataaggaccatgtgggcgtggaatgctaggaatttttttctactggagtggaccctgcagcccatcagccaatttgtggaaataatgcccctgaagccggccccagttcaggagcattttttccagctgctggaggccctggtcttcgagctgcattacgtgccgcatgaaatcttgcgaaaggtacagcacttaattaaagagtccccaggaccttcatgtacgctgatggccttacagagcatcctgtctatcgccggtggcgacccactgtttactgacatctttcgagattctgggctgttagggctacttctggctcaacttagaaagcaggctaagattatgcgaaagagcggcaacaaggttagtacaccaggtgtgcaggatccagaacgcgaactgacgtgcgtcatgctgcgaattgtggtgacactgctgaagggctcagtgcgcaacgccgtcgtcttgaaggatcacggcatggtcccgtttattaagatcttcttggacgacgagtgttacagagaagctagcctaagcatcctggaacagttgtccgctattaacgcggaggaatacatgagcattatagtgggagctctctgttcttccacgcaaggagaattgcagctgaagctcgacctgctcaagagtctactgagaatccttgtgacccccaaaggcagggccgccttcagagtgagcagcggctttaatggactgttgagtcttctaagtgacctggagggttccctccaggagcctccactccaggcttggggggctgtgtctccgaggcagacactagagctggttttgtatacactgtgtgccgttagcgccgcactccattgggaccctgtgaatggctacttctttaggaggaatgggctgttcgaaaagctcgccgaggatctctgcctgttaggctgctttggtgccctagaggaggagggcaacctgctgagaagttgggttgatacaaaggcacggccatttgccgatcttttgggcaccgcctttagctcatctgggtcccttcctccaagaattcaaagctgtttgcagattctcggctttctggactcaatggcatctggaacactacacctccgcggtgacctcaaggagagcctccggacaaagcaaggcccagtcgtggacgtgcaaaaaggcgagacagggagcgaccctcagcgcaacttcaagcagtggcccgacctcgaagaacgtatggatgagggcgacgccgccataatgcacccaggcgtggtttgcatcatggtccggctgctgcctagactgtaccacgaagatcatccacagttgagcgaggaaatccaatgttccctggcctcacacatacagagcctggtgaaatccgagaaaaacagacaggtcatgtgcgaggcaggcctcctcgggacgctgatggccagctgccaccgagccctggtgacttctggcagccctcttcattctcgattaatcagaatctttgagaagcttgcaagccaggcgatcgagcccgacgtgctgcgccagttcctcggcctggggatcccttcttccctgtccgcaactactaaaattcttgattcatcacacacacatcgcggcaatcctggctgttcgggaagccagactgctcagggtctcgctgaggggccatggcccgcagctcctgacgcagggctgcaccccggagtaacccaggcacctcagcccttgggcgagagccaagactccaccactgctctccaaaccgccttgagcctcatatccatgaccagtcctcatatttggaaacccaacatttggaaagacaatctcgctcagaagcccgtggccggcgatgcagctcagtgcaatatcttcccaccggcctcatcggtgctgtag

SEQ ID NO: 206686 - DNA, 9531 bp, Artificial Sequence
  derived and/or modified sequence
atggaggccgaggacctgagcaaggccgaggaccggaacgaggacccaggctccaagaatgagggccagctcgcggccgtacagcctgatgttcctcatggtggacaatccagcagccctaccgcactctgggatatgctggaacggaaattcctcgagtaccagcagctcacacataagtcccctatagaaagacagaaatctttgttgagcctgcttcccctgtttcttaaagcatgggagcactctgtgggaatcatttgctttccgtctcttcagaggctagcagaggatgtctcagatcagctggcccaacagctccagaaggcactcgtcggaaagcccgctgaacaagcgcgcttggccgcgggtcaactcctctggtggaagggagacgtggaccaggacggatacttgctgctgaagagcgtgtatgtcctcacaggtacagactctgaaaccctaggccgggtggctgagtctgggttgcctgccttgttactgcagtgtttgtatctttttttcgtcttccctctcgataaggacgaattgctggagtccgacctgcaagtccaaaagatgtttgtgcagatgctgctcaacatttgttccgatagtcaaggtctggaaggcctactcagtggctccgagctacagtcgctcctcatcgctacaacctgtctgcgggagcattcctgctgtttctggaaggagcccacgttctgcgtgctgagggccatttctaaagcacagaatctgagcattatccaatacttacaggctacggactgcgtgcggttgagcctccagaacttatcgagactgaccgacactctgccagcgcccgaggtgagcgaagccgtttctctgatattgggcttcgtgaaggacagctaccccgtctcctctgccctgttcctggaatttgaaaactccgagggctaccccctcctactaaaggtgctgttgaggtacgacgggctgacccagtcagaggttgatccacacctcgaggagctgttgggactcgtggtgtggctgactacttgtgggcgctcagaactgaaagttttcgattcaatcacttacccccaactggagggctttaaatttcaccatgaggcgtccggggttaccgtgaaaaatttgcaggccttccaggtgctgcaaaacgtgtttcataaagctagtgactccgttctttgcattcaggtgctgtccgtgattcggacaatgtgggcatggaacgctaggaacttcttcctgctggagtggactctgcaaccaatttcccagttcgtggagatcatgcctctgaaacccgccccagtccaggaacatttctttcaattgctggaagccctggtatttgagctgcattatgtcccacatgagatcttgcggaaagttcagcacctaattaaggagagccctggtcccagttgtactcttatggccctgcagtctattctctccatcgctgggggagatccactctttaccgatatttttagagattctgggctcttgggactgcttctggcccaactgaggaaacaggccaagattatgcgcaagagcggcaataaggtttccacccccggagtacaggatccagagcgggaactgacatgcgttatgctgcgtattgtagtcacccttctgaaggggagtgtccgtaatgccgtcgttcttaaagaccatggaatggtgcctttcatcaaaatctttctcgacgatgagtgctatcgagaggcctctctctccattctcgaacaactcagcgcaatcaatgcggaggagtacatgtccattattgtcggagccctatgcagctcaacacagggggagttgcagctgaagctcgatctgctgaaaagcttgcttcgcatcctcgtcacccctaaagggagagcggcctttagggtgtcttctggatttaatggtctgctttccctgctgtccgacctggaaggctcgctgcaggagccaccactgcaagcctggggagcagtgagtcccaggcagacacttgagcttgtgttatataccctctgcgccgtgagtgctgcgctgcactgggatcccgtgaacggttattttttcagacgcaacggcctcttcgaaaaactggccgaggatctttgtctgctaggctgtttcggtgccctggaagaagaaggcaacttgctgagatcatgggtggatactaaagcacggccttttgctgacttgttagggaccgcattcagcagctctggaagtctgccacctcgcattcagagctgtttgcaaatactcgggtttttagacagcatggcatcaggaaccctccaccttcgaggcgacttgaaagaatccctgagaacaaagcagggtcctgtagtggacgtacagaagggggagacgggaagcgatccacaaaggaatttcaaacagtggcctgacctcgaggaaaggatggacgagggcgatgcagcaataatgcatcctggtgtcgtgtgcataatggtcaggttattgccccgcctgtatcacgaggaccatccgcaactgtctgaagaaatccagtgctcccttgcatctcatattcagtcccttgttaagagcgaaaaaaatcgacaggtcatgtgcgaagcaggtcttctgggcacgctgatggcttcttgtcacagggcactggtgacaagcggctctcccctacattcacgcctcattcgcatcttcgaaaagctcgctagccaggccatcgagcctgatgtactccggcagtttctcgggctgggcattccaagctctcttagtgccacaacaaagatcctcgactcatcacacactcaccggggtaatcccggatgctctggatcccaaaccgctcagggccttgctgaaggtccatggccggcggcccccgacgctgggctccatccgggggtgactcaggcccctcagcctctcggagaatcccaagacagcactaccgccctccaaacggccctcagcctgatctctatgacatcgcctaggaatctgcaaccacagcgagccgctctggctccatcctttgtggaattcgacatgtcagttgaaggttacggctgtctattcattcctacattaagcaccgtgatgggcacaagtaccgagtactctgtgagcggtgggatcgggaccggggcgacccgtcccttccctcccccaggaggcctaacgttctcgtgttggttcctgatttcccgccacggggctgcgactgagggacacccactgcgcttcctgaccctagttcgccatttagccaggactgagcagccctttgtctgtttttctgtcagcctgtgtccagacgacctgagtctggtggtttctacggaagaaaaggaatttcagccactcgatgtcatggaacctgaagacgatagcgaaccctccgcaggctgccagctccaggtgcggtgtggccaacttctcgcctgcggccagtggcaccatctcgccgtggttgtcacgaaagaaatgaagcgacactgcaccgtgtctacctgcttggacgggcaagtgattggttctgcaaaaatgctgtacatccaagccctgcccgggcccttcctctccatggatccttctgccttcgtggatgtgtatggttatatagctactccccgcgtgtggaagcagaagtcctctctcatttggcgcctgggaccgacttacttgtttgaagaggctatatctatggagacattggaggtgatcaacaagctcgggccacgctactgcgggaatttccaggccgtgcatgtgcagggtgaggatctcgattcggaggcaaccccttttgtagccgaggaacgagtgtcctttggccttcacatagcatcgtccagcattacctccgtggccgacatcaggaacgcatacaacgaggtggatagcaggctgatcgcaaaggaaatgaatatcagttccagagataatgcgatgcccgtcttcctgcttcgcaattgcgccggccacctctcagggtccctgcgcaccatcggcgctgtcgctgtgggccagctaggagtaagggtcttccactcatcccctgcagcaagctcgctggactttatcgggggtccggcgatcctgctcggattaataagtctggctaccgatgaccatacgatgtacgccgcagtgaaagtcctccacagcgttctaacgtccaatgctatgtgcgactttcttatgcagcatatatgcggctatcagataatggcatttcttttaaggaagaaggcctcgctgctgaaccaccgtatctttcaactaatcctgtccgtggccggaactgttgaactcggcttccgaagtagcgccattacaaacacaggagtcttccagcatatcctttgtaacttcgagctgtggatgaacacagccgataatctcgagttgtccttgttctcacatctcctggagatactccagagcccgcgcgagggacccagaaatgcagaggctgcacaccaggcccagctgatcccaaaacttatttttctgttcaacgagccctctctgataccaagcaaaatttcaacaatcatcgggatcttggcttgtcagctgcgcggtcatttctcaacgcaagatctcctgcgtattggcctgtttgttgtttatactctgaagccatcttctgtgaacgagagacaaatttgcatggacggtgccctggatccctcgttaccggctggcagccagacaagcggaaaaaccatctggctgaggaaccaactactggaaatgcttttgtccgtgatctcttcacctcagttgcacctgagcagtgagagcaaagaggagatgtttctcaagctgggccctgactggttccttctcctccttcagggccacctgcacgcaagcactactgtccttgccttaaagctgttgctgtacttcctcgctagtcctagtttgcgcacccgctttagagatgggctatgcgctggatcctgggtcgagaggagcacggaaggtgtcgacattgtcatggacaatctgaaatcccaatcacctctgcctgagcaaagcccttgtctgctcccaggttttagagttctgaacgattttctcgctcatcacgtgcatattcctgaggtatatctcatcgtcagcacatttttcttacaaacacccctgacagaactgatggatggcccgaaggattctctggatgctatgcttcaatggctgcttcaacgccatcatcaggaagaagtgctacaggccgggttgtgcaccgagggcgctctccttctcctggaaatgctgaaggctaccatgagccagcctttggctggatcagaagacggcgcttgggcacaaaccttccccgccagcgtgctccagtttttaagtcttgtgcaccggacttaccctcaggaccctgcctggagagcacccgagttcctccagacgttagctattgctgcatttcccctcggtgcccagaagggcgtcggcgccgaatccaccagaaacacttcgtccccggaggcagctgccgagggagattcaaccgtagagggattacaggccccgaccaaggcacatcccgccaggaggaagctacgtgagtttacccagctgctcctcagggagctgctcctcggcgcgtcttcccccaagcagtggctgcctctggaagtgttactggaagcttcgcctgaccatgccacaagtcagcagaagcgggacttccagtccgaggttctgctgtccgccatggaactgttccacatgacatccggtggagatgctgctatgtttagagacggcaaggagccccagccctccgctgaagctgcggccgctccttcgctcgccaatatctcatgtttcactcagaagctcgtcgagaaattatacagtgggatgttctcggccgaccctcgccacattcttctcttcattctggaacatatcatggtggtgattgaaacagccagcagtcaaagagacactgtcttatctactctgtacagcagccttaataaagtaatcttatactgtctaagcaagcctcagcagtcactgagcgagtgcctcggccttcttagcattcttggtttcttgcaggagcactgggatgtggtcttcgccacctataacagcaacatatcgtttctgctgtgcctcatgcactgtctgctgctcctgaatgagaggtcttaccctgagggcttcggtcttgagcccaagccgcgcatgtcaacataccaccaggtgtttttgagcccaaatgaagacgtgaaagaaaaacgcgaggacttaccgagcttgtcagatgtgcaacataacatccagaagactgtgcagaccctctggcaacagctggtggcccaaagacagcagacgctcgaggacgcctttaagattgatctttccgtgaagccaggcgagcgggaggtcaagatcgaagaggtgacaccgctgtgggaggaaacaatgctaaaagcatggcagcactacctggcctctgagaaaaagtctctggcatctagatctaacgtcgcccatcatagcaaggttactctgtggtccggctccctttcctctgcgatgaagctgatgcccggccggcaagcgaaagaccctgaatgtaaaactgaggactttgtcagttgtattgagaactacagaaggcgggggcaggaactgtatgcctccctatacaaagatcacgtgcagcgacggaaatgcggcaacatcaaagccgccaatgcctgggcacgcatccaagaacagctttttggggaactgggactgtggagtcagggcgaagagaccaagccttgcagcccctgggagcttgactggcgggaaggccctgcacggatgcgtaagagaatcaaacgtctcagtcctttggaggctctatccagcggtcgacacaaagagtctcaagacaaaaatgatcacatctcccagacaaatgcagagaaccaagacgagctgacattgcgggaggccgagggcgaaccagacgaggtaggggtggactgtacccaactcaccttttttccggccctccacgaaagcttgcactccgaggactttctcgagctgtgccgggaaagacaggtgatcctacaagagctcctagacaaggagaaagtgacccagaagttttccctagtcattgttcagggccacttagtcagtgaaggggttctcctgtttggccaccagcacttttacatatgcgagaactttactttgagtcccacgggagatgtgtactgcacacggcactgtctgagtaatatttccgacccgttcatctttaacctatgttcaaaggacaggtctacagatcattattcctgccagtgccattcctacgcagatatgcgcgagcttagacaagcccgtttccttttacaggatatagctttagagatatttttccacaacggatatagcaagtttctcgtattttataacaatgaccggtccaaggcattcaagtctttttgtagcttccagccgtccctgaaaggcaaagccacttccgaggacacgctgtctctgagacgctatccaggatctgataggatcatgctgcagaagtggcagaagcgcgatatctcaaattttgaatacctaatgtatctgaacaccgccgctgggcggacctgcaacgattacatgcagtacccagtcttcccttgggtgctggctgactacacttccgagactctgaatctggcaaatccaaaaatatttcgcgatctgtcgaaacctatgggtgcccaaactaaagaaaggaagttaaagttcatacagagatttaaagaggttgagaaaactgagggggacatgactgttcaatgtcactactatacgcactacagctccgctattattgtcgctagctacctggtgcgcatgccaccattcacccaggctttttgtgcactccagggcggctcgttcgacgtcgctgaccggatgtttcattctgtcaaaagcacgtgggagtctgcctcgagggaaaatatgtcagatgtcagggagctgacccctgaattcttctatctgccagagttcctgacaaactgcaacggagtagagttcggatgcatgcaggatggcacagtccttggcgacgtacagctccccccgtgggcggacggtgatccaagaaagttcatctccctgcatagaaaagcattggagtccgattttgtttcagccaatctgcaccattggatagacctcattttcggttataaacagcaaggtcctgccgccgttgacgcagtaaacatctttcacccctacttttacggggatagaatggatttgagcagcatcaccgaccctctgataaaatccaccatacttggcttcgttagtaatttcggtcaagtgccaaaacagttatttaccaaaccccatcccgctaggaccgcagcagggaagcctctccccggcaaggacgtgtccacccccgtaagcttgcccggccatcctcaaccttttttttacagcctgcagtctctgaggccaagccaggttacagtgaaggatatgtatctgttctctctgggtagtgagagccccaagggagcgatcggtcatatcgtttccaccgaaaagaccatcctggcagtggagagaaataaggttcttctccctccactatggaataggaccttcagctgggggtttgatgatttcagctgctgcctgggcagctatggaagtgataaggtattgatgacttttgagaacctggccgcctgggggcggtgcctctgtgctgtgtgtccgtcgccgacaacaattgtgacttccggtacctcaacggtagtgtgtgtgtgggagctatccatgaccaaagggcggccacggggcctgcggctgcgacaggctctgtacgggcatacacaggcagtgacatgcctggccgctagcgttacattctcccttcttgtgtccggctcccaggattgtacttgtatactttgggacctggaccacctgacccacgtcacaaggctgcccgcacatcgagagggcatcagcgcgatcaccattagcgatgtctccgggactatcgtgtcatgcgccggcgctcatcttagcctatggaacgtgaatggacaaccgcttgccagcattaccacagcatggggcccagagggagccattacgtgctgctgtctaatggaaggcccggcttgggatacatctcagatcatcataacaggttcgcaggacgggatggttagagtttggaaaacagaggatgtaaaaatgagtgtgcctgggctgcaaatgggtagaaagcgcgaggccgcggaggcattggcccagcaatgtcaagctgagggcggccgcggggactggggactctcttctgcttaccggaggaacccccaaggcctcttgcctcacagttcccaaggccgcgcgtctggaaaccattcttccgccgcacaaccgagtccttggcccatgggattgctatag

SEQ ID NO: 206687 - DNA, 1875 bp, Artificial Sequence
  derived and/or modified sequence
atgctgcagaagtggcagaagcgggacatcagcaacttcgagtacctcatgtacctgaacacagccgccggcagaacttgcaatgattatatgcagtacccagtgtttccctgggtcctggcagattacacatctgaaacacttaatctcgctaaccccaaaatcttccgggacctctctaagccaatgggagctcagacaaaagagcgtaaattgaagttcattcagcgattcaaagaagtggaaaagacggagggggatatgacagtgcagtgtcactattatactcactattcatctgccataatcgtggctagctacttagtgagaatgcccccttttactcaggccttctgtgcactgcagggaggctcctttgacgtggctgataggatgtttcactcggtgaaatctacgtgggagtccgcctccagagagaatatgtcagatgtcagggagctcacgcctgagttcttttaccttcccgagttcctgaccaactgcaacggtgttgagtttgggtgcatgcaggatggcaccgtcctgggcgatgtccagcttcctccatgggcagatggcgaccctcgcaagttcatctccctgcacaggaaagccctggagtcggattttgtgagcgcaaatttgcaccattggatcgacctcattttcgggtacaaacaacagggccccgccgccgtagacgcagtcaatatttttcacccatatttttacggggatcggatggatcttagctccatcactgacccactgatcaaatctacaatcctggggtttgtcagtaattttggccaagtccctaagcagttgttcactaagccccatcctgcccgcacagccgcagggaagcctcttcccggaaaggatgtctccaccccggtctcattacctggccacccgcagccctttttctatagtctgcagagcctgcgcccgtcgcaggtgaccgtgaaggatatgtatttgttctccctgggctccgaaagccctaaaggagccataggccatatcgtttctacagaaaaaaccatccttgcagttgagcgcaataaagtcctactgccccccctgtggaatcgcaccttttcctggggattcgacgatttctcatgctgcctgggctcctacgggtcagataaagtgctgatgacttttgagaacctagccgcatgggggagatgtctatgcgcagtgtgcccatcgccgacgaccatcgtgacttctggcacctcaaccgtggtctgcgtgtgggaactttcaatgacaaaagggaggcctaggggcttacgactccggcaggcactctatgggcacacccaggccgtaacgtgtctggctgcaagcgtaactttcagcctactagtatccggatcccaggactgtacatgcatcctctgggatctggaccatcttacccatgtcacacggctgcctgcccatagagagggtatctccgcgattacaatctccgacgtctctggcactatcgtgtcttgcgccggagcccacctgagcctgtggaacgttaacgggcagccactggcatcaataaccacagcttgggggcccgagggggcgataacatgttgttgtctgatggaggggccagcctgggacacatctcagatcatcatcacaggcagtcaagatggcatggtccgggtctggaagaccgaggacgtaaaaatgtccgtcccgggaaggccagccggagaggagccacctgcccaacctccaactctctctatggcagatggcacatcaatgaagcgaatgtccacacatacccggagagcagagcagcacgccggaaactgtgaccttgtgatgccctcctgcacacgaaactatacatag

SEQ ID NO: 206688 - DNA, 3816 bp, Artificial Sequence
  derived and/or modified sequence
taaagagactttcagagcgaggtgctccttagtgcgatggaattgtttcatatgacatccggaggcgatgctgccatgttccgagatggtaaggaacctcaaccatctgccgaggcggcagcagccccttcattggccaacataagttgttttacacagaagcttgtagagaaactctatagcggtatgttcagcgcggaccctagacacattttgttatttatcctagaacacataatggtggtgattgaaactgccagctcccaaagggacacagtgctcagcactctgtacagctccctcaataaggtgatcttgtactgtctgtctaagccccagcagtccctctccgagtgtttggggctgctgtctatccttggttttcttcaggagcattgggacgtggttttcgccacttataattccaacatcagctttctactgtgtttaatgcattgtctgctcctcctgaatgaacgcagttatccggagggtttcggactggaacccaagccccgaatgtctacctaccatcaagtattcctgagccccaatgaggacgttaaggagaagcgcgaagacctgccctccctaagcgacgttcagcacaacatccagaagacagtacaaaccttgtggcaacaactggtggcgcagagacaacagacactggaggatgcttttaaaatcgatctctcggtaaaacctggcgagagagaggtgaaaatcgaagaggtgacacctctgtgggaggaaacgatgttgaaagcctggcaacattacctggcttcggaaaagaaaagcctggcctcccggtccaatgtggcccatcatagtaaggtaaccctctggtctggctccctttcaagcgcaatgaaactgatgcccggtagacaggctaaggaccctgagtgcaagaccgaggattttgtttcatgcattgagaactacagaagaaggggacaggaactctatgcctctctgtataaggaccacgtccagagacgcaagtgcggaaacatcaaggccgcaaacgcctgggctcgtatccaggagcaactgttcggggagcttgggttgtggtcacagggcgaagagacaaagccatgctctccctgggaattggactggagggaaggcccagcacgcatgcgcaagcgcattaaacgccttagccccttggaagcactgagctctggcagacataaagaatctcaggacaaaaatgaccatatctcccaaactaacgccgaaaaccaggacgagctgactctgagggaggccgagggtgaaccggacgaggtcggtgtggactgcacacagttaacctttttccccgcactgcacgaatcccttcattcggaagattttctcgaactgtgcagggaacgccaggtaattttgcaggaactcctggataaggagaaggtgacacagaagttctcactcgttattgtccagggacaccttgtctccgagggggttctgctctttggtcaccaacatttctatatctgcgagaactttactttgagtcctactggagacgtgtattgtactcggcattgcctgtccaacattagtgaccctttcatttttaacctgtgttcaaaggataggagcactgatcattactcctgtcagtgccactcatacgcggacatgagggagctgcgacaagctaggttcctgcttcaagacatcgccctcgagattttcttccacaatggctattccaagttcttggtattctataacaacgatcggagcaaagcattcaagtctttttgctccttccagcctagcctcaagggaaaagctacctctgaggacaccctctcactccgcagatatcccggttcagatagaattatgctgcagaaatggcaaaagcgtgatatcagtaatttcgaatatttaatgtatctgaacacagccgctgggcgtacctgcaatgattacatgcaatacccagtgtttccatgggtgctggccgattatacgagcgagacacttaacctggctaatcccaaaatctttagagacctgagtaagcctatgggtgcccagacgaaggagcgaaagctcaaattcattcagcggttcaaagaggttgagaaaacagagggagatatgaccgttcagtgccactactacacacactacagttctgcaattatagtggcatcctacctggtgcgaatgcccccttttactcaggcattctgcgccttgcagggagggtcattcgatgtcgcggacaggatgttccactctgtcaagtcaacgtgggaatcagcctcacgagagaacatgtcagacgtgagggaacttacccccgaattcttctatctgccagagtttctgactaattgcaacggggttgagtttggctgtatgcaggacgggactgtgctgggagatgtgcagttacccccatgggcagatggggaccccagaaaatttatttctctacatagaaaagccctggagtcagattttgttagcgcaaatctgcatcactggatagatcttatctttggttataagcagcagggccctgccgcagtcgatgcggtcaacatcttccacccgtacttctatggagacagaatggaccttagctctattaccgaccctcttattaagagcactatcctcggctttgtatcaaatttcggccaagtgcccaaacagttatttaccaaacctcatccagctaggacggctgccggtaagcctctccctgggaaagacgtgagcaccccagttagccttcccggtcatccgcagccattcttttatagcctccagagtctcaggccctctcaggtcactgtgaaagacatgtatctcttctccttggggtccgagagtccaaaaggagcaattgggcatatcgtgtcaactgaaaagactatcttggctgttgaacgcaataaggtcctgctgcctcctttgtggaaccggactttcagctgggggttcgacgacttctcctgttgcctgggttcctatggatcagataaggtacttatgaccttcgagaatttggctgcctggggtagatgcctctgtgctgtatgtccttctccaaccacgattgttacaagcgggacttcaacggtggtgtgtgtgtgggaactctcaatgactaaggggagacctagaggtctgagactcaggcaggccttatacggacacacccaggctgtcacctgcctcgccgctagcgtcaccttttccctccttgtgtccgggagtcaggactgcacatgtatcttgtgggatcttgaccacctgactcacgttaccagactgcccgctcatcgtgaagggatctccgcaatcacaatcagtgacgtgtccgggactattgtgtcctgcgctggtgcacatctgtctctgtggaacgtgaatggccagccccttgcttctattaccacagcttggggacctgaaggggctataacgtgttgctgtcttatggagggcccagcttgggatacatcacagattatcatcactggatctcaagacggcatggtgcgagtgtggaagacagaagatgtgaaaatgtccgtgccaggcagacctgccggagaggaacctccggctcaaccaccttcccccagaggacacaagtgggagaaaaacctggcgctgtcccgcgaactggatgtaagcattgctctcactggaaagccttcgaagacaagccctgcagtaacagctctagccgtctctagaaatcacactaagctgctggtgggagacgagagagggaggatcttttgctggtctgcggatgggtag

SEQ ID NO: 206689 - DNA, 6804 bp, Artificial Sequence
  derived and/or modified sequence
tagaagcttgctagccaagcgattgagcctgacgtcctgcggcagttcctgggactcggcataccaagctcactctcggccacaaccaagattcttgacagttcccacactcaccggggtaatcccggatgctccggtagccagaccgcacagggattagccgaaggtccatggccggctgcgcctgacgctggcctgcacccaggggttacgcaggccccacagccactcggagaaagccaggattcaaccacggccttgcagacggccctgagcctaatatcgatgacttcccccaggaaccttcagccacagcgcgcagctttggcccctagttttgtcgagttcgatatgagcgtcgagggttatgggtgcctgtttattcctaccctgtccacagtcatgggcacgtccaccgagtatagtgtgtcaggaggcattgggacaggtgcaacccgaccattcccacctccagggggactgactttttcttgctggttcctgatcagcagacacggggctgcaacagaaggccaccctctgcgtttcctgaccttggtgcggcatctggcaaggactgagcagccctttgtgtgttttagcgtgagcctgtgtccagacgatctatccctggtagtgtcaaccgaggagaaagagtttcaacctctcgacgtcatggagccagaagacgatagtgaaccaagtgcaggctgtcaactccaggtccgatgcggtcagctgctcgcctgtggacagtggcatcacctcgccgttgtggtcaccaaagagatgaagcggcattgtaccgtttctacctgcctcgatgggcaggtcatcggtagcgccaaaatgttgtacattcaggccctccctggcccatttctgtccatggatccctctgcttttgtggacgtgtacggatatatcgccacaccgagggtttggaagcagaagagtagccttatctggagactcggtcctacttatctgtttgaagaggccatcagcatggaaaccctggaggtgattaataagttagggcctaggtactgcggcaacttccaggccgtgcatgtccagggggaggatcttgattccgaggcaacaccctttgtggctgaagagagagtatccttcggcctgcatattgcctcaagcagtattacctcagtagcggatataaggaacgcctataacgaagtagactcgaggctcattgctaaggaaatgaatataagcagccgagataatgccatgcccgtctttctgctgcggaactgtgcagggcacctgtccggctcgttgagaacgatcggggctgtggcagtaggacagctgggcgtacgggtcttccatagctcaccagcggcaagtagtttggatttcattggtggcccagctatccttcttggcctgataagcctggcaacagacgatcacaccatgtacgcggctgttaaggtattgcactcagtgctgacaagcaatgctatgtgcgacttcttaatgcaacacatttgcggctatcaaatcatggccttcctcctgcggaaaaaagctagcctgctgaatcaccgaattttccaattgatcttatcggtagcaggtactgtggaactgggctttagatcttctgcaataaccaatacgggtgtttttcagcatatcctttgtaacttcgagctgtggatgaacacagccgacaaccttgagctgtccctattctctcatcttcttgagattctgcagtctcctcgggagggaccccgaaacgctgaggccgcacaccaggcccagctgatccccaaactgatttttctgtttaatgaaccatccctgattcctagcaagatttcgaccatcataggtatactggcctgccagttacgaggacatttttcaacccaggacctactcaggatcggactgttcgtggtttacacactgaaaccatcaagtgtcaatgagaggcagatctgcatggatggcgcactcgatccctccctacccgctgggtcacagacaagcggcaaaacaatctggctcagaaatcagctgctggagatgctgctttcggtcattagttcgccacagctgcatctatcatccgaatccaaagaagagatgttcttgaaactcggcccagattggttcctgctgctgctgcaggggcatttgcacgcgtcaacaaccgtgctcgctctcaagctgcttctctacttcctcgcaagccccagccttcgcacccgcttcagagatggcctgtgcgccggaagctgggtggaacgtagtaccgaaggagtcgatattgtaatggataatctgaagagccaaagccccctgccggaacaaagtccctgcctgctgcccggatttagagttttgaacgattttctggctcatcacgtgcacatcccagaggtgtacttaattgtgagcacattctttctacagactcccctaaccgagctcatggatggtccgaaggattctctggacgccatgttgcaatggctccttcagcgccaccaccaggaggaagtccttcaggcagggctctgcacagagggcgcattgctcttacttgaaatgctgaaagccacaatgtcccagcctctggctggatctgaggacggggcatgggcccagacctttccagcctctgttctgcaatttctgtcactcgtgcatcgcacctatccgcaggatcctgcctggagggcacctgaattcttgcagaccttggccatcgccgcattcccactgggggctcagaaaggtgtaggcgcagagtccacacgtaataccagtagcccagaagctgcggcagaaggggacagcaccgtggaggggctgcaggcgcctacaaaggcacatcccgctcggaggaagctacgtgagtttacccagctgctgcttagggaactgttgctaggagccagttcacccaagcaatggctacctctcgaagtgcttctggaagcgtcacctgaccatgccacctcccaacagaaaagggattttcagagcgaggtactcttgtctgcaatggaacttttccacatgaccagcgggggagatgctgccatgtttagggacggcaaagaacctcagcctagcgccgaggctgctgcagctccatctttagctaacatcagctgtttcacacagaagctggtggaaaagctctacagtggcatgtttagtgctgacccacgtcacatcctgttgtttatactcgaacatatcatggttgtgatcgaaaccgccagttcccagagagacacagtgctgagtaccctttattcttctttgaataaagtgatcctatattgcttgagcaagccccaacagtcgctaagcgagtgtctggggctactttccatcctgggctttttgcaagagcactgggacgtagttttcgccacatacaatagcaatatctccttcctgttatgcttaatgcactgtcttttgctgctcaatgagaggagctatcccgaaggattcggcctcgagccaaagcccagaatgagcacctatcatcaagtgtttctctccccaaatgaggacgtgaaggagaagagagaagatctaccctccctgtccgatgtgcagcacaacattcagaaaaccgttcagacactatggcagcagctcgtggcccaaagacagcaaacccttgaagacgcttttaaaatcgacctaagcgtgaagcccggagaaagggaggtcaaaatcgaggaggtgactcccctttgggaggagactatgctgaaagcttggcagcactatctagctagcgagaaaaagagcttagcctctaggtcgaacgttgcacatcattcaaaggtgactctctggtctggatcattaagttccgcgatgaaactcatgccaggccgacaagctaaggatcccgagtgtaaaactgaggactttgtgtcttgcatcgagaattacaggcggagaggccaggaactgtatgcttcactgtacaaagaccacgtgcagagacgtaaatgtggcaacattaaagctgccaatgcatgggcacgcatacaggaacagctgttcggagaactaggattatggagccagggagaagaaacaaagccttgttcaccttgggagctggattggcgggagggacccgcaagaatgcgcaaacgtattaaaagactgtcaccactggaggccctgtcctccgggaggcataaggagagtcaggataaaaacgaccacatctcacagactaacgcagagaaccaggatgagctgacattaagggaggccgagggagaaccagacgaggtcggcgtagattgcacacagctcactttctttccagcccttcatgagagcctgcactctgaagactttttggagctgtgtcgagagaggcaggtaatcttgcaagaactccttgataaagagaaagtgacacaaaagttctccttggtgattgtccagggccacctggtgtccgagggtgtgttgctgttcgggcatcagcacttctatatttgcgaaaacttcactctctccccaacaggcgacgtgtactgcacacgtcattgtctgagtaacatctccgacccctttatctttaacctgtgttctaaggacaggagcaccgaccattacagctgtcagtgccacagttatgctgacatgagagagctgcgccaggctcgattcctgctccaggacatagctttagagattttttttcataatgggtattccaaattcctcgtgttttataataatgacaggtccaaggcattcaagtctttttgttcgttccagcccagcctgaagggcaaagcaactagcgaagacacactgagtcttcgtaggtacccaggctctgatcggattatgctccagaagtggcagaaaagagacatttctaactttgaatacctcatgtacttgaatacagccgctggtcggacctgtaatgattacatgcagtatcccgtatttccatgggtgctagctgattatactagcgaaactttaaacctggccaatcccaagatcttccgcgatctctctaaacctatgggcgctcaaacaaaggaacgcaaattaaagtttatccagcggtttaaggaagtcgagaaaaccgaaggggatatgaccgtgcagtgtcactactatactcattattccagtgctattatcgtggccagctacttggttcgtatgcccccattcacccaggccttttgcgctttgcagggcggatctttcgatgttgcagatcgcatgtttcactcggtcaagtccacatgggaatctgccagccgcgagaacatgagtgacgttcgtgaattgacgcctgagttcttttatcttccagagttccttaccaactgcaacggggtggagttcggatgtatgcaggacggcacagtgttaggtgacgtgcagttgccaccttgggcagatggtgaccccaggaagtttatcagtttgcaccgaaaagcactcgagtccgattttgtgagcgctaatcttcaccactggatcgatttaatctttggctacaaacagcagggcccagcagccgttgatgccgtgaatattttccatccatatttttacggggatagaatggacctgtctagtatcaccgaccctctcattaagtcaacgatactcggatttgtaagcaattttggccaagtgccgaagcagctgtttacaaaacctcaccccgcacgcacggccgctggtaaacctctgcccggaaaagatgtgtcaacaccagtatcccttcctggccaccctcagccattcttctactccctgcagtcgctacggccaagccaagtcactgtgaaggacatgtatctcttttccttgggctcggaaagtccgaaaggagccatcggtcacatcgtgtctaccgaaaagaccatcctcgcagtggagagaaacaaagtgttgcttcccccattgtggaacagaacattctcctggggattcgacgacttcagttgttgtcttggctcatatggaagcgacaaggtgctgatgacattcgaaaaccttgcagcctgggggaggtgtctctgtgcggtttgcccctctccaacaacaatcgtgactagtggcacttccaccgtggtttgtgtatgggaactgtccatgaccaagggaaggcccaggggtctccgccttcggcaggccctttatggccacacacaagcggtcacttgtttagccgcaagcgtgacgttctccctattggtgtcgggttctcaggactgtacatgtatattatgggacctcgaccacctgactcatgtcaccaggctgccagcccaccgcgaaggaatctctgctattacgattagcgatgtgagcggtaccatcgtctcctgcgcaggcgctcacctgtcgctctggaatgtgaatgggcaacccctcgcatccattacaactgcctggggaccggaaggcgctataacatgttgttgcttgatggaaggacccgcttgggacacctcgcagattattataacgggctcccaagatgggatggtgagggtttggaagacagaggatgtcaagatgtcagtgccagggctgcagatgggccgtaagcgagaagccgcagaagccttagcacaacagtgtcaagccgagggaggcaggggagattgggggttgagctctgcttatcggaggaatccccaagggctcctgccccatagtagccaggggagggcaagcggaaatcactcatcagcggctcagccttctccttggcctatgggtctgctgtaa

SEQ ID NO: 206690 - DNA, 9554 bp, Artificial Sequence
  derived and/or modified sequence
atggaagccgaggatcttagcaaggcggaggatcggaatgaagatccaggaagtaaaaatgaagggcagctggcggctgtgcagcctgacgtgccccacgggggacagagctccagcccaaccgccctctgggatatgctggagaggaagtttctggaatatcaacagctcacccataaatcacccattgaaaggcagaagagtttactgtccctcttaccattgtttctgaaagcctgggagcacagcgtgggcataatttgcttcccatccctccagaggttggcggaagacgtgtccgaccagctagcgcagcagctgcagaaggcactagtgggcaaacccgcagaacaggcgaggctggcggctgggcagctcctttggtggaagggggatgtggaccaggacggttacctgctcctcaaaagcgtttatgtgctaactggaactgattcagagactctcggacgggtggccgaaagtggactcccagccctcctattgcagtgcctgtacctgttcttcgtcttcccccttgataaggacgaactgttggaatcagacctgcaggttcagaagatgttcgtgcagatgctgcttaacatttgtagcgatagccaggggctcgaaggactgctttccggtagcgagctccagtccttgcttattgcgaccacatgtttacgcgaacacagttgctgtttctggaaagagcctacattctgtgttctccgtgctattagtaaggctcaaaacttgtcaattatccaatatcttcaggctaccgactgtgtgagactgtctcttcagaacctatcgcgactcacggataccctgccggctcccgaggtatcggaggcagttagccttatcttaggattcgtcaaggactcctacccagtgagcagtgccctattcttggagtttgagaactcagaagggtatcccctcttattgaaggtgctactgcgatacgacggcctgacccagtcagaggtcgaccctcatcttgaggaacttttggggcttgtcgtttggttaactacctgcggccgttctgagctgaaggtgtttgacagcatcacgtatcctcagctcgagggctttaagtttcaccatgaagcaagtggggtgaccgtgaaaaacttacaggctttccaggtgctccaaaatgtatttcacaaggcctccgattcagtcctgtgtattcaagtgcttagtgtgattaggaccatgtgggcctggaacgccaggaacttcttcttgctggagtggacactccagccgatctcacagttcgttgagattatgccccttaagccagcacccgtccaagagcactttttccagttgctggaggccctggtgttcgaactacattacgttccacacgagattctgaggaaggtgcagcacctgattaaagagtcccccggaccttcgtgtaccttaatggccctccagagcatactttctatcgcgggaggagacccgctgtttactgacatctttcgggactccggcttactgggactacttctcgcccagctaaggaagcaggccaaaattatgcgtaaatctggaaataaggtatctacccccggagtccaggatccggagagggagctgacttgcgttatgctgcggattgtggtgaccctccttaagggtagtgttcgcaacgcggtggtgttaaaggatcacggaatggtccccttcattaagatcttcttggacgacgaatgttacagggaagcctcgttatcaattttggaacagctgagcgcaatcaatgcagaggaatatatgagtattattgtgggggcactctgctcctcgactcagggagaactgcaactgaaattggacctcctcaaaagccttctaaggattctggtcacccctaagggaagagccgcattccgcgtttcctccgggttcaatggactattgtcactgttgtctgatctagaaggatcccttcaagagcctccactgcaagcatggggcgcagtctctccccgtcagactcttgaactcgtgctgtataccctgtgtgcagtgagcgctgctctccattgggaccccgtgaacggatactttttcaggagaaacggactgttcgaaaagctcgccgaggacctgtgtcttttgggctgctttggcgctttagaggaggaaggcaaccttctgcgctcttgggtagacaccaaggcaaggcctttcgcggaccttttagggacagcattttcttcctccggaagtctgcctcccaggattcagagctgcctgcaaatcctggggttccttgactcaatggcctccggcaccttacatttgagaggggacctgaaagaatcattgagaactaaacaggggccagtggtggacgtccaaaaaggggagaccggctctgacccacaaaggaacttcaagcagtggccagatctggaagagcgtatggacgagggtgacgccgctatcatgcacccaggggtggtgtgtatcatggtgcggttgctgccacggctgtatcacgaggaccacccacaactgtctgaggaaatacagtgctctttggcctcacacatccagtctttggttaagtccgaaaaaaatcgccaggtgatgtgtgaggcaggacttctgggaacgctgatggcttcttgtcatcgcgctctcgtgacaagtgggagtcccctgcatagccgcctgatccgaatttttgagaaattagccagccaggccattgaaccagacgtcctgaggcaatttctgggtttgggcatcccatctagcctttccgccacaaccaagattctggattccagccatacacataggggcaaccccggatgtagcgggtcacagacagcccagggcttggcagaagggccttggcctgcagctcccgacgcagggctgcaccccggtgtgacgcaagcacctcagcccctaggcgagagccaggattctactacagccctgcagacagctctctctctgatctctatgactagcccccgtaatttgcaaccgcagcgggctgccctggcaccatcgttcgtggagtttgacatgagtgttgagggatacggttgcctgttcatcccaaccctgtccactgtgatggggacatctactgagtacagcgtgagtggcggaatagggactggtgccacaagacccttccccccaccgggtggtctgactttctcgtgctggttcctaatctcccgccacggtgcagcaaccgagggtcaccctctgcggttcctgacgctcgtacggcacttggctaggacagaacagccattcgtgtgctttagcgtttccttgtgtcctgacgacctaagcctggtcgtgtctacggaggagaaggagttccagccgctcgatgttatggagccagaggacgatagcgagccctccgctggatgtcagctacaagtccggtgcgggcagctgcttgcatgtggccaatggcatcacttagccgtcgtcgtgacaaaggagatgaaaagacactgtaccgtctcaacctgccttgatggacaggtcattggctcagcaaagatgctctatatacaggccttaccaggtcctttcctctcgatggacccatctgcatttgtagacgtgtatggttacattgccactcctcgcgtctggaagcagaagtccagtctgatttggcgccttgggcctacgtacctgtttgaggaggccatcagcatggagaccctggaagtgatcaacaaattgggcccaaggtactgcggaaattttcaggcagtacacgtgcaaggggaagatttggattctgaggcaactccttttgtcgctgaggaacgagtgtccttcggcctgcacattgcgagctcgtcaataacaagtgtggccgatatcagaaatgcatataacgaggtggactcacgcctgattgccaaggagatgaacataagctcccgtgataacgccatgccagttttcctcctccggaactgtgccggtcacttaagcggatctctccggaccattggtgcagtggcagtcggccaacttggcgtccgggtcttccacagttctcctgcggcttcatcgctggattttatcggtgggccagcgattttgcttggtctgatctctttagccactgatgaccacaccatgtacgctgcagtgaaggtgctgcatagtgtgctgaccagtaacgccatgtgcgactttctcatgcagcatatctgcggttatcagattatggcgtttctgctgcgcaagaaagcaagtctgctgaaccaccgcatctttcaattaatattgtctgtcgccggaactgtggaactgggttttaggagtagcgccatcaccaacaccggtgtattccagcacatcctgtgtaattttgagctttggatgaataccgcagataacttggaattaagtctgttctctcatttattggagatactgcaatccccgcgagaagggccaaggaatgccgaagctgcccaccaagcccaattgattcccaaactcattttccttttcaatgagccaagcctcatcccatcaaaaatatccactatcattggcattctggcttgtcagctgagagggcatttttcaacccaagatctactgcggatcggacttttcgtggtgtatacactgaaaccatcctcggtgaacgaacggcagatctgcatggatggcgcattggatccctctctgccagccggatctcaaacttctggaaaaacaatttggttacgtaaccagctcctggagatgctgctgtctgtaatttcgagcccccagctgcacctgtcgtctgaaagcaaagaggaaatgtttctcaaactaggccctgactggttcttgttgctcctccaggggcatctacacgcatccactacagtgctggccctcaagctcctcctttatttcctggcgtctcctagcttgcgaacccggttcagagacgggctgtgcgccggatcctgggtagaacgatcaacagagggggtcgacatcgtaatggataacttaaagagtcagagtcccctgcctgaacagtctccatgtcttttacctggattcagagtcctgaacgacttccttgcacaccacgtgcacatccccgaggtctatcttatcgtgagcacctttttcttgcagactcctttgactgagctgatggacggcccaaaggacagcctggatgctatgctgcaatggcttctccagaggcatcaccaggaagaggttttgcaggccggactctgcacagagggcgcattgctgcttctcgaaatgctcaaagctacaatgtcacagccgctcgcaggaagcgaggatggtgcatgggcgcaaacttttcccgcaagcgtgctgcagtttctctcactggtccacagaacatatcctcaggaccccgcatggagagctccagagtttctgcagacattagcgatcgccgctttccctctcggagctcagaaaggggtgggggcagaatccacgaggaatacctctagcccagaggctgcagccgagggagactctaccgtggagggcctgcaagctccaacaaaagctcatccagctcgcaggaaattaagggagttcacccagctgctccttcgggagctgctgctgggggcttccagccctaagcagtggctgcccctggaagtattactggaagccagccctgatcacgcaactagccagcagaagcgcgattttcagtccgaagtactgcttagcgccatggagctgtttcatatgactagtgggggagatgcggctatgttccgagacggcaaagaaccccagcctagtgcagaggcggctgccgctccctccctggctaacataagttgcttcacgcagaaattggtcgaaaagctatacagcggaatgttcagcgcggatcctagacacattttgctgtttattctcgaacacatcatggtggtgattgagacagcgtccagccagcgggacacagtccttagcaccctatattcttccctcaataaggtcatcctgtactgtctttccaaacctcaacagtccctgtccgagtgcctaggtctgctgtccattctagggtttctgcaggagcactgggatgtggtttttgctacctacaacagcaacatctcattcttgctctgtctgatgcactgtctgctgcttctaaacgagagaagctatcctgagggctttggtctggaacctaaacctaggatgagtacctaccaccaggtattcctcagccctaatgaggatgtgaaagagaagcgcgaggatctcccaagtctgagtgacgttcagcataatattcaaaagaccgtgcaaactctttggcagcagcttgttgcccagaggcagcaaacactcgaggacgcattcaaaatcgaccttagtgtgaagcccggagaaagggaggttaaaatcgaggaagttactcccttgtgggaagagacaatgctgaaagcctggcagcactacctcgcaagtgagaagaagtctctcgccagccggtccaatgtcgcgcaccactcaaaggtaaccctgtggtccgggtctcttagtagcgctatgaagctcatgcccggacgtcaagcaaaggatcctgaatgtaagaccgaggactttgtgtcctgcattgaaaactaccgtcgtcgagggcaagaattatacgcaagtttatacaaggatcacgtgcagagacgcaagtgtggaaacatcaaagcagccaacgcatgggcacggatccaggagcaattattcggagagctgggcctttggagccagggtgaggaaacgaagccatgctccccttgggagctcgattggcgcgaggggccagccagaatgcggaaacgaattaaacggctgagtcctttggaagcattgtcttctggcaggcacaaggaatcccaggataagaatgatcacatttcgcagaccaatgccgagaaccaggacgaactcacccttagggaagctgaaggggagcccgacgaggtcggagttgactgtacacagctcacattcttccccgcactacatgagtctctccactccgaggatttccttgaactctgcagagagcgccaggtgatccttcaggaactgctggacaaggaaaaggtaacccagaagttctcactcgtgatcgtccagggacacttggttagcgaaggcgtgttgctgtttggtcaccagcacttctatatttgcgagaattttactctcagtccaactggcgacgtgtattgtacgcgtcattgcttgtcaaacatttcggaccccttcatcttcaacttatgcagtaaagacagaagtaccgaccactactcatgccaatgtcacagctatgccgacatgcgggagctgcgacaggctcgttttctcctccaggacatcgctctggaaattttctttcacaatggctacagtaagttcctggtcttttacaataacgataggtccaaagcgtttaagagcttctgctctttccagccctcccttaagggtaaggcaacaagcgaagacaccctaagcctgcgtcgctatccaggctctgataggatcatgctgcaaaagtggcagaaaagggatatttcaaactttgaatatcttatgtacctaaataccgccgctggtagaacctgcaatgattacatgcagtatcccgtttttccttgggtcctggctgattacacctctgagacacttaatctcgccaatcctaagatctttcgcgacctgagcaaaccaatgggggcacagacaaaagagcgaaagttaaagttcatacaaagattcaaagaagtagaaaagacggaaggtgatatgactgtgcagtgccactactatacccactactccagcgccatcatcgtcgcatcatacctggtgaggatgcctccttttactcaggctttttgcgctctccagggaggctccttcgatgtagcagatagaatgttccattcagtcaagtccacttgggaaagtgccagcagggagaatatgtctgatgtgcgcgaactgacccccgagttcttctatctcccagagttcctcactaattgcaatggggtggagtttgggtgcatgcaggacggaaccgttctgggcgacgttcagctcccaccatgggccgatggagacccacggaaatttatctctcttcatcgcaaagcgctggaatctgactttgtatccgcgaatctccatcactggatcgacctcatttttggctataagcagcaagggccagcagcagtcgatgcagtgaacatatttcatccatatttctacggggatcgcatggatctatcatcaataacagatcccctgatcaaatctaccatcttaggctttgtgagcaacttcgggcaggtgcccaagcaattattcaccaagccacacccagcacgcaccgccgctggcaaacctctgcctggaaaagatgttagcactccggtgagtctccctgggcatccccagccatttttctactccctccaatctctgcgcccatctcaggttaccgtgaaggacatgtaccttttctccctcggatctgagtcgcccaaaggcgcaatcggacatattgtgagcaccgaaaaaacgatcttggcggtggagcgcaacaaggtgctgttacctcccctgtggaaccgaacattcagctggggatttgatgacttctcctgttgtcttggcagctacggttccgacaaagtgcttatgacgtttgagaacctggccgcttggggcagatgcctgtgcgccgtgtgcccgtcacctaccacgatcgttacctccggtactagcacagttgtgtgtgtgtgggaattgtcaatgaccaaaggtcgcccaagaggccttcggctcaggcaggccctctatggccacacgcaagcagtgacttgtctggccgcatcggttacttttagcttattggtctctggtagccaggattgcacttgtatcctgtgggatctagaccatcttactcacgtgacgcgcctaccagctcatcgcgaagggattagtgccataaccattagcgatgtgtcagggaccatcgtttcctgcgcaggtgcccacttaagtctttggaatgtgaacggacagccactggcttccattacaaccgcttggggcccagaaggcgcaatcacttgctgttgtctaatggagggacccgcttgggacacgagtcagatcatcatcactggctcccaggatggaatggtgcgagtatggaagacggaggacgttaaaatgtcagtgccgggacggccagccggagaggagccccctgctcagcccccaagtccacggggacataagtgggaaaaaaacctcgctctttcccgcgagcttgacgtgtctattgccctgacaggaaagccgagcaagacttctcccgctgtcactgccctggcagtaagccggaatcacacgaaattgctcgttggggatgagaggggccgaattttttgttggagcgcagacggcta

SEQ ID NO: 206691 - DNA, 1965 bp, Artificial Sequence
  derived and/or modified sequence
atggaagccgaggacttatcaaaggcagaagatcggaacgaagatccaggttccaaaaacgagggccagctggccgcagtccaacctgacgtgccccacggcggtcagagcagcagtccaaccgcactatgggatatgcttgagcgcaagtttctcgaatatcagcagctcacccacaagagcccgatagagagacaaaagagcttgctgtctttgcttcctctgttcttgaaggcatgggagcactctgtgggtattatctgcttcccgagtttacagaggctcgctgaggacgtaagcgaccagctggctcaacagttgcagaaagccttggtcggaaagcctgcagaacaggcacgcctcgctgcgggtcagctcctgtggtggaagggcgacgtggaccaggacggctatctcctgctgaagtctgtatacgtgctgacaggcaccgattcggaaacactgggccgagtggccgagagtggccttcccgctctcttgctgcaatgcctatacctatttttcgtgttccctctggataaggatgagctcttggaatcagatcttcaagtacagaagatgttcgtgcagatgctcctcaacatctgctcagattcacagggattagaaggccttctgagtggatctgaacttcagtcccttctcatcgctaccacttgcctgcgtgagcatagttgctgtttctggaaggagcccacattctgtgtcttgcgggctatttctaaggcccagaatctgtccatcatccagtacctgcaagctactgactgcgtgaggctgagcctccaaaacctctccaggttaaccgatacccttcccgcacccgaggtcagtgaagccgtatctctgattctggggtttgtgaaagactcttatcccgtatcttctgcactattcttagagtttgagaattccgaaggttaccccctgctcctcaaggtgctgttgcgctacgacggcctgacccagagtgaagtggaccctcatctcgaggagcttctcgggttggtggtgtggctcacgacatgcgggcgaagcgaattgaaagtctttgattctatcacatatccccagctggaaggctttaaattccaccacgaagccagtggggttactgtgaagaatctccaagcttttcaagtcctgcagaacgtgttccataaagctagcgactctgtgttatgcattcaggtgctgtccgtcatccggacaatgtgggcatggaacgcccgtaacttctttctccttgagtggacgctccaacctatttcccagttcgttgaaattatgcctctgaaaccagccccagtccaggaacactttttccagcttctcgaggctctggtgttcgagttgcactatgtgcctcatgaaattctaaggaaagtgcagcaccttatcaaggagagtcccggtccatcttgcacactgatggccctacagagcattttgtccatcgcgggaggcgacccgctcttcactgacatcttccgagactccgggctcctcggattgttgttagctcagctgcggaaacaggcaaaaattatgcgtaagagtggaaataaggtaagcacgccaggagtccaggaccctgagcgcgagctgacatgtgtgatgctgagaatcgtagttacgttactgaaagggtcagtccggaatgccgtggtactcaaggaccacgggatggtgccatttatcaagattttcttagacgacgagtgctaccgagaggccagtctttccatcttagaacagctctccgcaataaacgctgaagaatacatgagcataatcgtcggagcactgtgtagtagcacccagggagaacttcagttgaagcttgacttgctgaaggtaatatcttctcccccattgcggcttgcttctctgtggatttgcacgaagagatccacttttgctcaagcctttgtcttcatgtag

SEQ ID NO: 206692 - DNA, 3129 bp, Artificial Sequence
  derived and/or modified sequence
atggaggctgaagatcttagtaaagcagaagaccgaaatgaagacccgggatcgaaaaatgagggacaattagccgctgtgcagcctgacgtcccacacggcggacaatccagtagcccaaccgcactgtgggatatgctggaaaggaagttcctggaatatcagcagctcactcacaagagcccgatcgagcggcagaaaagcctcctgtctctcttgcctctgttcctgaaagcatgggagcattctgtgggcattatttgttttccctccttgcaacgccttgcggaggacgtctccgaccagttagctcagcagctgcagaaagctctggtaggaaaacccgctgaacaggccagattagctgctgggcagctcctgtggtggaagggggatgtggatcaggatggttatctgcttctcaaatctgtttacgtgcttacaggtacagattccgagacacttgggagggtggcagaatcagggctccccgctctcctactccagtgtctgtatctgttcttcgtgtttcccctcgacaaagatgagctgctggaatccgatctccaggtccaaaagatgtttgttcaaatgctccttaacatctgcagtgactcccaaggattagaggggctgctctccggttctgaactgcagagcctcctgattgccaccacctgcctaagagagcacagctgttgcttctggaaagagccaactttctgcgtcctgagggcaattagtaaagcccagaacctctcaattatacagtacctccaggctacagactgcgtgaggctgagcctacagaatctatcacgcttgacagacaccctgccagcacctgaggtgtctgaagcagtgagtttaattctgggattcgttaaggactcttatccagttagctctgccctttttctcgagtttgaaaactccgaaggttacccactgctcttaaaggtactgttacgctacgacgggctcactcagtccgaggtggatccccatctggaggaactattaggactggtagtctggctgacgacttgcgggaggtctgaactcaaagtcttcgatagcataacatacccccagttggaggggttcaagtttcaccatgaggccagtggggtcactgttaaaaacctacaagcatttcaggttctacagaatgtatttcacaaggcatcagactccgtgctgtgtattcaggtgttgtctgtcattcgaacgatgtgggcctggaatgccagaaattttttcttacttgagtggactcttcagccgatttcacagttcgtcgagattatgcctttaaagcccgcaccagtccaggagcacttttttcaactcctggaagctctcgtatttgaattgcactatgtgccgcatgagattctcagaaaggtccagcatttgatcaaggaatctcccggtcccagctgtactctgatggccctgcagagtattctttctatagcgggtggtgatccactattcacagatatctttagggattcgggcctgctgggcctcttgctggctcagctccgcaagcaggccaaaataatgcggaaaagcgggaacaaagtgtccacgcccggagtgcaagatcccgagagggagctgacctgtgttatgctgcgtatcgtggtaacactcttgaagggctctgttcggaacgctgtcgtcctcaaagaccatgggatggtcccattcattaaaattttcttggacgatgaatgttatagggaggctagtcttagcattttggagcaactgtcggctataaatgcagaggaatacatgagtatcattgtcggtgcgctctgcagctccacccaaggggaacttcagttaaaactggacctgctgaaaagcctgctcaggattctggtgacccccaaaggtagagctgcttttagagtgtcctcaggattcaacggactgctgagtctcttgtccgacctggagggcagccttcaagaaccgccactgcaggcctggggggcagtttcaccacggcagactctggagcttgttctgtataccctctgcgcggtgtccgcagctctgcattgggaccctgtcaacggatacttctttcggagaaatggcctcttcgaaaaacttgcagaagatctgtgcctgctcggctgctttggagctctggaggaggaaggaaatctgctgaggagctgggtggatacgaaggccaggcctttcgccgacttacttggaaccgcattttcaagctctgggagcctaccaccaagaatacagagttgtctgcagatactgggcttcctggacagcatggcgagcgggactctgcacctccggggagatctgaaagaatctctgcgaacaaagcagggcccagtcgtggacgtacagaagggggaaacggggagcgacccccagcgcaacttcaagcagtggcccgacctggaggagaggatggatgaaggagatgcagccattatgcatccgggtgttgtctgtatcatggtaagactcctcccacggctgtaccacgaggaccacccacagctctctgaggagattcagtgttcccttgcgagccatattcagtcactcgtgaagtcggaaaaaaaccgacaggtaatgtgtgaggccggactacttggaacactcatggccagttgccacagggcacttgtgacgtcaggtagccccctgcacagtagattaattcgtattttcgaaaagctggcctcgcaggctatcgaaccagatgtgctgagacagtttctggggctcggcataccatcgtccctgtctgctaccactaaaatattggacagctcgcatacacataggggtaacccgggttgttccggcagccaaacagcccagggcctagccgaagggccttggcccgctgcccctgatgctggcctccaccccggagtcacgcaggcaccccagcctctgggggagtctcaggattccacaacagctctccagaccgctttgtcgcttatttccatgacttccccgcacatttggaagcccaacatctggaaagataacctcgcacagaagcctgtggcgggtgatgctgctcagtgcaacattttccctcccgcttcgagtgttctctag

SEQ ID NO: 206693 - DNA, 9530 bp, Artificial Sequence
  derived and/or modified sequence
atggaagcagaggacctgtccaaagccgaagatagaaatgaggatcccggttcaaaaaacgaaggccaactggctgccgtccaaccagatgtgccccacggtgggcagagctcttcccccactgcgctctgggacatgctcgaaagaaaatttctggaataccaacaactgacacataagagtcccatcgagaggcagaagagtcttctaagcctactgcctctctttctcaaggcttgggaacactccgtcgggattatctgcttcccaagcttgcagagactagcagaggatgtgtcggatcagcttgcacagcagctgcagaaggccttagtgggtaaacctgcagagcaggccaggttggccgcaggccagttgctgtggtggaagggagatgtagatcaggacggctacctactgctgaagtcggtttacgtgttaacgggaacagattcagaaactctgggacgcgtggcggagagcggcttacccgcattgctgctccagtgtctatacctgttttttgtatttccgctggacaaggacgagctattggagtccgacctacaggtgcagaagatgtttgtgcagatgcttctcaacatttgctcagactcccagggcctggaagggctgctgtccggcagcgagctgcaatctttgttaattgcaaccacgtgcttgcgcgagcatagctgttgcttctggaaagaacccaccttttgtgtcttacgagctatatcaaaagcgcagaatctgtccattatccaatatcttcaagctactgactgcgttcgcctctctctacagaacctgagtaggctgacagacacactgcccgctccagaggtgtcagaagcagtgtccttgattctcggctttgtgaaggacagctatccagtcagtagtgcactctttttagaattcgaaaatagtgagggctatccattgttgttgaaagttcttttgagatatgacggcctgacccagagcgaggtggaccctcacctggaagagctgctgggccttgtggtgtggctaaccacatgcggcagatctgaattaaaagtgtttgacagcatcacctaccctcaactggagggcttcaagttccaccatgaggcatctggtgtgactgtaaagaatctgcaagcatttcaagtcctacagaatgtcttccacaaagccagtgactccgtgttatgtattcaggtcctgtcggtcattagaactatgtgggcgtggaatgccaggaatttctttttactcgagtggactctgcagcccatctcccagtttgttgagatcatgcccctcaaaccggctccagtgcaggagcactttttccagttgcttgaggcattggtgttcgagctgcattacgtacctcacgaaattctccgtaaagtccagcatctcataaaagaaagccccggaccgtcatgcacccttatggcactacagtctatcctgtccattgcgggaggcgatcccctgttcacggatatcttccgggacagcggattgctcggactactactggcacagttgagaaagcaggccaagataatgagaaaatctggcaacaaagtgtctacaccaggagtacaggaccccgagcgcgagttaacctgtgtgatgctgaggatcgtcgtcactctgcttaaagggagcgtccggaacgcagtcgtgttgaaagaccatggcatggtcccttttataaaaatattcctggacgacgagtgttaccgtgaagcctcactctccatccttgagcagttgagcgcaatcaatgccgaggaatatatgagcatcattgtcggagccctgtgttctagtactcaaggagagctgcagctgaagctcgatttgttgaagtcattgctgaggattctggtgaccccgaagggcagagccgctttccgagtgtcatcaggctttaacgggctgctgtccctgctgtccgacctagaagggagcctacaagagccgccattacaggcttggggagcagtttctcccagacagacactggagcttgtcctttacacgctgtgcgctgtatccgccgcacttcattgggatcctgttaacgggtacttctttcgccgaaacggtcttttcgaaaaactcgctgaagacctctgtttactcgggtgtttcggtgctctggaggaagaaggcaatttgctgcggagctgggtggatacaaaggcgcgaccgttcgccgatttgctgggtacagcttttagctcttccggctcacttcctccacgcattcagagctgtctccagatactgggattcttagattcaatggcttccgggactttgcacttacgaggggatcttaaggagagcttgcgtactaagcaaggacccgtggtcgacgtgcaaaaaggtgagaccggtagtgacccacagcggaacttcaagcagtggcccgacctggaagaaagaatggatgagggtgatgctgctatcatgcaccctggtgtggtttgcataatggttagattactgccaagactctatcacgaggaccatccccaactctcagaggagattcagtgtagcctggcctctcacatccaaagtctcgttaagagcgagaagaacagacaagtgatgtgcgaggccggattactggggacccttatggcctcttgccaccgtgccctcgtgacctctggcagtcctcttcactcccgactcattcgtattttcgaaaagcttgcctcccaagctatcgagcctgatgtgttacggcagttcttaggccttggcatacccagttcgttgtctgccactactaagatccttgattccagccacacccatcggggaaaccccggatgtagcggctcacagaccgcccagggactggctgagggcccatggccagcggcacctgacgccggactgcacccgggtgtcacccaggcccctcagcccctgggagagagccaggattcaacgacagccctgcagaccgcccttagtcttattagcatgacaagccctcgtaacctgcagccccaaagggctgcactggcaccatcatttgtggaattcgacatgagcgtggagggctatggatgcctgttcatacctactctctctacggtaatgggcacatccactgaatactcagtgtctggtgggattggcaccggtgctaccagacctttccctccgccagggggattgactttttcgtgttggttcctcatttccaggcacggcgcagcaactgagggacatccgctgcgatttctcaccctggtgcgccacctcgcgaggacagaacagccatttgtgtgcttctccgtgtccctctgccccgacgatctctccctcgtagtgtccaccgaagaaaaggagtttcaacccctcgatgtgatggaaccagaggacgattccgagccgagcgccggatgtcagctgcaggtgagatgcgggcaactgttggcctgcggacaatggcatcatctggccgtggtcgttaccaaagagatgaagagacattgcaccgtgtccacttgcctcgacggacaggtgataggcagcgcgaagatgctgtatatccaggcattaccaggcccatttctgtcaatggatccatccgctttcgtcgatgtctacggctatatcgcaactcccagagtttggaaacagaagagtagcctgatttggcgcctgggccctacctacctgttcgaggaggccatctcaatggagaccctggaggtcatcaataaactgggacccaggtactgtggcaattttcaggctgtccacgtacaaggtgaggaccttgattccgaggccaccccatttgtcgcagaagagagagtgtcatttggccttcacattgcatctagcagcataacaagcgtggcggatatccggaatgcctataatgaagtggactccagacttattgcaaaggagatgaacatcagtagccgggataatgcgatgccagtctttctcctaagaaactgcgcaggacatttatctggatccttaagaacaatcggcgctgtcgcggtcgggcaactgggcgtgcgcgtttttcatagctcacctgccgcaagcagcctggattttattggcggaccagccatcctgctcggactgatctctctagctactgatgaccacactatgtatgccgctgtgaaagtgctacacagtgtgctcacctcgaacgctatgtgcgactttctcatgcagcatatttgcgggtaccagataatggccttcctgttgcgcaagaaagctagtctgctgaatcacagaatatttcagttgatcttgagtgtcgctggcacagtcgagctcggattccgttcaagcgcaataaccaacacaggtgtctttcagcatattttgtgtaacttcgaactctggatgaataccgcagacaaccttgagctgtctttgttctcacacctgctggagatactgcagagtccacgagaggggccacggaatgctgaagcagcacaccaggcccagctgattcctaagctgatctttctgtttaacgaaccttccttgatccccagcaaaattagtaccataataggcatattagcctgtcagctgcgtggtcatttttcgacccaagaccttctacggattggcctatttgttgtgtacacacttaaaccatcaagcgttaacgagagacagatctgtatggatggtgccctcgatccaagcctgccagcaggctctcaaacatccggaaagacaatttggctaaggaaccagcttctcgaaatgctgttgagcgtgatctctagtccacagctgcacctgagcagcgagagcaaggaagagatgtttctcaagctgggcccagattggttcttgctgctattgcagggacaccttcatgcctcaacgacagtgttagctctcaagctgcttttgtatttcctggcttcaccttctctgcggacccgctttagagacgggctgtgcgccggttcttgggttgaacggtcgacggagggtgtggacatagtgatggacaatcttaagagccagagtccacttccagaacagagcccatgcttgctgcctgggttcagggtcctgaacgattttctggcccatcacgtccatataccagaggtttatcttatcgtttctacttttttcctgcaaacacctttaaccgagcttatggacgggcctaaagattccctggatgccatgctgcagtggctgttacagagacaccatcaagaagaggtgcttcaagctggcctgtgtacagagggagccctattgctcctggaaatgttgaaagcaactatgtcacaaccgctcgcaggatccgaggatggcgcatgggctcaaacattcccagcatccgtgcttcagttcctgtccttggtgcatcgaacctacccccaggaccccgcatggcgcgctccagaattcctgcaaaccctcgcaattgcagcctttcccctgggagcccagaagggagttggcgcagagtctacccgtaacaccagctcacctgaagccgcagcagagggagatagcaccgttgaaggcctacaagctccaactaaggcccaccctgcccgtaggaaacttcgcgagtttacccagttgctgcttagagagctgctgttgggtgcctcaagccctaaacagtggctgcctctcgaagtgctgttggaggcgagccccgatcatgcaacctcacaacagaagcgggactttcagtctgaggtgctcctttccgctatggagttatttcatatgacgtctggtggagacgcagccatgtttagggacggcaaggaaccccaaccttcggctgaagctgcagccgctccttcactggcgaacatttcttgcttcacccagaaactggtggagaagttgtactctggtatgttttccgccgatcctcgtcacattttgttgtttattcttgagcatataatggtggtcatcgagacagcgtcctcgcagagagatactgtgctgtctaccctctacagttccttaaataaggtgatcctttactgtctaagcaagcctcagcaaagcctctcagaatgcctgggcctgctgtccatccttggttttctccaggaacactgggatgtggtcttcgcgacctataatagtaatattagcttcctcctttgtttgatgcactgcctgcttttgctaaatgaacggtcttaccctgagggttttggcctcgagcccaagcccaggatgtcaacataccatcaggtcttcctgtccccaaacgaggacgtgaaggagaagagagaggacctcccgagcctgtctgatgtccagcacaacatccagaaaacggtgcagacgctttggcagcagcttgtggctcagcgacagcagaccctggaggacgccttcaaaatcgacttaagcgtgaagcccggtgagagagaggtgaaaatagaggaggtaacaccactgtgggaagaaactatgctaaaagcgtggcaacactacctcgctagcgagaagaagagtctggcttcccgtagcaatgtggcccaccatagtaaagttactttgtggagcggaagtctctcatctgcgatgaaactcatgcccggtagacaggccaaggatccagaatgcaaaacagaagatttcgtctcttgtattgaaaattacagacgcagagggcaggagctgtatgcaagcttgtataaggaccacgtacagagaaggaagtgcggaaacatcaaagctgccaatgcgtgggcaagaatccaggagcaactctttggggagctaggcctctggagccagggcgaagagactaagccctgttcaccatgggagctggattggagggaggggcctgcacgcatgaggaagcgcatcaagagactttcacctcttgaagcgctctcatcaggacgccacaaagagagccaggataagaacgaccacataagccagaccaacgccgaaaaccaggacgaactgaccctgagggaagctgaaggagagccagatgaggttggcgtggattgcacacagcttacattctttcctgcacttcatgagtccctgcactcggaagacttcctggaactttgtcgcgagcggcaggtgattctccaagagctgctggacaaggaaaaagtgacacagaaatttagcctggtgattgtacagggccacctcgtgtcagaaggcgttctgctgtttggacaccaacacttttatatctgcgagaatttcacgctgagccccactggagatgtatactgcactcgacactgcctcagtaatatatccgacccatttatctttaatctgtgctccaaggacagatccaccgatcattactcgtgccagtgccacagctacgccgatatgagagaactgcggcaggcacggtttctgctgcaggacatcgcgcttgagatattctttcacaacgggtactccaaattcctggtattctacaacaatgaccggagcaaggcatttaaatcattttgctccttccagcccagcctcaaaggcaaggctacctcggaagacaccctttcccttagacggtaccccggatccgatcgcatcatgctccagaagtggcagaagcgcgatatctcgaattttgagtatttgatgtatctgaacacagctgccggtaggacttgtaacgattatatgcagtaccccgtatttccatgggtgctggcagattacacgagcgagaccctgaacctggctaaccccaagatcttcagggacctgagcaaacctatgggggctcagaccaaagaacgtaaactgaagttcatccagagatttaaggaagtggagaagacagaaggagatatgaccgtgcagtgtcattactacacacactatagttccgccattattgtggcctcttacctcgtgcggatgccaccattcacccaggctttttgcgccctgcagggcggttccttcgacgttgcggataggatgtttcacagtgtgaaatccacctgggagtccgcttccagggagaacatgtcggatgtgagggaattgactcccgagttcttttacctgccggagttcctgaccaattgcaacggggtagagttcgggtgcatgcaagatggtaccgtattaggcgacgtgcagctacccccatgggcagatggcgatccaaggaagtttatctctcttcacagaaaagctctggagagtgacttcgtgagcgctaatttgcatcactggattgacctgatttttgggtataaacagcagggcccagccgctgttgatgcggttaacatttttcacccctacttttacggtgacaggatggatctcagttccatcaccgacccactcataaaaagcacaatactcggcttcgtatccaacttcggacaggtgcctaaacagctgttcacgaaaccccatccagccaggaccgcagctggaaagcccctcccaggcaaagacgtgtcaactccagtaagcctgccagggcaccctcagccatttttctactctttgcagagtctcagacccagtcaggtgaccgtcaaagatatgtatctttttagtctaggctccgaatcccctaagggtgcaatcggtcatatagtcagtaccgagaaaactatactggcagtggagaggaataaagttttgctcccccctttatggaaccggactttctcatggggttttgacgacttcagttgttgtcttggttcctatgggagcgataaggtcctcatgacgtttgagaatttggcggcatggggcagatgcctgtgcgccgtctgtccctcccctaccacaattgtgacgagcggaacctcaactgtggtgtgcgtttgggagctttccatgactaaagggagacctcgcggactgcggcttcgtcaggctctgtatggccatacacaggctgtgacgtgcttggctgccagcgtgacctttagcctgcttgtgtcaggctcccaggactgtacttgcatcctatgggatctggatcacctcacccatgtgacacgactcccagcacatcgcgaaggcattagcgcaattaccatctcagatgtatccggaactattgtgagctgcgcgggagctcacttgagcctgtggaacgtgaacggtcaaccactggctagcatcacgactgcctggggcccagagggagcgatcacctgctgttgtctgatggaagggcctgcttgggacactagtcagataattatcaccggtagccaggacggaatggttagagtctggaagaccgaagacgttaagatgagtgttcccggactgcaaatgggaaggaagcgagaagccgcagaagctctggcgcagcagtgccaggcagagggcggtcgcggtgactggggtttgtccagtgcctatcgaagaaatccacagggtctgctaccacactcatcccagggaagagctagtgggaaccatagctctgccgctcaacctagcccttggccgatgggactgctgta

SEQ ID NO: 206694 - DNA, 1875 bp, Artificial Sequence
  derived and/or modified sequence
atgctgcagaagtggcagaaacgggacatttccaatttcgagtatcttatgtacttgaatacagcagccggacgaacatgtaacgactatatgcagtatcctgtctttccatgggtgctagctgattacacaagcgaaacacttaacctggccaaccccaaaatcttcagagacttgagtaagcccatgggggctcagaccaaggagcgcaagttaaaatttattcagaggttcaaggaagtggaaaagacagagggggatatgactgtgcagtgtcattactacacacattactcttcagcaattattgttgcctcctatcttgtgcgcatgccgcctttcacccaagcattttgcgcccttcaagggggatccttcgacgttgctgacaggatgtttcatagtgtgaagtccacctgggagtccgcgtcccgggagaatatgagtgatgttcgcgagcttactcccgagttcttttacctaccagagttcttgaccaattgcaatggcgtagaattcggatgcatgcaggatgggactgtattgggcgacgtccaattgcccccatgggcagacggcgatccccgtaagtttatctcactgcaccgtaaagccttggagtcagatttcgtgtccgccaatttgcaccactggatcgacttgatttttggatacaaacagcagggccctgccgctgtcgatgctgtgaatatctttcacccatatttctacggtgatcgaatggacctttcttccattaccgaccctctgatcaaaagtactattctggggttcgtgtccaattttggacaggtgccaaagcagctatttacgaagccacaccccgcaagaactgccgcagggaagcccttacctggcaaagacgtctccacacctgtctctctgcctggacatccgcaaccatttttttacagcctgcaaagcctgcgaccctcacaggtgacggtcaaagacatgtacttgttttctcttgggagcgagagtcctaagggtgccattggacacatcgtgtctacagaaaagaccatattggccgtggagcggaataaagtgttgctgccaccactgtggaaccgaacttttagttggggtttcgatgacttttcatgttgcctcgggtcttacgggtcagataaagtcctgatgacatttgaaaacctggccgcatggggtagatgcctttgtgccgtgtgcccgagtccaaccaccattgtgacatcaggaacatccaccgttgtgtgcgtttgggagcttagtatgacaaagggcagaccccgtggattgagactgcgtcaagcactgtatggacatacccaggccgtgacatgtctggccgctagcgtgacattttcactcttggtgtccggtagccaggactgcacctgcattctgtgggacctggatcacctcactcatgtgacacggctgccagcccatagggaagggatctctgcgattacgattagtgacgtgagtggcacaatcgtatcttgtgctggagctcacctgtctttgtggaacgtaaacggccagcccctagccagcataacaactgcttgggggccagagggtgcgataacctgttgctgcctcatggaagggccagcatgggacactagccaaatcattattaccggctcccaggatggcatggtgcgggtttggaagactgaagatgtcaagatgagtgtacccggtcgccctgcgggtgaggaacctcctgctcaaccgccaaccctctccatggctgacgggacttccatgaaaagaatgagcacgcataccagacgggcagagcagcacgcagggaactgcgacctggtgatgccttcctgtacgcggaattacacctag

SEQ ID NO: 206695 - DNA, 4196 bp, Artificial Sequence
  derived and/or modified sequence
agcgagacttccagtccgaggtcctgctttctgctatggaactattccacatgacaagtggaggtgatgcagcgatgttcagagacggcaaagagcctcagccaagtgcagaagctgctgctgccccttctcttgccaacatctcctgcttcacccagaagctggtggagaagctgtacagtgggatgttctcggcagaccccaggcatatcctcctcttcatcctggagcacatcatggtggtcattgagactgcctcttctcaaagggacactgtcctcagcactttatacagcagtttaaataaagtcattctttattgcctatccaagccccagcagtccctctccgaatgcctcggccttctcagcatcctgggctttctgcaggagcactgggatgttgtctttgccacctacaattccaacatcagcttcctcctgtgtctcatgcattgccttttgctactcaatgagagaagttacccagaaggatttggattggagcccaagcctagaatgtctacttatcatcaagtcttcctttccccaaatgaagacgtgaaagaaaaaagagaagacttaccaagtttgagtgatgtccaacacaacatccagaagacagtgcagactctctggcagcagctggtggcacaaaggcagcagaccctggaggatgccttcaagatcgatctctctgtgaaacctggagagagggaagtgaagattgaagaggtcacaccgctctgggaggagacgatgctcaaggcctggcagcattacttagcatctgagaagaagtcactggcaagtcgttcaaatgttgcacaccacagcaaagtcactttgtggagtggaagcctgtcctcagccatgaagctgatgcccgggcggcaggccaaggaccctgagtgcaagacagaggattttgtgtcatgtatagagaactacagaagaagaggacaagagctatatgcatctttatacaaagaccatgtgcaaaggcgaaaatgtggcaacatcaaggcagccaacgcctgggccaggatccaggagcagctttttggggagctgggcttgtggagccagggggaagaaaccaagccctgttccccatgggaactcgactggagagaaggaccagctcgaatgaggaaacgcatcaaacgcttgtctcctttggaggccctgagctcaggaaggcacaaggaaagccaagacaaaaatgatcatatttctcaaacaaatgctgaaaaccaagatgaactgacactgagggaggctgagggcgagccggacgaggtgggggtggactgcacccagctgaccttcttcccagccttacacgaaagtctgcactcagaagacttcttggaactgtgtcgggaaagacaagttattttacaagagcttcttgataaagaaaaggtgacgcagaagttctccctggtgattgtgcagggccacctggtgtcagaaggggtcctgctttttggccaccaacacttctacatctgcgagaacttcacactgtctcccacgggtgatgtctactgtacccgtcactgcttatccaacatcagcgatccgttcattttcaacctgtgcagcaaagacaggtccactgaccattactcgtgccagtgccacagctacgctgacatgcgggagctacggcaggctcgcttcctcctgcaggacatcgccctggagatcttcttccacaatggatattccaagtttcttgtcttctacaacaatgatcggagtaaggcctttaaaagcttctgctctttccaacccagcctgaaggggaaagccacctcggaggacaccctcagtctaaggagataccccggctctgacaggatcatgctgcagaagtggcagaaaagggacatcagcaattttgagtatctcatgtacctcaacaccgcggctgggagaacctgcaatgactacatgcagtacccagtgttcccctgggtcctcgcagactacacctcagagacattgaacttggcaaatccgaagattttccgggatctttcaaagcccatgggggctcagaccaaggaaaggaagctgaaatttatccagaggtttaaagaagttgagaaaactgaaggagacatgactgtccagtgccactactacacccactactcctcggccatcatcgtggcctcctacctggtccggatgccacccttcacccaggccttctgcgctctgcagggcggaagcttcgacgtggcagacagaatgttccacagtgtgaagagcacgtgggagtcggcctccagagagaacatgagtgacgtcagggagctgaccccagagttcttctacctgcctgagttcttaaccaactgcaacggggtagagttcggctgcatgcaggacgggactgtgctaggagacgtgcagctccctccctgggctgatggggaccctcggaaattcatcagcctgcacagaaaggccctggaaagtgactttgtcagtgccaacctccaccattggatagaccttatttttgggtacaagcagcaggggccagccgcagtggatgctgttaatatcttccacccctacttctacggtgacagaatggacctcagcagcatcactgaccccctcatcaaaagcaccatcctggggtttgtcagcaactttggacaggtgcccaaacagctctttaccaaacctcacccagccaggactgcagcagggaagcctctgcctggaaaggatgtctccacccccgtgagcctgcctggccacccacagccctttttctacagcctgcagtcgctgaggccctcccaggtcacggtcaaagatatgtacctcttttctctaggctcagagtcccccaaaggggccattggccacattgtctctactgagaagaccattctggctgtagagaggaacaaagtgctgctgcctcctctctggaacaggaccttcagctggggctttgatgacttcagctgctgcttggggagctacggctccgacaaggtcctgatgacattcgagaacctggctgcctggggccgctgtctgtgcgccgtgtgcccatccccaacaacgattgtcacctctgggaccagcactgtggtgtgtgtgtgggagctcagcatgaccaaaggccgcccgaggggcttgcgcctccggcaggccttgtatggacacacacaggctgtcacgtgcctggcagcgtcagtcaccttcagcctcctggtgagcggctcccaggactgcacctgtatcctgtgggatctggaccacctcacccacgtgacccgcctgcccgcccatcgggaaggcatctcagccatcaccatcagtgacgtctcaggcaccattgtctcctgtgcgggagcacacttgtccctgtggaatgtcaatggacagcccctggccagcatcaccacagcctggggcccagaaggagccataacctgctgctgcctgatggagggcccagcatgggacacaagccagatcatcatcaccgggagtcaagacggcatggtccgggtttggaagactgaggatgtgaagatgtctgttcctggacggccagcaggagaggagcccccggctcagcctccaagcccaagaggccacaagtgggagaagaacctggccttgagtcgagagctggacgttagcattgctttgacagggaagcccagcaaaaccagccccgcagtgactgctctggccgtgtccagaaaccacaccaaactcctggttggtgatgagagggggagaatattctgctggtctgcagatgggtaggaagagagaggcagcagaggctctggcacaacagtgccaggctgagggtggcagaggtgactggggcctgagctctgcctacagaagaaacccccagggcctccttccccacagttctcaaggaagggcctctggcaatcacagctctgcagcccaaccctctccatggccgatgggacttctatgaaaaggatgagcacacacactcggagggctgagcagcacgctggaaactgtgacttggtgatgcccagctgcacacgaaattacacatgactcaccttattaagggctattgcactgaaaaaaaaaaagatgggtcgcttactggaaattattgtattgtctttattttattaaagcaactatgttttaaatgca

SEQ ID NO: 206696 - DNA, 6996 bp, Artificial Sequence
  derived and/or modified sequence
gaagctcgcttcccaggccattgaaccggatgtgctaagacagtttctaggtcttggaattccctcatctctgtcggccacaacaaaaatccttgattcatctcacacacacagaggcaaccctgggtgctcagggtcacagactgcacagggcttggctgaggggccctggccagctgccccagatgctgggctgcaccctggagtcacacaggccccgcagcccttgggggaatcccaggattcaactactgctcttcagacggcgctgagcctcatctccatgacctccccacgcaacctgcagcctcagagggcagccctggccccatcgtttgtggaatttgacatgtccgtggaaggttatggctgtttgtttattccaaccctgtccacagttatgggaaccagcactgagtactctgtctctggaggaattgggacaggtgccaccagaccgttccctcctcctggaggtctgaccttctcctgctggttcctgatcagccggcatggagctgccactgagggccacccgctgcgcttcctgacgttggtgcgccacctggccaggactgagcaaccctttgtttgcttctccgtcagcctctgcccagacgacctctccttggttgtttctacagaagagaaggagtttcagcctctggatgtcatggaacctgaggatgactccgagccttctgcaggatgccagcttcaggtcaggtgtggccagctcctggcttgtggtcagtggcatcacttggctgtggttgtcactaaggaaatgaaaaggcattgtacagtttccacctgtctggatggacaggtcattggctctgccaagatgttatacatccaggctctaccagggcctttcctttctatggatccatccgcatttgtggatgtttatggatatattgctactcctcgagtctggaaacaaaagtcttcattaatctggcgtcttggccccacatacctctttgaagaagccatttcaatggaaactctggaagttattaacaaacttggcccaagatattgtggtaacttccaagctgtgcatgtccaaggggaggacctggacagtgaagccacgccctttgttgcagaagaaagagtttcttttggacttcacatagccagctcctctatcaccagtgtagcggacatcagaaatgcttacaatgaggtggacagccgcctgatcgccaaagagatgaacatttcatcccgtgacaatgccatgcccgtgttcttgctgaggaattgtgctggccacctgtcagggtctctgcggaccattggagctgttgctgtgggtcaattaggggtgagggtattccactccagccctgctgccagcagcctggacttcattggcgggcctgccatcctcctgggcctcatctccttagcgacagatgaccataccatgtatgcggctgtgaaagttctgcactcggtcctgaccagtaatgccatgtgtgacttcctgatgcaacacatctgtgggtaccagataatggcgtttctcctgaggaagaaggcctctctcctgaaccatcgaatttttcagctgatcctctcagtggctggcactgtggagctgggcttcaggtcatctgctatcaccaacactggtgtcttccagcacatcctctgcaatttcgagctctggatgaatactgcagacaatctggagctcagcctcttttcccatcttttggaaatccttcaatcaccaagggaaggacccaggaatgctgaagctgcccaccaggcacagcttatacccaagctcatcttcctattcaatgagccgagcctcatcccctccaagatctccaccatcattggcatcctggcctgtcagctgaggggccacttcagcacccaggacttgctcaggattgggctgtttgttgtgtacaccctcaagccttcgtcggtgaatgagaggcagatctgcatggacggagccctggacccttccctgcctgctggaagccaaacatctggaaagacaatctggctcagaaaccagttgctggagatgctgctcagtgtaatatcttccccccagcttcatctgtcctctgagtcaaaggaagagatgtttctgaaactggggcctgactggttcctgctgctcctgcagggccacctgcatgccagcaccactgtgctggcattgaagctgctgctgtactttctggcaagcccctccctccgcacacggtttagagatggcctgtgtgcaggatcctgggtggaacgcagcactgagggcgtggatattgtaatggacaacctgaagagccagtcaccactgcctgagcaaagcccatgcctgcttcctgggttccgtgtcttgaatgactttctggcccaccacgtccacattccagaggtctacctcatcgtctccaccttcttcctgcagacaccactcacagagctgatggacgggcccaaagacagccttgatgccatgcttcagtggctcctgcagaggcaccaccaggaagaagtcctccaggctgggctgtgcacagaaggtgccttgctcctcctggaaatgctgaaggccaccatgagccagcccctggcaggttctgaggatggtgcctgggcacagaccttcccggccagcgtgctgcagttcctcagcctcgtccaccgcacctacccccaggacccagcgtggcgagccccggagttcctccagaccttggccatagccgccttccccctgggagcccaaaagggggttggggctgagtccacccggaacaccagcagtcctgaggccgcagctgaaggcgacagcacagtggagggtctccaggctcccaccaaggcacatcccgcccggaggaagctgagggagttcacgcagctcctcttgagggagctcctgcttggagcctccagccccaagcagtggctgcccctggaggtgctcctggaggcttctccagaccacgccaccagccaacagaagcgagacttccagtccgaggtcctgctttctgctatggaactattccacatgacaagtggaggtgatgcagcgatgttcagagacggcaaagagcctcagccaagtgcagaagctgctgctgccccttctcttgccaacatctcctgcttcacccagaagctggtggagaagctgtacagtgggatgttctcggcagaccccaggcatatcctcctcttcatcctggagcacatcatggtggtcattgagactgcctcttctcaaagggacactgtcctcagcactttatacagcagtttaaataaagtcattctttattgcctatccaagccccagcagtccctctccgaatgcctcggccttctcagcatcctgggctttctgcaggagcactgggatgttgtctttgccacctacaattccaacatcagcttcctcctgtgtctcatgcattgccttttgctactcaatgagagaagttacccagaaggatttggattggagcccaagcctagaatgtctacttatcatcaagtcttcctttccccaaatgaagacgtgaaagaaaaaagagaagacttaccaagtttgagtgatgtccaacacaacatccagaagacagtgcagactctctggcagcagctggtggcacaaaggcagcagaccctggaggatgccttcaagatcgatctctctgtgaaacctggagagagggaagtgaagattgaagaggtcacaccgctctgggaggagacgatgctcaaggcctggcagcattacttagcatctgagaagaagtcactggcaagtcgttcaaatgttgcacaccacagcaaagtcactttgtggagtggaagcctgtcctcagccatgaagctgatgcccgggcggcaggccaaggaccctgagtgcaagacagaggattttgtgtcatgtatagagaactacagaagaagaggacaagagctatatgcatctttatacaaagaccatgtgcaaaggcgaaaatgtggcaacatcaaggcagccaacgcctgggccaggatccaggagcagctttttggggagctgggcttgtggagccagggggaagaaaccaagccctgttccccatgggaactcgactggagagaaggaccagctcgaatgaggaaacgcatcaaacgcttgtctcctttggaggccctgagctcaggaaggcacaaggaaagccaagacaaaaatgatcatatttctcaaacaaatgctgaaaaccaagatgaactgacactgagggaggctgagggcgagccggacgaggtgggggtggactgcacccagctgaccttcttcccagccttacacgaaagtctgcactcagaagacttcttggaactgtgtcgggaaagacaagttattttacaagagcttcttgataaagaaaaggtgacgcagaagttctccctggtgattgtgcagggccacctggtgtcagaaggggtcctgctttttggccaccaacacttctacatctgcgagaacttcacactgtctcccacgggtgatgtctactgtacccgtcactgcttatccaacatcagcgatccgttcattttcaacctgtgcagcaaagacaggtccactgaccattactcgtgccagtgccacagctacgctgacatgcgggagctacggcaggctcgcttcctcctgcaggacatcgccctggagatcttcttccacaatggatattccaagtttcttgtcttctacaacaatgatcggagtaaggcctttaaaagcttctgctctttccaacccagcctgaaggggaaagccacctcggaggacaccctcagtctaaggagataccccggctctgacaggatcatgctgcagaagtggcagaaaagggacatcagcaattttgagtatctcatgtacctcaacaccgcggctgggagaacctgcaatgactacatgcagtacccagtgttcccctgggtcctcgcagactacacctcagagacattgaacttggcaaatccgaagattttccgggatctttcaaagcccatgggggctcagaccaaggaaaggaagctgaaatttatccagaggtttaaagaagttgagaaaactgaaggagacatgactgtccagtgccactactacacccactactcctcggccatcatcgtggcctcctacctggtccggatgccacccttcacccaggccttctgcgctctgcagggcggaagcttcgacgtggcagacagaatgttccacagtgtgaagagcacgtgggagtcggcctccagagagaacatgagtgacgtcagggagctgaccccagagttcttctacctgcctgagttcttaaccaactgcaacggggtagagttcggctgcatgcaggacgggactgtgctaggagacgtgcagctccctccctgggctgatggggaccctcggaaattcatcagcctgcacagaaaggccctggaaagtgactttgtcagtgccaacctccaccattggatagaccttatttttgggtacaagcagcaggggccagccgcagtggatgctgttaatatcttccacccctacttctacggtgacagaatggacctcagcagcatcactgaccccctcatcaaaagcaccatcctggggtttgtcagcaactttggacaggtgcccaaacagctctttaccaaacctcacccagccaggactgcagcagggaagcctctgcctggaaaggatgtctccacccccgtgagcctgcctggccacccacagccctttttctacagcctgcagtcgctgaggccctcccaggtcacggtcaaagatatgtacctcttttctctaggctcagagtcccccaaaggggccattggccacattgtctctactgagaagaccattctggctgtagagaggaacaaagtgctgctgcctcctctctggaacaggaccttcagctggggctttgatgacttcagctgctgcttggggagctacggctccgacaaggtcctgatgacattcgagaacctggctgcctggggccgctgtctgtgcgccgtgtgcccatccccaacaacgattgtcacctctgggaccagcactgtggtgtgtgtgtgggagctcagcatgaccaaaggccgcccgaggggcttgcgcctccggcaggccttgtatggacacacacaggctgtcacgtgcctggcagcgtcagtcaccttcagcctcctggtgagcggctcccaggactgcacctgtatcctgtgggatctggaccacctcacccacgtgacccgcctgcccgcccatcgggaaggcatctcagccatcaccatcagtgacgtctcaggcaccattgtctcctgtgcgggagcacacttgtccctgtggaatgtcaatggacagcccctggccagcatcaccacagcctggggcccagaaggagccataacctgctgctgcctgatggagggcccagcatgggacacaagccagatcatcatcaccgggagtcaagacggcatggtccgggtttggaagactgaggatgtgaagatgtctgttcctggtctgcagatgggtaggaagagagaggcagcagaggctctggcacaacagtgccaggctgagggtggcagaggtgactggggcctgagctctgcctacagaagaaacccccagggcctccttccccacagttctcaaggaagggcctctggcaatcacagctctgcagcccaaccctctccatggccgatgggacttctatgaaaaggatgagcacacacactcggagggctgagcagcacgctggaaactgtgacttggtgatgcccagctgcacacgaaattacacatgactcaccttattaagggctattgcactgaaaaaaaaaaagatgggtcgcttactggaaattattgtattgtctttattttattaaagcaactatgttttaaatgca

SEQ ID NO: 206697 - DNA, 9962 bp, Artificial Sequence
  derived and/or modified sequence
ctgaattcagatctgctttgccacggcatggaggcagaagatctttcaaaggctgaagacagaaatgaagacccaggttccaaaaatgaagggcagcttgctgctgtgcagcctgatgtcccacatggagggcagtcctccagccccacagctctctgggacatgctggaaaggaagtttctggaataccagcagttgactcacaagagccccattgagcgtcagaagagcctgttgagtcttctccccctattcctaaaggcctgggaacactccgtggggatcatctgctttcccagtctccaaaggctggctgaagacgtgtctgaccagcttgcccagcaactccagaaggcccttgtggggaagcctgcggagcaagctcggttggcagctggacagttgctgtggtggaagggggacgtggatcaggatggctacttgctcctgaagtcagtgtacgtgctcacggggacagactcggagacgctgggcagggttgctgagtctgggcttccagccctgctcctacagtgcctttacctcttctttgtctttcctctggacaaagatgagcttcttgagagtgatcttcaagttcaaaagatgttcgtgcagatgttgctcaatatttgcagtgactctcagggcctggagggactcctctcaggaagtgagctgcagtctctgctgattgccacgacctgccttcgggagcacagctgctgcttctggaaggaacccaccttctgcgtgctaagggcaatctccaaggcccagaacctcagcatcatccagtacctgcaggccacagactgtgtcaggctctccctccagaacctctccaggctcacggacactctccctgcccctgaagtgagcgaggctgtaagcctgatcttgggattcgtgaaggactcctaccccgtctcctcggctctgttcctggagtttgagaattcagagggctatcctctgctgctcaaagtgttacttcggtatgatgggctgacccagagcgaagtggacccgcatctggaggagctccttgggctggtggtgtggctgacaacctgtgggaggtcagagctgaaggtgtttgacagcatcacttaccctcagcttgaaggcttcaagttccatcatgaggcatctggggtgactgttaagaatcttcaggccttccaggtcctacagaatgttttccacaaagccagtgactctgtcctctgcatacaagtcttgtcagtcatcaggaccatgtgggcctggaatgctcgaaacttcttcctgctggagtggaccctgcagcccatctcgcagtttgtagagatcatgcccctgaagccggccccagtgcaggaacacttcttccagcttctagaggccctggtgttcgagctgcactacgtgcctcatgagatcctgcgaaaggtacagcatctgatcaaggagagccctgggccatcctgcaccctcatggccctgcagagcatcctcagcatcgctggtggggaccccctcttcaccgacatcttccgggactcagggctcctgggcctgctactggcacagcttcggaagcaagccaagatcatgaggaagtcaggaaacaaagtgtccactcctggtgttcaggatccagaaagagaactcacctgtgtgatgctgaggattgtagtcacacttctgaaaggctcggtgaggaatgcagttgtcctgaaggaccacggcatggtgcccttcatcaagatcttcctggatgacgagtgctaccgggaggcctcgctcagcatcttggagcagctctcagccatcaacgccgaggagtacatgagcatcattgtgggtgctctatgctcatccactcaaggggagctgcagctgaaactggatctcctgaagtctctgctccggatcctggtgacccccaagggtcgtgctgccttcagagtctccagcgggttcaacgggctgctgtctctgctctctgacctggaaggctccctccaggagcccccgctgcaggcatggggagcagtatcccccagacagaccctggagctggttttgtacactctctgtgctgtgtccgcagcgctgcactgggaccctgtcaatggctacttcttcaggaggaatgggctctttgagaagctggccgaggacctctgcctgctgggctgttttggagccctggaggaagagggcaacctgctgcgctcttgggtggacacaaaggccaggccatttgcagatttgctgggcactgccttttcctccagcggctcactcccaccccggatacagagctgcctccagatccttggctttctggacagcatggccagcggcaccctccacttgcgtggggacctgaaggagtccctgaggaccaagcaggggccggttgtggatgttcagaagggagaaactggcagtgacccccaacgcaacttcaagcagtggccagacctggaggagaggatggatgagggagatgctgcaatcatgcatcccggggtcgtgtgcatcatggtgaggctgctgcctcggttgtaccatgaagatcacccacagctttccgaggagatccagtgctccctggccagtcatatccagtccctggtgaagtcggagaagaaccgccaggtcatgtgcgaagcaggcttgcttgggaccctcatggcctcctgccacagggccctggtcaccagtggcagccccctccactcacgcctcatcaggatctttgagaagctcgcttcccaggccattgaaccggatgtgctaagacagtttctaggtcttggaattccctcatctctgtcggccacaacaaaaatccttgattcatctcacacacacagaggcaaccctgggtgctcagggtcacagactgcacagggcttggctgaggggccctggccagctgccccagatgctgggctgcaccctggagtcacacaggccccgcagcccttgggggaatcccaggattcaactactgctcttcagacggcgctgagcctcatctccatgacctccccacgcaacctgcagcctcagagggcagccctggccccatcgtttgtggaatttgacatgtccgtggaaggttatggctgtttgtttattccaaccctgtccacagttatgggaaccagcactgagtactctgtctctggaggaattgggacaggtgccaccagaccgttccctcctcctggaggtctgaccttctcctgctggttcctgatcagccggcatggagctgccactgagggccacccgctgcgcttcctgacgttggtgcgccacctggccaggactgagcaaccctttgtttgcttctccgtcagcctctgcccagacgacctctccttggttgtttctacagaagagaaggagtttcagcctctggatgtcatggaacctgaggatgactccgagccttctgcaggatgccagcttcaggtcaggtgtggccagctcctggcttgtggtcagtggcatcacttggctgtggttgtcactaaggaaatgaaaaggcattgtacagtttccacctgtctggatggacaggtcattggctctgccaagatgttatacatccaggctctaccagggcctttcctttctatggatccatccgcatttgtggatgtttatggatatattgctactcctcgagtctggaaacaaaagtcttcattaatctggcgtcttggccccacatacctctttgaagaagccatttcaatggaaactctggaagttattaacaaacttggcccaagatattgtggtaacttccaagctgtgcatgtccaaggggaggacctggacagtgaagccacgccctttgttgcagaagaaagagtttcttttggacttcacatagccagctcctctatcaccagtgtagcggacatcagaaatgcttacaatgaggtggacagccgcctgatcgccaaagagatgaacatttcatcccgtgacaatgccatgcccgtgttcttgctgaggaattgtgctggccacctgtcagggtctctgcggaccattggagctgttgctgtgggtcaattaggggtgagggtattccactccagccctgctgccagcagcctggacttcattggcgggcctgccatcctcctgggcctcatctccttagcgacagatgaccataccatgtatgcggctgtgaaagttctgcactcggtcctgaccagtaatgccatgtgtgacttcctgatgcaacacatctgtgggtaccagataatggcgtttctcctgaggaagaaggcctctctcctgaaccatcgaatttttcagctgatcctctcagtggctggcactgtggagctgggcttcaggtcatctgctatcaccaacactggtgtcttccagcacatcctctgcaatttcgagctctggatgaatactgcagacaatctggagctcagcctcttttcccatcttttggaaatccttcaatcaccaagggaaggacccaggaatgctgaagctgcccaccaggcacagcttatacccaagctcatcttcctattcaatgagccgagcctcatcccctccaagatctccaccatcattggcatcctggcctgtcagctgaggggccacttcagcacccaggacttgctcaggattgggctgtttgttgtgtacaccctcaagccttcgtcggtgaatgagaggcagatctgcatggacggagccctggacccttccctgcctgctggaagccaaacatctggaaagacaatctggctcagaaaccagttgctggagatgctgctcagtgtaatatcttccccccagcttcatctgtcctctgagtcaaaggaagagatgtttctgaaactggggcctgactggttcctgctgctcctgcagggccacctgcatgccagcaccactgtgctggcattgaagctgctgctgtactttctggcaagcccctccctccgcacacggtttagagatggcctgtgtgcaggatcctgggtggaacgcagcactgagggcgtggatattgtaatggacaacctgaagagccagtcaccactgcctgagcaaagcccatgcctgcttcctgggttccgtgtcttgaatgactttctggcccaccacgtccacattccagaggtctacctcatcgtctccaccttcttcctgcagacaccactcacagagctgatggacgggcccaaagacagccttgatgccatgcttcagtggctcctgcagaggcaccaccaggaagaagtcctccaggctgggctgtgcacagaaggtgccttgctcctcctggaaatgctgaaggccaccatgagccagcccctggcaggttctgaggatggtgcctgggcacagaccttcccggccagcgtgctgcagttcctcagcctcgtccaccgcacctacccccaggacccagcgtggcgagccccggagttcctccagaccttggccatagccgccttccccctgggagcccaaaagggggttggggctgagtccacccggaacaccagcagtcctgaggccgcagctgaaggcgacagcacagtggagggtctccaggctcccaccaaggcacatcccgcccggaggaagctgagggagttcacgcagctcctcttgagggagctcctgcttggagcctccagccccaagcagtggctgcccctggaggtgctcctggaggcttctccagaccacgccaccagccaacagaagcgagacttccagtccgaggtcctgctttctgctatggaactattccacatgacaagtggaggtgatgcagcgatgttcagagacggcaaagagcctcagccaagtgcagaagctgctgctgccccttctcttgccaacatctcctgcttcacccagaagctggtggagaagctgtacagtgggatgttctcggcagaccccaggcatatcctcctcttcatcctggagcacatcatggtggtcattgagactgcctcttctcaaagggacactgtcctcagcactttatacagcagtttaaataaagtcattctttattgcctatccaagccccagcagtccctctccgaatgcctcggccttctcagcatcctgggctttctgcaggagcactgggatgttgtctttgccacctacaattccaacatcagcttcctcctgtgtctcatgcattgccttttgctactcaatgagagaagttacccagaaggatttggattggagcccaagcctagaatgtctacttatcatcaagtcttcctttccccaaatgaagacgtgaaagaaaaaagagaagacttaccaagtttgagtgatgtccaacacaacatccagaagacagtgcagactctctggcagcagctggtggcacaaaggcagcagaccctggaggatgccttcaagatcgatctctctgtgaaacctggagagagggaagtgaagattgaagaggtcacaccgctctgggaggagacgatgctcaaggcctggcagcattacttagcatctgagaagaagtcactggcaagtcgttcaaatgttgcacaccacagcaaagtcactttgtggagtggaagcctgtcctcagccatgaagctgatgcccgggcggcaggccaaggaccctgagtgcaagacagaggattttgtgtcatgtatagagaactacagaagaagaggacaagagctatatgcatctttatacaaagaccatgtgcaaaggcgaaaatgtggcaacatcaaggcagccaacgcctgggccaggatccaggagcagctttttggggagctgggcttgtggagccagggggaagaaaccaagccctgttccccatgggaactcgactggagagaaggaccagctcgaatgaggaaacgcatcaaacgcttgtctcctttggaggccctgagctcaggaaggcacaaggaaagccaagacaaaaatgatcatatttctcaaacaaatgctgaaaaccaagatgaactgacactgagggaggctgagggcgagccggacgaggtgggggtggactgcacccagctgaccttcttcccagccttacacgaaagtctgcactcagaagacttcttggaactgtgtcgggaaagacaagttattttacaagagcttcttgataaagaaaaggtgacgcagaagttctccctggtgattgtgcagggccacctggtgtcagaaggggtcctgctttttggccaccaacacttctacatctgcgagaacttcacactgtctcccacgggtgatgtctactgtacccgtcactgcttatccaacatcagcgatccgttcattttcaacctgtgcagcaaagacaggtccactgaccattactcgtgccagtgccacagctacgctgacatgcgggagctacggcaggctcgcttcctcctgcaggacatcgccctggagatcttcttccacaatggatattccaagtttcttgtcttctacaacaatgatcggagtaaggcctttaaaagcttctgctctttccaacccagcctgaaggggaaagccacctcggaggacaccctcagtctaaggagataccccggctctgacaggatcatgctgcagaagtggcagaaaagggacatcagcaattttgagtatctcatgtacctcaacaccgcggctgggagaacctgcaatgactacatgcagtacccagtgttcccctgggtcctcgcagactacacctcagagacattgaacttggcaaatccgaagattttccgggatctttcaaagcccatgggggctcagaccaaggaaaggaagctgaaatttatccagaggtttaaagaagttgagaaaactgaaggagacatgactgtccagtgccactactacacccactactcctcggccatcatcgtggcctcctacctggtccggatgccacccttcacccaggccttctgcgctctgcagggcggaagcttcgacgtggcagacagaatgttccacagtgtgaagagcacgtgggagtcggcctccagagagaacatgagtgacgtcagggagctgaccccagagttcttctacctgcctgagttcttaaccaactgcaacggggtagagttcggctgcatgcaggacgggactgtgctaggagacgtgcagctccctccctgggctgatggggaccctcggaaattcatcagcctgcacagaaaggccctggaaagtgactttgtcagtgccaacctccaccattggatagaccttatttttgggtacaagcagcaggggccagccgcagtggatgctgttaatatcttccacccctacttctacggtgacagaatggacctcagcagcatcactgaccccctcatcaaaagcaccatcctggggtttgtcagcaactttggacaggtgcccaaacagctctttaccaaacctcacccagccaggactgcagcagggaagcctctgcctggaaaggatgtctccacccccgtgagcctgcctggccacccacagccctttttctacagcctgcagtcgctgaggccctcccaggtcacggtcaaagatatgtacctcttttctctaggctcagagtcccccaaaggggccattggccacattgtctctactgagaagaccattctggctgtagagaggaacaaagtgctgctgcctcctctctggaacaggaccttcagctggggctttgatgacttcagctgctgcttggggagctacggctccgacaaggtcctgatgacattcgagaacctggctgcctggggccgctgtctgtgcgccgtgtgcccatccccaacaacgattgtcacctctgggaccagcactgtggtgtgtgtgtgggagctcagcatgaccaaaggccgcccgaggggcttgcgcctccggcaggccttgtatggacacacacaggctgtcacgtgcctggcagcgtcagtcaccttcagcctcctggtgagcggctcccaggactgcacctgtatcctgtgggatctggaccacctcacccacgtgacccgcctgcccgcccatcgggaaggcatctcagccatcaccatcagtgacgtctcaggcaccattgtctcctgtgcgggagcacacttgtccctgtggaatgtcaatggacagcccctggccagcatcaccacagcctggggcccagaaggagccataacctgctgctgcctgatggagggcccagcatgggacacaagccagatcatcatcaccgggagtcaagacggcatggtccgggtttggaagactgaggatgtgaagatgtctgttcctggacggccagcaggagaggagcccccggctcagcctccaagcccaagaggccacaagtgggagaagaacctggccttgagtcgagagctggacgttagcattgctttgacagggaagcccagcaaaaccagccccgcagtgactgctctggccgtgtccagaaaccacaccaaactcctggttggtgatgagagggggagaatattctgctggtctgcagatgggtaggaagagagaggcagcagaggctctggcacaacagtgccaggctgagggtggcagaggtgactggggcctgagctctgcctacagaagaaacccccagggcctccttccccacagttctcaaggaagggcctctggcaatcacagctctgcagcccaaccctctccatggccgatgggacttctatgaaaaggatgagcacacacactcggagggctgagcagcacgctggaaactgtgacttggtgatgcccagctgcacacgaaattacacatgactcaccttattaagggctattgcactgaaaaaaaaaaagatgggtcgcttactggaaattattgtattgtctttattttattaaagcaactatgttttaaatgc

SEQ ID NO: 206698 - DNA, 8253 bp, Artificial Sequence
  derived and/or modified sequence
ctgaattcagatctgctttgccacggcatggaggcagaagatctttcaaaggctgaagacagaaatgaagacccaggttccaaaaatgaagggcagcttgctgctgtgcagcctgatgtcccacatggagggcagtcctccagccccacagctctctgggacatgctggaaaggaagtttctggaataccagcagttgactcacaagagccccattgagcgtcagaagagcctgttgagtcttctccccctattcctaaaggcctgggaacactccgtggggatcatctgctttcccagtctccaaaggctggctgaagacgtgtctgaccagcttgcccagcaactccagaaggcccttgtggggaagcctgcggagcaagctcggttggcagctggacagttgctgtggtggaagggggacgtggatcaggatggctacttgctcctgaagtcagtgtacgtgctcacggggacagactcggagacgctgggcagggttgctgagtctgggcttccagccctgctcctacagtgcctttacctcttctttgtctttcctctggacaaagatgagcttcttgagagtgatcttcaagttcaaaagatgttcgtgcagatgttgctcaatatttgcagtgactctcagggcctggagggactcctctcaggaagtgagctgcagtctctgctgattgccacgacctgccttcgggagcacagctgctgcttctggaaggaacccaccttctgcgtgctaagggcaatctccaaggcccagaacctcagcatcatccagtacctgcaggccacagactgtgtcaggctctccctccagaacctctccaggctcacggacactctccctgcccctgaagtgagcgaggctgtaagcctgatcttgggattcgtgaaggactcctaccccgtctcctcggctctgttcctggagtttgagaattcagagggctatcctctgctgctcaaagtgttacttcggtatgatgggctgacccagagcgaagtggacccgcatctggaggagctccttgggctggtggtgtggctgacaacctgtgggaggtcagagctgaaggtgtttgacagcatcacttaccctcagcttgaaggcttcaagttccatcatgaggcatctggggtgactgttaagaatcttcaggccttccaggtcctacagaatgttttccacaaagccagtgactctgtcctctgcatacaagtcttgtcagtcatcaggaccatgtgggcctggaatgctcgaaacttcttcctgctggagtggaccctgcagcccatctcgcagtttgtagagatcatgcccctgaagccggccccagtgcaggaacacttcttccagcttctagaggccctggtgttcgagctgcactacgtgcctcatgagatcctgcgaaaggtacagcatctgatcaaggagagccctgggccatcctgcaccctcatggccctgcagagcatcctcagcatcgctggtggggaccccctcttcaccgacatcttccgggactcagggctcctgggcctgctactggcacagcttcggaagcaagccaagatcatgaggaagtcaggaaacaaagtgtccactcctggtgttcaggatccagaaagagaactcacctgtgtgatgctgaggattgtagtcacacttctgaaaggctcggtgaggaatgcagttgtcctgaaggaccacggcatggtgcccttcatcaagatcttcctggatgacgagtgctaccgggaggcctcgctcagcatcttggagcagctctcagccatcaacgccgaggagtacatgagcatcattgtgggtgctctatgctcatccactcaaggggagctgcagctgaaactggatctcctgaagtctctgctccggatcctggtgacccccaagggtcgtgctgccttcagagtctccagcgggttcaacgggctgctgtctctgctctctgacctggaaggctccctccaggagcccccgctgcaggcatggggagcagtatcccccagacagaccctggagctggttttgtacactctctgtgctgtgtccgcagcgctgcactgggaccctgtcaatggctacttcttcaggaggaatgggctctttgagaagctggccgaggacctctgcctgctgggctgttttggagccctggaggaagagggcaacctgctgcgctcttgggtggacacaaaggccaggccatttgcagatttgctgggcactgccttttcctccagcggctcactcccaccccggatacagagctgcctccagatccttggctttctggacagcatggccagcggcaccctccacttgcgtggggacctgaaggagtccctgaggaccaagcaggggccggttgtggatgttcagaagggagaaactggcagtgacccccaacgcaacttcaagcagtggccagacctggaggagaggatggatgagggagatgctgcaatcatgcatcccggggtcgtgtgcatcatggtgaggctgctgcctcggttgtaccatgaagatcacccacagctttccgaggagatccagtgctccctggccagtcatatccagtccctggtgaagtcggagaagaaccgccaggtcatgtgcgaagcaggcttgcttgggaccctcatggcctcctgccacagggccctggtcaccagtggcagccccctccactcacgcctcatcaggatctttgagaagctcgcttcccaggccattgaaccggatgtgctaagacagtttctaggtcttggaattccctcatctctgtcggccacaacaaaaatccttgattcatctcacacacacagaggcaaccctgggtgctcagggtcacagactgcacagggcttggctgaggggccctggccagctgccccagatgctgggctgcaccctggagtcacacaggccccgcagcccttgggggaatcccaggattcaactactgctcttcagacggcgctgagcctcatctccatgacctccccacacatctggaagccaaacatctggaaagacaatctggctcagaaaccagttgctggagatgctgctcagtgtaatatcttccccccagcttcatctgtcctctgagtcaaaggaagagatgtttctgaaactggggcctgactggttcctgctgctcctgcagggccacctgcatgccagcaccactgtgctggcattgaagctgctgctgtactttctggcaagcccctccctccgcacacggtttagagatggcctgtgtgcaggatcctgggtggaacgcagcactgagggcgtggatattgtaatggacaacctgaagagccagtcaccactgcctgagcaaagcccatgcctgcttcctgggttccgtgtcttgaatgactttctggcccaccacgtccacattccagaggtctacctcatcgtctccaccttcttcctgcagacaccactcacagagctgatggacgggcccaaagacagccttgatgccatgcttcagtggctcctgcagaggcaccaccaggaagaagtcctccaggctgggctgtgcacagaaggtgccttgctcctcctggaaatgctgaaggccaccatgagccagcccctggcaggttctgaggatggtgcctgggcacagaccttcccggccagcgtgctgcagttcctcagcctcgtccaccgcacctacccccaggacccagcgtggcgagccccggagttcctccagaccttggccatagccgccttccccctgggagcccaaaagggggttggggctgagtccacccggaacaccagcagtcctgaggccgcagctgaaggcgacagcacagtggagggtctccaggctcccaccaaggcacatcccgcccggaggaagctgagggagttcacgcagctcctcttgagggagctcctgcttggagcctccagccccaagcagtggctgcccctggaggtgctcctggaggcttctccagaccacgccaccagccaacagaagcgagacttccagtccgaggtcctgctttctgctatggaactattccacatgacaagtggaggtgatgcagcgatgttcagagacggcaaagagcctcagccaagtgcagaagctgctgctgccccttctcttgccaacatctcctgcttcacccagaagctggtggagaagctgtacagtgggatgttctcggcagaccccaggcatatcctcctcttcatcctggagcacatcatggtggtcattgagactgcctcttctcaaagggacactgtcctcagcactttatacagcagtttaaataaagtcattctttattgcctatccaagccccagcagtccctctccgaatgcctcggccttctcagcatcctgggctttctgcaggagcactgggatgttgtctttgccacctacaattccaacatcagcttcctcctgtgtctcatgcattgccttttgctactcaatgagagaagttacccagaaggatttggattggagcccaagcctagaatgtctacttatcatcaagtcttcctttccccaaatgaagacgtgaaagaaaaaagagaagacttaccaagtttgagtgatgtccaacacaacatccagaagacagtgcagactctctggcagcagctggtggcacaaaggcagcagaccctggaggatgccttcaagatcgatctctctgtgaaacctggagagagggaagtgaagattgaagaggtcacaccgctctgggaggagacgatgctcaaggcctggcagcattacttagcatctgagaagaagtcactggcaagtcgttcaaatgttgcacaccacagcaaagtcactttgtggagtggaagcctgtcctcagccatgaagctgatgcccgggcggcaggccaaggaccctgagtgcaagacagaggattttgtgtcatgtatagagaactacagaagaagaggacaagagctatatgcatctttatacaaagaccatgtgcaaaggcgaaaatgtggcaacatcaaggcagccaacgcctgggccaggatccaggagcagctttttggggagctgggcttgtggagccagggggaagaaaccaagccctgttccccatgggaactcgactggagagaaggaccagctcgaatgaggaaacgcatcaaacgcttgtctcctttggaggccctgagctcaggaaggcacaaggaaagccaagacaaaaatgatcatatttctcaaacaaatgctgaaaaccaagatgaactgacactgagggaggctgagggcgagccggacgaggtgggggtggactgcacccagctgaccttcttcccagccttacacgaaagtctgcactcagaagacttcttggaactgtgtcgggaaagacaagttattttacaagagcttcttgataaagaaaaggtgacgcagaagttctccctggtgattgtgcagggccacctggtgtcagaaggggtcctgctttttggccaccaacacttctacatctgcgagaacttcacactgtctcccacgggtgatgtctactgtacccgtcactgcttatccaacatcagcgatccgttcattttcaacctgtgcagcaaagacaggtccactgaccattactcgtgccagtgccacagctacgctgacatgcgggagctacggcaggctcgcttcctcctgcaggacatcgccctggagatcttcttccacaatggatattccaagtttcttgtcttctacaacaatgatcggagtaaggcctttaaaagcttctgctctttccaacccagcctgaaggggaaagccacctcggaggacaccctcagtctaaggagataccccggctctgacaggatcatgctgcagaagtggcagaaaagggacatcagcaattttgagtatctcatgtacctcaacaccgcggctgggagaacctgcaatgactacatgcagtacccagtgttcccctgggtcctcgcagactacacctcagagacattgaacttggcaaatccgaagattttccgggatctttcaaagcccatgggggctcagaccaaggaaaggaagctgaaatttatccagaggtttaaagaagttgagaaaactgaaggagacatgactgtccagtgccactactacacccactactcctcggccatcatcgtggcctcctacctggtccggatgccacccttcacccaggccttctgcgctctgcagggcggaagcttcgacgtggcagacagaatgttccacagtgtgaagagcacgtgggagtcggcctccagagagaacatgagtgacgtcagggagctgaccccagagttcttctacctgcctgagttcttaaccaactgcaacggggtagagttcggctgcatgcaggacgggactgtgctaggagacgtgcagctccctccctgggctgatggggaccctcggaaattcatcagcctgcacagaaaggccctggaaagtgactttgtcagtgccaacctccaccattggatagaccttatttttgggtacaagcagcaggggccagccgcagtggatgctgttaatatcttccacccctacttctacggtgacagaatggacctcagcagcatcactgaccccctcatcaaaagcaccatcctggggtttgtcagcaactttggacaggtgcccaaacagctctttaccaaacctcacccagccaggactgcagcagggaagcctctgcctggaaaggatgtctccacccccgtgagcctgcctggccacccacagccctttttctacagcctgcagtcgctgaggccctcccaggtcacggtcaaagatatgtacctcttttctctaggctcagagtcccccaaaggggccattggccacattgtctctactgagaagaccattctggctgtagagaggaacaaagtgctgctgcctcctctctggaacaggaccttcagctggggctttgatgacttcagctgctgcttggggagctacggctccgacaaggtcctgatgacattcgagaacctggctgcctggggccgctgtctgtgcgccgtgtgcccatccccaacaacgattgtcacctctgggaccagcactgtggtgtgtgtgtgggagctcagcatgaccaaaggccgcccgaggggcttgcgcctccggcaggccttgtatggacacacacaggctgtcacgtgcctggcagcgtcagtcaccttcagcctcctggtgagcggctcccaggactgcacctgtatcctgtgggatctggaccacctcacccacgtgacccgcctgcccgcccatcgggaaggcatctcagccatcaccatcagtgacgtctcaggcaccattgtctcctgtgcgggagcacacttgtccctgtggaatgtcaatggacagcccctggccagcatcaccacagcctggggcccagaaggagccataacctgctgctgcctgatggagggcccagcatgggacacaagccagatcatcatcaccgggagtcaagacggcatggtccgggtttggaagactgaggatgtgaagatgtctgttcctggacggccagcaggagaggagcccccggctcagcctccaagcccaagaggccacaagtgggagaagaacctggccttgagtcgagagctggacgttagcattgctttgacagggaagcccagcaaaaccagccccgcagtgactgctctggccgtgtccagaaaccacaccaaactcctggttggtgatgagagggggagaatattctgctggtctgcagatgggtaggaagagagaggcagcagaggctctggcacaacagtgccaggctgagggtggcagaggtgactggggcctgagctctgcctacagaagaaacccccagggcctccttccccacagttctcaaggaagggcctctggcaatcacagctctgcagcccaaccctctccatggccgatgggacttctatgaaaaggatgagcacacacactcggagggctgagcagcacgctggaaactgtgacttggtgatgcccagctgcacacgaaattacacatgactcaccttattaagggctattgcactgaaaaaaaaaaagatgggtcgcttactggaaattattgtattgtctttattttattaaagcaactatgttttaaatgc

SEQ ID NO: 206699 - DNA, 9558 bp, Artificial Sequence
  derived and/or modified sequence
ctgaattcagatctgctttgccacggcatggaggcagaagatctttcaaaggctgaagacagaaatgaagacccaggttccaaaaatgaagggcagcttgctgctgtgcagcctgatgtcccacatggagggcagtcctccagccccacagctctctgggacatgctggaaaggaagtttctggaataccagcagttgactcacaagagccccattgagcgtcagaagagcctgttgagtcttctccccctattcctaaaggcctgggaacactccgtggggatcatctgctttcccagtctccaaaggctggctgaagacgtgtctgaccagcttgcccagcaactccagaaggcccttgtggggaagcctgcggagcaagctcggttggcagctggacagttgctgtggtggaagggggacgtggatcaggatggctacttgctcctgaagtcagtgtacgtgctcacggggacagactcggagacgctgggcagggttgctgagtctgggcttccagccctgctcctacagtgcctttacctcttctttgtctttcctctggacaaagatgagcttcttgagagtgatcttcaagttcaaaagatgttcgtgcagatgttgctcaatatttgcagtgactctcagggcctggagggactcctctcaggaagtgagctgcagtctctgctgattgccacgacctgccttcgggagcacagctgctgcttctggaaggaacccaccttctgcgtgctaagggcaatctccaaggcccagaacctcagcatcatccagtacctgcaggccacagactgtgtcaggctctccctccagaacctctccaggctcacggacactctccctgcccctgaagtgagcgaggctgtaagcctgatcttgggattcgtgaaggactcctaccccgtctcctcggctctgttcctggagtttgagaattcagagggctatcctctgctgctcaaagtgttacttcggtatgatgggctgacccagagcgaagtggacccgcatctggaggagctccttgggctggtggtgtggctgacaacctgtgggaggtcagagctgaaggtgtttgacagcatcacttaccctcagcttgaaggcttcaagttccatcatgaggcatctggggtgactgttaagaatcttcaggccttccaggtcctacagaatgttttccacaaagccagtgactctgtcctctgcatacaagtcttgtcagtcatcaggaccatgtgggcctggaatgctcgaaacttcttcctgctggagtggaccctgcagcccatctcgcagtttgtagagatcatgcccctgaagccggccccagtgcaggaacacttcttccagcttctagaggccctggtgttcgagctgcactacgtgcctcatgagatcctgcgaaaggtacagcatctgatcaaggagagccctgggccatcctgcaccctcatggccctgcagagcatcctcagcatcgctggtggggaccccctcttcaccgacatcttccgggactcagggctcctgggcctgctactggcacagcttcggaagcaagccaagatcatgaggaagtcaggaaacaaagtgtccactcctggtgttcaggatccagaaagagaactcacctgtgtgatgctgaggattgtagtcacacttctgaaaggctcggtgaggaatgcagttgtcctgaaggaccacggcatggtgcccttcatcaagatcttcctggatgacgagtgctaccgggaggcctcgctcagcatcttggagcagctctcagccatcaacgccgaggagtacatgagcatcattgtgggtgctctatgctcatccactcaaggggagctgcagctgaaactggatctcctgaagtctctgctccggatcctggtgacccccaagggtcgtgctgccttcagagtctccagcgggttcaacgggctgctgtctctgctctctgacctggaaggctccctccaggagcccccgctgcaggcatggggagcagtatcccccagacagaccctggagctggttttgtacactctctgtgctgtgtccgcagcgctgcactgggaccctgtcaatggctacttcttcaggaggaatgggctctttgagaagctggccgaggacctctgcctgctgggctgttttggagccctggaggaagagggcaacctgctgcgctcttgggtggacacaaaggccaggccatttgcagatttgctgggcactgccttttcctccagcggctcactcccaccccggatacagagctgcctccagatccttggctttctggacagcatggccagcggcaccctccacttgcgtggggacctgaaggagtccctgaggaccaagcaggggccggttgtggatgttcagaagggagaaactggcagtgacccccaacgcaacttcaagcagtggccagacctggaggagaggatggatgagggagatgctgcaatcatgcatcccggggtcgtgtgcatcatggtgaggctgctgcctcggttgtaccatgaagatcacccacagctttccgaggagatccagtgctccctggccagtcatatccagtccctggtgaagtcggagaagaaccgccaggtcatgtgcgaagcaggcttgcttgggaccctcatggcctcctgccacagggccctggtcaccagtggcagccccctccactcacgcctcatcaggatctttgagaagctcgcttcccaggccattgaaccggatgtgctaagacagtttctaggtcttggaattccctcatctctgtcggccacaacaaaaatccttgattcatctcacacacacagaggcaaccctgggtgctcagggtcacagactgcacagggcttggctgaggggccctggccagctgccccagatgctgggctgcaccctggagtcacacaggccccgcagcccttgggggaatcccaggattcaactactgctcttcagacggcgctgagcctcatctccatgacctccccacgcaacctgcagcctcagagggcagccctggccccatcgtttgtggaatttgacatgtccgtggaaggttatggctgtttgtttattccaaccctgtccacagttatgggaaccagcactgagtactctgtctctggaggaattgggacaggtgccaccagaccgttccctcctcctggaggtctgaccttctcctgctggttcctgatcagccggcatggagctgccactgagggccacccgctgcgcttcctgacgttggtgcgccacctggccaggactgagcaaccctttgtttgcttctccgtcagcctctgcccagacgacctctccttggttgtttctacagaagagaaggagtttcagcctctggatgtcatggaacctgaggatgactccgagccttctgcaggatgccagcttcaggtcaggtgtggccagctcctggcttgtggtcagtggcatcacttggctgtggttgtcactaaggaaatgaaaaggcattgtacagtttccacctgtctggatggacaggtcattggctctgccaagatgttatacatccaggctctaccagggcctttcctttctatggatccatccgcatttgtggatgtttatggatatattgctactcctcgagtctggaaacaaaagtcttcattaatctggcgtcttggccccacatacctctttgaagaagccatttcaatggaaactctggaagttattaacaaacttggcccaagatattgtggtaacttccaagctgtgcatgtccaaggggaggacctggacagtgaagccacgccctttgttgcagaagaaagagtttcttttggacttcacatagccagctcctctatcaccagtgtagcggacatcagaaatgcttacaatgaggtggacagccgcctgatcgccaaagagatgaacatttcatcccgtgacaatgccatgcccgtgttcttgctgaggaattgtgctggccacctgtcagggtctctgcggaccattggagctgttgctgtgggtcaattaggggtgagggtattccactccagccctgctgccagcagcctggacttcattggcgggcctgccatcctcctgggcctcatctccttagcgacagatgaccataccatgtatgcggctgtgaaagttctgcactcggtcctgaccagtaatgccatgtgtgacttcctgatgcaacacatctgtgggtaccagataatggcgtttctcctgaggaagaaggcctctctcctgaaccatcgaatttttcagctgatcctctcagtggctggcactgtggagctgggcttcaggtcatctgctatcaccaacactggtgtcttccagcacatcctctgcaatttcgagctctggatgaatactgcagacaatctggagctcagcctcttttcccatcttttggaaatccttcaatcaccaagggaaggacccaggaatgctgaagctgcccaccaggcacagcttatacccaagctcatcttcctattcaatgagccgagcctcatcccctccaagatctccaccatcattggcatcctggcctgtcagctgaggggccacttcagcacccaggacttgctcaggattgggctgtttgttgtgtacaccctcaagccttcgtcggtgaatgagaggcagatctgcatggacggagccctggacccttccctgcctgctggaagccaaacatctggaaagacaatctggctcagaaaccagttgctggagatgctgctcagtgtaatatcttccccccagcttcatctgtcctctgagtcaaaggaagagatgtttctgaaactggggcctgactggttcctgctgctcctgcagggccacctgcatgccagcaccactgtgctggcattgaagctgctgctgtactttctggcaagcccctccctccgcacacggtttagagatggcctgtgtgcaggatcctgggtggaacgcagcactgagggcgtggatattgtaatggacaacctgaagagccagtcaccactgcctgagcaaagcccatgcctgcttcctgggttccgtgtcttgaatgactttctggcccaccacgtccacattccagaggtctacctcatcgtctccaccttcttcctgcagacaccactcacagagctgatggacgggcccaaagacagccttgatgccatgcttcagtggctcctgcagaggcaccaccaggaagaagtcctccaggctgggctgtgcacagaaggtgccttgctcctcctggaaatgctgaaggccaccatgagccagcccctggcaggttctgaggatggtgcctgggcacagaccttcccggccagcgtgctgcagttcctcagcctcgtccaccgcacctacccccaggacccagcgtggcgagccccggagttcctccagaccttggccatagccgccttccccctgggagcccaaaagggggttggggctgagtccacccggaacaccagcagtcctgaggccgcagctgaaggcgacagcacagtggagggtctccaggctcccaccaaggcacatcccgcccggaggaagctgagggagttcacgcagctcctcttgagggagctcctgcttggagcctccagccccaagcagtggctgcccctggaggtgctcctggaggcttctccagaccacgccaccagccaacagaagcgagacttccagtccgaggtcctgctttctgctatggaactattccacatgacaagtggaggtgatgcagcgatgttcagagacggcaaagagcctcagccaagtgcagaagctgctgctgccccttctcttgccaacatctcctgcttcacccagaagctggtggagaagctgtacagtgggatgttctcggcagaccccaggcatatcctcctcttcatcctggagcacatcatggtggtcattgagactgcctcttctcaaagggacactgtcctcagcactttatacagcagtttaaataaagtcattctttattgcctatccaagccccagcagtccctctccgaatgcctcggccttctcagcatcctgggctttctgcaggagcactgggatgttgtctttgccacctacaattccaacatcagcttcctcctgtgtctcatgcattgccttttgctactcaatgagagaagttacccagaaggatttggattggagcccaagcctagaatgtctacttatcatcaagtcttcctttccccaaatgaagacgtgaaagaaaaaagagaagacttaccaagtttgagtgatgtccaacacaacatccagaagacagtgcagactctctggcagcagctggtggcacaaaggcagcagaccctggaggatgccttcaagatcgatctctctgtgaaacctggagagagggaagtgaagattgaagaggtcacaccgctctgggaggagacgatgctcaaggcctggcagcattacttagcatctgagaagaagtcactggcaagtcgttcaaatgttgcacaccacagcaaagtcactttgtggagtggaagcctgtcctcagccatgaagctgatgcccgggcggcaggccaaggaccctgagtgcaagacagaggattttgtgtcatgtatagagaactacagaagaagaggacaagagctatatgcatctttatacaaagaccatgtgcaaaggcgaaaatgtggcaacatcaaggcagccaacgcctgggccaggatccaggagcagctttttggggagctgggcttgtggagccagggggaagaaaccaagccctgttccccatgggaactcgactggagagaaggaccagctcgaatgaggaaacgcatcaaacgcttgtctcctttggaggccctgagctcaggaaggcacaaggaaagccaagacaaaaatgatcatatttctcaaacaaatgctgaaaaccaagatgaactgacactgagggaggctgagggcgagccggacgaggtgggggtggactgcacccagctgaccttcttcccagccttacacgaaagtctgcactcagaagacttcttggaactgtgtcgggaaagacaagttattttacaagagcttcttgataaagaaaaggtgacgcagaagttctccctggtgattgtgcagggccacctggtgtcagaaggggtcctgctttttggccaccaacacttctacatctgcgagaacttcacactgtctcccacgggtgatgtctactgtacccgtcactgcttatccaacatcagcgatccgttcattttcaacctgtgcagcaaagacaggtccactgaccattactcgtgccagtgccacagctacgctgacatgcgggagctacggcaggctcgcttcctcctgcaggacatcgccctggagatcttcttccacaatggatattccaagtttcttgtcttctacaacaatgatcggagtaaggcctttaaaagcttctgctctttccaacccagcctgaaggggaaagccacctcggaggacaccctcagtctaaggagataccccggctctgacaggatcatgctgcagaagtggcagaaaagggacatcagcaattttgagtatctcatgtacctcaacaccgcggctgggagaacctgcaatgactacatgcagtacccagtgttcccctgggtcctcgcagactacacctcagagacattgaacttggcaaatccgaagattttccgggatctttcaaagcccatgggggctcagaccaaggaaaggaagctgaaatttatccagaggtttaaagaagttgagaaaactgaaggagacatgactgtccagtgccactactacacccactactcctcggccatcatcgtggcctcctacctggtccggatgccacccttcacccaggccttctgcgctctgcagggcggaagcttcgacgtggcagacagaatgttccacagtgtgaagagcacgtgggagtcggcctccagagagaacatgagtgacgtcagggagctgaccccagagttcttctacctgcctgagttcttaaccaactgcaacggggtagagttcggctgcatgcaggacgggactgtgctaggagacgtgcagctccctccctgggctgatggggaccctcggaaattcatcagcctgcacagaaaggccctggaaagtgactttgtcagtgccaacctccaccattggatagaccttatttttgggtacaagcagcaggggccagccgcagtggatgctgttaatatcttccacccctacttctacggtgacagaatggacctcagcagcatcactgaccccctcatcaaaagcaccatcctggggtttgtcagcaactttggacaggtgcccaaacagctctttaccaaacctcacccagccaggactgcagcagggaagcctctgcctggaaaggatgtctccacccccgtgagcctgcctggccacccacagccctttttctacagcctgcagtcgctgaggccctcccaggtcacggtcaaagatatgtacctcttttctctaggctcagagtcccccaaaggggccattggccacattgtctctactgagaagaccattctggctgtagagaggaacaaagtgctgctgcctcctctctggaacaggaccttcagctggggctttgatgacttcagctgctgcttggggagctacggctccgacaaggtcctgatgacattcgagaacctggctgcctggggccgctgtctgtgcgccgtgtgcccatccccaacaacgattgtcacctctgggaccagcactgtggtgtgtgtgtgggagctcagcatgaccaaaggccgcccgaggggcttgcgcctccggcaggccttgtatggacacacacaggctgtcacgtgcctggcagcgtcagtcaccttcagcctcctggtgagcggctcccaggactgcacctgtatcctgtgggatctggaccacctcacccacgtgacccgcctgcccgcccatcgggaaggcatctcagccatcaccatcagtgacgtctcaggcaccattgtctcctgtgcgggagcacacttgtccctgtggaatgtcaatggacagcccctggccagcatcaccacagcctggggcccagaaggagccataacctgctgctgcctgatggagggcccagcatgggacacaagccagatcatcatcaccgggagtcaagacggcatggtccgggtttggaagactgaggatgtgaagatgtctgttcctggtctgcagatgggtaggaagagagaggcagcagaggctctggcacaacagtgccaggctgagggtggcagaggtgactggggcctgagctctgcctacagaagaaacccccagggcctccttccccacagttctcaaggaagggcctctggcaatcacagctctgcagcccaaccctctccatggccgatgggacttctatga

SEQ ID NO: 206700 - DNA, 2117 bp, Artificial Sequence
  derived and/or modified sequence
attcctctgtcctcactcccctgtcaacttctaaaacagagtagcaagagcagcaggctgtggcaggccaactccacatgctcatggctctggagggctcagcacaggtccttttcaaggagataccccggctctgacaggatcatgctgcagaagtggcagaaaagggacatcagcaattttgagtatctcatgtacctcaacaccgcggctgggagaacctgcaatgactacatgcagtacccagtgttcccctgggtcctcgcagactacacctcagagacattgaacttggcaaatccgaagattttccgggatctttcaaagcccatgggggctcagaccaaggaaaggaagctgaaatttatccagaggtttaaagaagttgagaaaactgaaggagacatgactgtccagtgccactactacacccactactcctcggccatcatcgtggcctcctacctggtccggatgccacccttcacccaggccttctgcgctctgcagggcggaagcttcgacgtggcagacagaatgttccacagtgtgaagagcacgtgggagtcggcctccagagagaacatgagtgacgtcagggagctgaccccagagttcttctacctgcctgagttcttaaccaactgcaacggggtagagttcggctgcatgcaggacgggactgtgctaggagacgtgcagctccctccctgggctgatggggaccctcggaaattcatcagcctgcacagaaaggccctggaaagtgactttgtcagtgccaacctccaccattggatagaccttatttttgggtacaagcagcaggggccagccgcagtggatgctgttaatatcttccacccctacttctacggtgacagaatggacctcagcagcatcactgaccccctcatcaaaagcaccatcctggggtttgtcagcaactttggacaggtgcccaaacagctctttaccaaacctcacccagccaggactgcagcagggaagcctctgcctggaaaggatgtctccacccccgtgagcctgcctggccacccacagccctttttctacagcctgcagtcgctgaggccctcccaggtcacggtcaaagatatgtacctcttttctctaggctcagagtcccccaaaggggccattggccacattgtctctactgagaagaccattctggctgtagagaggaacaaagtgctgctgcctcctctctggaacaggaccttcagctggggctttgatgacttcagctgctgcttggggagctacggctccgacaaggtcctgatgacattcgagaacctggctgcctggggccgctgtctgtgcgccgtgtgcccatccccaacaacgattgtcacctctgggaccagcactgtggtgtgtgtgtgggagctcagcatgaccaaaggccgcccgaggggcttgcgcctccggcaggccttgtatggacacacacaggctgtcacgtgcctggcagcgtcagtcaccttcagcctcctggtgagcggctcccaggactgcacctgtatcctgtgggatctggaccacctcacccacgtgacccgcctgcccgcccatcgggaaggcatctcagccatcaccatcagtgacgtctcaggcaccattgtctcctgtgcgggagcacacttgtccctgtggaatgtcaatggacagcccctggccagcatcaccacagcctggggcccagaaggagccataacctgctgctgcctgatggagggcccagcatgggacacaagccagatcatcatcaccgggagtcaagacggcatggtccgggtttggaagactgaggatgtgaagatgtctgttcctggacggccagcaggagaggagcccccggctcagcctccaaccctctccatggccgatgggacttctatgaaaaggatgagcacacacactcggagggctgagcagcacgctggaaactgtgacttggtgatgcccagctgcacacgaaattacacatgactcaccttattaagggctattgcactgaaaaaaaaaaagatgggtcgcttactggaaattattgtattgtctttattttattaaagcaactatgtttt

SEQ ID NO: 206701 - protein, 1009 aa, Artificial Sequence
  derived and/or modified sequence
MGSRIKQNPETTFEVYVEVAYPRTGGTLSDPEVQRQFPEDYSDQEVLQTLTKFCFPFYVDSLTVSQVGQNFTFVLTDIDSKQRFGFCRLSSGAKSCFCILSYLPWFEVFYKLLNILADYTTKRQENQWNELLETLHKLPIPDPGVSVHLSVHSYFTVPDTRELPSIPENRNLTEYFVAVDVNNMLHLYASMLYERRILIICSKLSTLTACIHGSAAMLYPMYWQHVYIPVLPPHLLDYCCAPMPYLIGIHLSLMEKVRNMALDDVVILNVDTNTLETPFDDLQSLPNDVISSLKNRLKKVSTTTGDGVARAFLKAQAAFFGSYRNALKIEPEEPITFCEEAFVSHYRSGAMRQFLQNATQLQLFKQFIDGRLDLLNSGEGFSDVFEEEINMGEYAGSDKLYHQWLSTVRKGSGAILNTVKTKANPAMKTVYKFAKDHAKMGIKEVKNRLKQKDIAENGCAPTPEEQLPKTAPSPLVEAKDPKLREDRRPITVHFGQVRPPRPHVVKRPKSNIAVEGRRTSVPSPEQPQPYRTLRESDSAEGDEAESPEQQVRKSTGPVPAPPDRAASIDLLEDVFSNLDMEAALQPLGQAKSLEDLRAPKDLREQPGTFDYQRLDLGGSERSRGVTVALKLTHPYNKLWSLGQDDMAIPSKPPAASPEKPSALLGNSLALPRRPQNRDSILNPSDKEEVPTPTLGSITIPRPQGRKTPELGIVPPPPIPRPAKLQAAGAALGDVSERLQTDRDRRAALSPGLLPGVVPQGPTELLQPLSPGPGAAGTSSDALLALLDPLSTAWSGSTLPSRPATPNVATPFTPQFSFPPAGTPTPFPQPPLNPFVPSMPAAPPTLPLVSTPAGPFGAPPASLGPAFASGLLLSSAGFCAPHRSQPNLSALSMPNLFGQMPMGTHTSPLQPLGPPAVAPSRIRTLPLARSSARAAETKQGLALRPGDPPLLPPRPPQGLEPTLQPSAPQQARDPFEDLLQKTKQDVSPSPALAPAPDSVEQLRKQWETFE

SEQ ID NO: 206702 - DNA, 3030 bp, Artificial Sequence
  derived and/or modified sequence
atggggagccgcatcaagcaaaacccagagaccacatttgaggtgtacgtggaagtagcttaccctcgcaccggaggaactttgagcgatcccgaagtacagcgacagttccccgaagattacagcgatcaggaagtgctccagactttgacaaagttttgctttccattctacgtagattccctgactgtgtcccaggtaggtcagaacttcactttcgtgctgacagacatcgactcaaagcaaagattcggattttgccgcctgtcgtctggggctaaatcgtgtttttgcattctttcatatttgccatggtttgaggtcttctacaaattactgaacatcctagctgactacaccacgaagcggcaggagaatcagtggaacgagctgctggagactctgcacaaactcccaatcccagacccaggcgtcagcgtccatctcagtgtccacagctactttacggtgccagacactcgggagttgcccagcatcccagagaaccggaatttaacagaatatttcgtagcggttgatgttaacaatatgttgcacctttatgccagcatgctttacgagcgccgcatactgattatttgttctaagttgtcaaccttaaccgcatgcatacatgggtccgccgccatgctgtaccctatgtattggcaacacgtttacatccccgtgctgccaccccaccttctcgactattgttgcgctcctatgccttatctgattggaattcatctttcacttatggagaaggttaggaacatggcgctggacgacgtggtgatactgaatgtcgatacaaacacgttggagacaccctttgatgatctgcagtccttgcccaatgatgtcatcagcagcttgaaaaacagattgaagaaggtgtccaccaccactggcgacggggtagcccgcgccttcttaaaagcgcaagccgctttcttcggcagctatcgtaatgcactcaagatcgagcctgaggaacccatcacattctgtgaggaggctttcgtgtcccactatcggtcaggagccatgaggcagtttctgcagaacgccacacaactccaacttttcaagcagttcatcgacggacgcctcgatttactgaactctggagagggcttcagcgatgtgttcgaggaggagatcaatatgggagagtacgcgggatccgacaagttgtaccatcagtggctatccacagttcggaaaggcagtggggcaattcttaatacggtcaagaccaaggccaacccagccatgaagaccgtgtacaaatttgctaaggaccacgccaagatgggcataaaggaagtcaaaaacagactgaaacagaaagatatagccgaaaatggctgcgcacctacccctgaggagcagctgcctaaaactgccccatcacctctggtggaagccaaggatcccaagctccgggaagaccgaaggcccattactgtccatttcggacaggtgaggccaccaaggccccatgtcgtgaaacgccccaaaagcaatatagccgtcgaaggcagaaggacctcagtgccgagtccagaacagccccaaccgtatcgcactttacgggagagtgattctgccgagggggacgaagccgaatcccccgagcaacaggtaagaaaatctaccggacctgtgcctgccccgcccgaccgagccgcctctatcgatctgctggaagatgtgttttcaaatctcgacatggaggctgccctgcagcccttaggacaagcaaaaagcctggaagatctcagggcgccaaaagacctccgagagcagcctgggaccttcgactaccagcggctcgacctgggaggcagcgagaggagccggggcgtgaccgtggctctgaagctcacacacccatataacaaactgtggtccctggggcaggacgacatggctattcctagtaagcctccagccgcctccccagagaagccgtccgccctgctgggaaactcactggccctgccaaggcgcccccagaatagggatagtatcctcaacccctccgacaaagaggaggtcccgacacccacattgggctcgattacgatccctcggccccagggccgcaagacaccagagctaggaattgtgcctcctcccccgattcctagacctgccaaactgcaggctgcaggtgctgccctaggggatgtgtccgagcgcctccaaacagaccgcgatcgtcgtgcagccctttcacctggcctcctaccgggagtggtcccccaggggcccacagaattgctacaaccattgtctccaggacctggcgccgccggcaccagcagcgacgccctcttggctctcttggaccctctgagtaccgcttggtcaggtagtacacttccctcaagaccggctacacccaatgtggccactcctttcaccccccaattttcattcccacctgccggaacccccactcccttccctcagcccccattgaacccattcgttccaagcatgcccgcagccccacctacactgcccctcgtatccactcctgccggtccttttggtgccccgcctgcatcgctaggacccgcatttgcctcggggttgcttctctcctccgcgggcttttgcgcacctcaccgttcccaacctaatctcagcgccctgagcatgccaaacttatttgggcagatgccaatgggaacccatactagtccgctccagcccttgggcccccctgccgtcgcgccttctagaatacgcaccctacccctagcaaggagctcagccagggccgctgagaccaaacagggccttgcactccgacctggagacccccctctgttgccaccacgaccgccccagggcctcgagccaaccctccaaccttccgctccgcagcaagctcgcgatccctttgaggatctgctccaaaagactaaacaggatgtctcccctagcccagccctggcaccggctccggattcagttgagcagctgcggaagcagtgggagaccttcgagtag

SEQ ID NO: 206703 - DNA, 3030 bp, Artificial Sequence
  derived and/or modified sequence
atgggcagccgcatcaagcagaaccctgagaccacctttgaggtgtatgtggaggtggcctaccccaggactggaggcaccctgagtgaccctgaggtgcagaggcagtttcctgaggactacagcgaccaggaggtgctgcagaccctgaccaagttctgcttccccttctacgtggacagcctgactgtgtcccaggtgggccagaacttcacctttgtgctgacagacatcgacagcaagcagcgcttcggcttctgccgcctgagcagcggggccaagagctgcttctgcatcctgagctacctgccctggtttgaggtgttctacaagctgctgaacatcctggccgactacaccaccaagaggcaggagaaccagtggaatgagctgctggagaccctgcacaagctgcccatcccagaccccggggtgtctgtgcacctgtctgtgcacagctacttcaccgtgcctgacacccgggagctgcccagcatccctgagaacagaaacctgacagagtactttgtggccgtggatgtgaacaacatgctgcacctgtatgcctccatgctgtatgaaagacgcatcctgatcatctgcagcaagctgagcaccctgacagcctgcatccacggcagcgctgccatgctgtaccccatgtactggcagcacgtgtacatccctgtgctgcccccccacctgctggactactgctgtgcccccatgccctacctgattggcatccacctgagcctgatggagaaggtgaggaacatggccctggatgatgtggtgatcctgaatgtggacaccaacaccctggagaccccatttgatgacctgcagagcctgcccaatgatgtgatcagcagcctgaagaaccggctgaagaaggtgtccaccaccactggagatggagtggcccgggccttcctgaaggcccaggccgccttcttcggcagctacagaaatgccctgaagattgagcctgaggagcccatcaccttctgtgaggaggcctttgtgagccactaccgcagcggggccatgaggcagttcctgcagaatgccacccagctgcagctgttcaagcagttcattgatggccgcctggacctgctgaacagcggggagggcttcagtgatgtgtttgaggaggagatcaacatgggagaatatgccggcagtgacaagctgtaccaccagtggctgagcacagtgaggaagggcagcggggccatcctgaacacagtgaagaccaaggccaacccagccatgaagacagtgtacaagtttgccaaggaccacgccaagatgggcatcaaggaggtgaagaaccggctgaagcagaaggacattgctgaaaatggctgtgcccccaccccagaggagcagctgcccaagacagcccccagccccctggtggaggccaaggaccccaagctgagagaagatagaagacccatcaccgtgcacttcggccaggtgcggcccccccggccccacgtggtgaagaggcccaagagcaacattgctgtggagggccgccgcacctctgtgcccagccctgagcagccccagccctaccgcaccctgcgggagagtgacagcgcagaaggagatgaggccgagagccctgagcagcaggtgaggaagagcactggacctgtgcctgcccccccagacagagctgccagcattgacctgctggaggatgtgttcagcaacctggacatggaggccgccctgcagcccctgggccaggccaagagcctggaggacctgcgggcccccaaggacctgcgggagcagcccggcacctttgactaccagaggctggacctgggcggcagcgagaggagccggggcgtgacagtggccctgaagctgacccacccctacaacaagctgtggagcctgggccaggatgacatggccatccccagcaagcccccagctgccagccctgagaagcccagcgccctgctgggcaacagcctggccctgccccggcggccccagaacagagacagcatcctgaaccccagcgacaaggaggaggtgcccacccccaccctgggcagcatcaccatcccccggccccagggcaggaagaccccagagctgggcatcgtgcccccaccacccatccccaggcctgccaagctgcaggccgccggggccgccctgggagatgtgtctgagcggctgcagacagaccgggaccggcgggccgccctgagccctggcctgctgcccggggtggtgccccagggccccacagagctgctgcagcccctgagccctggccctggagctgctggcaccagcagtgatgccctgctggccctgctggaccccctgagcacagcctggagcggcagcaccctgcccagcaggcctgccacccccaacgtggccacccccttcaccccccagttctccttccccccagctggcacccccacccccttcccccagccccccctgaacccctttgtgcccagcatgcctgctgccccacccaccctgcccctggtgtccaccccagctggcccctttggagcccccccagccagcctgggccctgcctttgccagcggcctgctgctgagcagcgctggcttctgtgccccccacaggagccagcccaacctgagcgccctgtccatgcccaacctgtttggccagatgcccatgggcacccacaccagccccctgcagcccctgggccccccagctgtggcccccagccgcatccgcaccctgcccctggcccggagcagcgcccgggctgctgagaccaagcagggcctggccctgcggcctggggacccccccctgctgcccccccggcccccccagggcctggagcccaccctgcagcccagcgccccccagcaggcccgggacccctttgaggacctgctgcagaagaccaagcaggatgtgagccccagccctgccctggccccagccccagattctgtggagcagctgaggaagcagtgggagacctttgaatag

SEQ ID NO: 206704 - DNA, 3030 bp, Artificial Sequence
  derived and/or modified sequence
atgggcagccggatcaagcagaaccccgagaccaccttcgaggtgtacgtcgaggtcgcttatccgcgcacaggaggaaccttgagcgaccccgaagttcagcggcagttccctgaggactatagtgaccaagaggtgctgcagactttgaccaagttctgctttcccttctacgttgactcgctcactgtcagccaggttggccagaatttcacgttcgtactcaccgatatcgactccaagcagcgtttcgggttttgtagactgagctcgggggcaaagagctgtttctgtattctctcatatttgccctggtttgaagttttctataagctgctgaatattctggctgattacacaacaaagcggcaggaaaaccagtggaacgagttgcttgagacgctgcacaaactgcctatccctgatccgggcgtctccgtgcatttgtccgtccactcctactttactgtccccgacacccgggaacttccgtcaatcccggagaacagaaacttgacggagtacttcgtcgcggtggacgtcaacaatatgctgcacctgtacgctagtatgctctacgaaagaagaatcttaattatctgctctaagctgtccacactcactgcctgtattcacggcagtgccgctatgctgtatcctatgtattggcaacatgtatacattcccgttttacctccccatctccttgattattgctgcgctcccatgccttatcttattggtatccacttgagtctgatggagaaagtgcgtaacatggcactggatgatgtcgtaatcctgaacgtagacacgaataccctggagacacctttcgacgacctgcaaagcctgccaaatgatgtaatatcctccctaaaaaacaggctgaaaaaggtgtctacaacaacaggcgatggcgtcgcgcgggcattcctgaaggcacaggcagcatttttcggctcatatcgaaatgccctcaaaattgaacccgaggaaccaataaccttttgcgaggaagctttcgtttcccactataggtcaggtgcaatgcggcagttcctgcagaacgctacccagctccagctttttaagcaattcattgacgggcgtctggatctgctgaacagcggagaaggcttctccgacgtattcgaagaggaaataaatatgggagagtacgctggctccgacaaactgtaccatcagtggctgtcgacggttcgcaaaggtagtggtgccattctcaacacggttaaaactaaggccaacccggccatgaaaaccgtatataaattcgcaaaggaccacgctaagatgggtatcaaggaagttaaaaacaggttgaagcaaaaggacatcgccgaaaatggctgcgctccgaccccggaggaacagctgccaaagactgcaccttctcccctcgtagaggccaaagacccgaagcttcgcgaagatcggagacctattaccgtccacttcgggcaggtgcggccacccagaccccatgttgtgaagagacccaaaagcaatatcgcagttgagggccgccggacgtctgtgccatctcccgagcaaccccagccatatcggaccctgcgagagtccgacagcgcagaaggcgatgaagccgagagcccagaacagcaggttcgaaaatcaacgggtccagtccctgcgccaccggatagagcggcttctatcgacctgctggaagatgtgttctccaatctggacatggaggccgccttgcagccactgggccaggccaagtcattagaagacctgcgggccccaaaggacctgcgtgagcagccaggaacgtttgactaccaacggctcgatctcggcggcagtgagcgatcgagaggggtgacagtcgccctgaagctgacccacccatataacaagctctggtcattaggacaggacgacatggccatccccagtaagccccctgccgcttctccggagaaacctagcgctctcctggggaactccctggcgctgccaaggcgcccccagaatcgtgattctattctcaatccctccgataaggaagaggtgcctactccaaccttagggagcatcactataccgagaccccagggccgaaagaccccagagctgggcattgtacctcctccaccaattccgaggcctgccaaactgcaggcggcaggcgcagctcttggagatgtctctgaaagacttcaaactgacagggaccgcagggccgccctgtcccccggtctactgcccggggtggttccacagggcccaactgagttgctgcagcccctctcccctggccctggcgcggccggcacatcatccgacgccctgttagccctcctggatccactgagcacggcctggagcggctcaaccctcccatctaggccggcgacccccaatgtggcaactccattcactcctcagttcagcttcccccctgctggcacgccaaccccattccctcagcctcccctcaacccctttgttccctccatgcccgccgctcccccaacactgccactggtcagcactcctgcaggtcctttcggggccccacccgcttctctcgggcccgcattcgcgagcgggttactgctttcctccgctggattctgcgctccccaccgtagtcaacctaatctttccgcattatcgatgcccaacctgtttgggcaaatgcctatgggcacacatacaagtccactacaacccctgggcccccctgcagtggctccttcgcgaattcgcaccctccctttggcccggagtagcgctcgggccgccgaaactaagcagggactggccctgcggccaggagatcccccacttctaccaccacggccccctcaaggcttggagccaacattgcagccctccgccccccagcaggcgagagaccccttcgaggatcttctgcagaaaaccaagcaggatgtctccccatcccctgcacttgccccagcccctgacagtgttgagcaacttcgcaaacagtgggaaacatttgaatag

SEQ ID NO: 206705 - DNA, 3030 bp, Artificial Sequence
  derived and/or modified sequence
atgggaagtcgtataaaacagaaccctgaaacaacttttgaagtttacgtcgaggtggcctaccctcgcacgggtgggacgttatcggatcctgaggtccaacgacagtttcctgaagactacagtgaccaagaggtgttgcagaccctaactaagttttgctttcctttctatgtcgattcccttaccgtcagccaggttggacagaacttcacgtttgtgctgacagatatcgacagcaagcagaggttcgggttttgtcgattgtcatctggagcaaaatcgtgcttttgtatcttatcttacctcccttggttcgaggttttctataaactcctgaatatcttagccgactacactactaagcggcaagaaaaccaatggaatgaactcctggagaccctccacaagctaccaatcccggaccccggagtgagcgtgcacctgagcgtccactcatattttactgtccctgataccagggagttaccttctatccccgagaatagaaacctgaccgagtatttcgttgctgtcgacgtgaataacatgctgcacctctacgcctcaatgctctatgaacggaggattttgattatctgcagcaagctgagcacgctgaccgcttgtattcacgggagtgccgctatgctttatcccatgtactggcagcatgtgtacatacccgtccttccaccacatctccttgactactgctgcgcccctatgccatacctgattggtattcacctcagcctgatggaaaaggtgaggaatatggccttggatgacgtggttattctgaatgtggacactaatacccttgaaaccccctttgacgatctccaaagcctgccgaatgatgtgataagctctttgaaaaacagattgaagaaggtctcgactacgactggagacggagtggcgagggcttttctgaaggcccaggccgctttcttcggctcttataggaacgccctcaagattgagcccgaagagcctattaccttctgcgaagaggcttttgtatcccactataggagcggagccatgaggcaatttctgcagaacgctacccaactccagctctttaagcagttcatcgacggacggttggacctattgaattcaggtgaaggattttcagatgtgtttgaggaagagatcaacatgggggagtatgcgggatccgacaagctttaccatcaatggttgtctaccgttaggaagggatcgggagcaattctcaacacagtgaaaactaaagccaacccagcgatgaagaccgtatataagtttgccaaagaccacgcaaaaatgggcattaaagaagtgaagaacaggctcaaacagaaggacattgcagagaatgggtgcgctcccacacctgaagaacagctgcccaaaaccgctccctcgccgctggtggaggccaaagatccgaaactgcgagaggacagacgccctatcactgtccactttggccaggtgcgtcccccacggccacacgtggtgaaacggcctaaaagtaatatagcagtggaagggcgacgcacatcagtcccttccccagagcagccccagccgtataggactttgcgggagtcagacagtgctgagggtgacgaagcggagtcacccgaacaacaggtgagaaaaagtaccgggcctgtcccagctccacctgatagagcggcttctatcgaccttctcgaggacgttttctcgaatctggacatggaagctgcgctgcagccactggggcaggccaagagtctagaggacctgcgtgcccctaaggacctgcgagaacaacctgggaccttcgattatcagcgattggatctcggaggatccgaacgctccagaggagttacagttgcactcaagctcacccacccttataataaactgtggtctctgggacaggacgatatggcaattccatccaagccacccgctgcgtcacctgagaaaccttccgcactcctaggaaattccctcgctctaccgcgacggccacaaaacagagattcaatccttaatccgtctgataaagaagaggtaccgacgccaacgctgggctcaatcaccatcccgcgaccacagggacgaaagactcccgagctggggattgtgccccctcccccaattccccgtcctgccaaactgcaggcagcaggcgctgcacttggcgatgtctcagaaagattacagaccgatagagaccgcagggccgcactgagtcccggactgctgccaggcgtggtcccccaggggccaacggaactactgcagccactgtccccaggccctggagcagccggaacctcatctgacgccctgttggcactgctggatcctttaagcactgcgtggtctgggtcgacactgccttctagaccagccacccctaatgttgcaacaccattcactcctcaattctcattccctccggctggaacgcccactcctttcccacagcccccactcaatccttttgttccttcaatgccagcagctcctcccacactgcctcttgtgtccactcccgcagggccattcggtgcacctcccgcaagcctcggtcctgcattcgcctccgggcttctgttatcctccgccggattttgcgcacctcatcggtcccaacctaatctgtcggctttgtcaatgcctaacctgtttggacagatgccaatgggcactcacacatcccctttgcagcccctgggacctccggctgtggctccatccaggatacgaaccctgccactggcgaggtcatccgcgagggccgcagagaccaaacagggtctggcactgaggcctggtgatcccccactgctacctcccaggccacctcagggtctggaaccgactctgcagcccagtgccccacagcaggccagggatcctttcgaagacttacttcagaaaacgaagcaggatgtatcaccatctccagcactcgccccagctccggacagtgtggagcagctgcggaaacagtgggagaccttcgaatag

SEQ ID NO: 206706 - DNA, 3030 bp, Artificial Sequence
  derived and/or modified sequence
atgggcagcagaatcaagcagaaccccgagaccaccttcgaggtgtacgtggaggtggcctaccccagaaccggcggcaccctgagcgaccccgaggtgcagagacagttccccgaggactacagcgaccaggaggtgctgcagaccctgaccaagttctgcttccccttctacgtggacagcctgaccgtgagccaggtgggccagaacttcaccttcgtgctgaccgacatcgacagcaagcagagattcggcttctgcagactgagcagcggcgccaagagctgcttctgcatcctgagctacctgccctggttcgaggtgttctacaagctgctgaacatcctggccgactacaccaccaagagacaggagaaccagtggaacgagctgctggagaccctgcacaagctgcccatccccgaccccggcgtgagcgtgcacctgagcgtgcacagctacttcaccgtgcccgacaccagagagctgcccagcatccccgagaacagaaacctgaccgagtacttcgtggccgtggacgtgaacaacatgctgcacctgtacgccagcatgctgtacgagagaagaatcctgatcatctgcagcaagctgagcaccctgaccgcctgcatccacggcagcgccgccatgctgtaccccatgtactggcagcacgtgtacatccccgtgctgcccccccacctgctggactactgctgcgcccccatgccctacctgatcggcatccacctgagcctgatggagaaggtgagaaacatggccctggacgacgtggtgatcctgaacgtggacaccaacaccctggagacccccttcgacgacctgcagagcctgcccaacgacgtgatcagcagcctgaagaacagactgaagaaggtgagcaccaccaccggcgacggcgtggccagagccttcctgaaggcccaggccgccttcttcggcagctacagaaacgccctgaagatcgagcccgaggagcccatcaccttctgcgaggaggccttcgtgagccactacagaagcggcgccatgagacagttcctgcagaacgccacccagctgcagctgttcaagcagttcatcgacggcagactggacctgctgaacagcggcgagggcttcagcgacgtgttcgaggaggagatcaacatgggcgagtacgccggcagcgacaagctgtaccaccagtggctgagcaccgtgagaaagggcagcggcgccatcctgaacaccgtgaagaccaaggccaaccccgccatgaagaccgtgtacaagttcgccaaggaccacgccaagatgggcatcaaggaggtgaagaacagactgaagcagaaggacatcgccgagaacggctgcgcccccacccccgaggagcagctgcccaagaccgcccccagccccctggtggaggccaaggaccccaagctgagagaggacagaagacccatcaccgtgcacttcggccaggtgagaccccccagaccccacgtggtgaagagacccaagagcaacatcgccgtggagggcagaagaaccagcgtgcccagccccgagcagccccagccctacagaaccctgagagagagcgacagcgccgagggcgacgaggccgagagccccgagcagcaggtgagaaagagcaccggccccgtgcccgccccccccgacagagccgccagcatcgacctgctggaggacgtgttcagcaacctggacatggaggccgccctgcagcccctgggccaggccaagagcctggaggacctgagagcccccaaggacctgagagagcagcccggcaccttcgactaccagagactggacctgggcggcagcgagagaagcagaggcgtgaccgtggccctgaagctgacccacccctacaacaagctgtggagcctgggccaggacgacatggccatccccagcaagccccccgccgccagccccgagaagcccagcgccctgctgggcaacagcctggccctgcccagaagaccccagaacagagacagcatcctgaaccccagcgacaaggaggaggtgcccacccccaccctgggcagcatcaccatccccagaccccagggcagaaagacccccgagctgggcatcgtgccccccccccccatccccagacccgccaagctgcaggccgccggcgccgccctgggcgacgtgagcgagagactgcagaccgacagagacagaagagccgccctgagccccggcctgctgcccggcgtggtgccccagggccccaccgagctgctgcagcccctgagccccggccccggcgccgccggcaccagcagcgacgccctgctggccctgctggaccccctgagcaccgcctggagcggcagcaccctgcccagcagacccgccacccccaacgtggccacccccttcaccccccagttcagcttcccccccgccggcacccccacccccttcccccagccccccctgaaccccttcgtgcccagcatgcccgccgccccccccaccctgcccctggtgagcacccccgccggccccttcggcgccccccccgccagcctgggccccgccttcgccagcggcctgctgctgagcagcgccggcttctgcgccccccacagaagccagcccaacctgagcgccctgagcatgcccaacctgttcggccagatgcccatgggcacccacaccagccccctgcagcccctgggcccccccgccgtggcccccagcagaatcagaaccctgcccctggccagaagcagcgccagagccgccgagaccaagcagggcctggccctgagacccggcgacccccccctgctgccccccagacccccccagggcctggagcccaccctgcagcccagcgccccccagcaggccagagaccccttcgaggacctgctgcagaagaccaagcaggacgtgagccccagccccgccctggcccccgcccccgacagcgtggagcagctgagaaagcagtgggagaccttcgagtag

SEQ ID NO: 206707 - DNA, 5010 bp, Artificial Sequence
  derived and/or modified sequence
gcgttcgccgggctggagcgagtacattaacccctggaggcggcggcggcggcgagggagcgagcctcgagcgggcgggccccagcctgagggaagggaggaaggggcggggagagcgccagagggaggccggtcggccgcgggcgggcgggcagcgcagcgccgagcggggcccgcgggcccatgaggaggcctggggaccatgggctccaggatcaagcagaatccagagaccacatttgaagtatatgttgaagtggcctatcccaggacaggtggcactctttcagatcctgaggtgcagaggcaattcccggaggactacagtgaccaggaagttctacagactttgaccaagttttgtttccccttctatgtggacagcctcacagttagccaagttggccagaacttcacattcgtgctcactgacattgacagcaaacagagattcgggttctgccgcttatcttcaggagcgaagagctgcttctgtatcttaagctatctcccctggttcgaggtattttataagctgcttaacatcctggcagattacacgacaaaaagacaggaaaatcagtggaatgagcttcttgaaactctgcacaaacttcccatccctgacccaggagtgtctgtccatctcagcgtgcattcttattttactgtgcctgataccagagaacttcccagcatacctgagaatagaaatctgacagaatattttgtggctgtggatgttaacaacatgttgcatctgtacgccagtatgctgtacgaacgccggatactcatcatttgcagcaaactcagcactctgactgcctgcatccacgggtctgcggcgatgctctaccccatgtactggcagcacgtgtacatccccgtgctgccgccgcatctgctggactactgctgtgctcccatgccctacctcataggaatccatttaagtttaatggagaaagtcagaaacatggccctggatgatgtcgtgatcctgaatgtggacaccaacaccctggaaacccccttcgatgacctccagagcctcccaaacgacgtgatctcttccctgaagaacaggctgaaaaaggtctccacaaccactggggatggtgtggccagagcgttcctcaaggcccaggctgctttcttcggtagctaccgaaacgctctgaaaatcgagccggaggagccgatcactttctgtgaggaagccttcgtgtcccactaccgctccggagccatgaggcagttcctgcagaacgccacacagctgcagctcttcaagcagtttattgatggtcgattagatcttctcaattccggcgaaggtttcagtgatgtttttgaagaggaaatcaacatgggcgagtacgctggcagtgacaaactgtaccatcagtggctctccactgtccggaaaggaagtggagcaattctgaatactgtaaagaccaaagcaaatccggccatgaagactgtctacaagttcgcaaaagatcatgcaaaaatgggaataaaagaggtgaaaaaccgcttgaagcaaaaggacattgccgagaatggctgcgcccccaccccagaagagcagctgccaaagactgcaccgtccccactggtggaggccaaggaccccaagctccgagaagaccggcggccaatcacagtccactttggacaggtgcgcccacctcgtccacatgttgttaagagaccaaagagcaacatcgcagtggaaggccggaggacgtctgtgccgagccctgagcagccgcagccgtatcggacactcagggagtcagacagcgcggaaggcgacgaggcagagagtccagagcagcaagtgcggaagtccacaggccctgtcccagctccccctgaccgggctgccagcatcgaccttctggaagacgtcttcagcaacctggacatggaggccgcactgcagccactgggccaggccaagagcttagaggaccttcgtgcccccaaagacctgagggagcagccagggacctttgactatcagaggctggatctgggcgggagtgagaggagccgcggggtgacagtggccttgaagcttacccacccgtacaacaagctctggagcctgggccaggacgacatggccatccccagcaagcccccagctgcctcccctgagaagccctcagccctgctcggaaactccctggccctgcctcgaaggccccagaaccgggacagcatcctgaaccccagtgacaaggaggaggtgcccacccctactctgggcagcatcaccatcccccggccccaaggcaggaagaccccagagctgggcatcgtgcctccaccgcccattccccgcccggccaagctccaggctgccggcgccgcacttggtgacgtctcagagcggctgcagacggatcgggacaggcgagctgccctgagtccagggctcctgcctggtgttgtcccccaaggccccactgaactgctccagccgctcagccctggccccggggctgcaggcacgagcagtgacgccctgctcgccctcctggacccgctcagcacagcctggtcaggcagcaccctcccgtcacgccccgccaccccgaatgtagccaccccattcaccccccaattcagcttcccccctgcagggacacccaccccattcccacagccaccactcaacccctttgtcccatccatgccagcagccccacccaccctgcccctggtctccacaccagccgggcctttcggggcccctccagcttccctggggccggcttttgcgtccggcctcctgctgtccagtgctggcttctgtgcccctcacaggtctcagcccaacctctccgccctctccatgcccaacctctttggccagatgcccatgggcacccacacgagccccctacagccgctgggtcccccagcagttgccccgtcgaggatccgaacgttgcccctggcccgctcaagtgccagggctgctgagaccaagcaggggctggccctgaggcctggagaccccccgcttctgcctcccaggccccctcaaggcctggagccaacactgcagccctctgctcctcaacaggccagagacccctttgaggatttgttacagaaaaccaagcaagacgtgagcccgagtccggccctggccccggccccagactcggtggagcagctcaggaagcagtgggagaccttcgagtgagccgggccctgagggtgggggatgcaccgaggcccgagggtccgtccactgctgcggttccgaggctcccccgccactctctctctgcccaggttctgctggtgggaagggatgggacccctctctgctgccccctcctcccctccacactgcccatctctgatgtctggccctggggaatggcaccagttccagcctgggaatcaacccagttcctgagtgcccatcccaccccgcggttgcctctcctcggcacccttgattgggttttgcactaaagaggtcagctgggccaatgatattgctccagaccgagtcctacccaccttcccccggaagtgtcccaagaggctccgaaggcctcccctccgagcccagctctcctgtctcctccacagccaggccctgcacgcccacctcctcggacacaggtgacagggttaccctccagtttgagctcatctgcacgagacacaggtagcttggggttgaagttaggactcctcctgggctggaggatttacctggtggggcacttccagactgtttctagcaatatacacacacgttctttcctgtgtcttcaccccaaaacttcagttgattctgacctgggaggatctggggaccagggggtcttgggctgccttgtgatacacagccccagccaccctgcacgggggctgcgagcaccagcaactttgatttatagaaggaaaatggaaacccccatctgagtattttgggaggagcccccagccctcatccagctctggcacgctgatacctccaggtactcccctcactgtcaaagctggggctcagcctcttgtcatctggagctttgtgggcaaagctgagaagctgcaacccagatttcaacccaaaaaggtcaagctgaatgcctcagactgatgtggaaggcagctggccttcctgggttggaacgaggcagtggccctgagccccttctccagggccaggtagaaaggacaaacttggtctctgcctcggggaagcaggaggagggctagaagccagtccctccccacctgcccagagctccaggccagcacagaaattcctgaggccaacgtcaccaaagttagattgaatgtttattatctttctttttcctttttaccttattgatttgatgaatcttgaaatggattcatttccataaaccaagttaaagtatggcccgaccatttaagaaaacaaccatctgagacacgcaggaaattgtgagcatttcgacccgagctctcatttcctatttgtgaagggtcagacacagtctacccaggggtgtctgggggacaagggggtctctggagatgtcacccagggagccccctctatgtctgagaggctgccactgctgcacatgctcagtgaggcttggcggccatcctggcacatggctcttcctgggtcaaccgtgacctgtctggctcaggaatgggctctggctgctgggggagccgtgtcactcctgggccatgggggcacctcctgggcacttaggtgtttcagcatagattccagtttcgcaccctgggcagacccccaggccccatccgggatagggcagaggaggtgctggcggccccagggaaggagggtgtgtaccccaaggccccctggctgtgctgaggggctggggtgagcgctccatgttcacatgagcactgctgcctcttcacttgtgggactttttgcaaacccaaggatgaactttgtgtgcattcaataaaatcatcttggggaagagg

SEQ ID NO: 206708 - protein, 771 aa, Artificial Sequence
  derived and/or modified sequence
MSGFFTSLDPRRVQWGAAWYAMHSRILRTKPVESMLEGTGTTTAHGTKLAQVLTTVDLISLGVGSCVGTGMYVVSGLVAKEMAGPGVIVSFIIAAVASILSGVCYAEFGVRVPKTTGSAYTYSYVTVGEFVAFFIGWNLILEYLIGTAAGASALSSMFDSLANHTISRWMADSVGTLNGLGKGEESYPDLLALLIAVIVTIIVALGVKNSIGFNNVLNVLNLAVWVFIMIAGLFFINGKYWAEGQFLPHGWSGVLQGAATCFYAFIGFDIIATTGEEAKNPNTSIPYAITASLVICLTAYVSVSVILTLMVPYYTIDTESPLMEMFVAHGFYAAKFVVAIGSVAGLTVSLLGSLFPMPRVIYAMAGDGLLFRFLAHVSSYTETPVVACIVSGFLAALLALLVSLRDLIEMMSIGTLLAYTLVSVCVLLLRYQPESDIDGFVKFLSEEHTKKKEGILADCEKEACSPVSEGDEFSGPATNTCGAKNLPSLGDNEMLIGKSDKSTYNVNHPNYGTVDMTTGIEADESENIYLIKLKKLIGPHYYTMRIRLGLPGKMDRPTAATGHTVTICVLLLFILMFIFCSFIIFGSDYISEQSWWAILLVVLMVLLISTLVFVILQQPENPKKLPYMAPCLPFVPAFAMLVNIYLMLKLSTITWIRFAVWCFVGLLIYFGYGIWNSTLEISAREEALHQSTYQRYDVDDPFSVEEGFSYATEGESQEDWGGPTEDKGFYYQQMSDAKANGRTSSKAKSKSKHKQNSEALIANDELDYSPE

SEQ ID NO: 206709 - DNA, 5122 bp, Artificial Sequence
  derived and/or modified sequence
atctgaataattgaggagctgttcagcagcagcggctgcctcctgccttcctttgccgccaccaccacttcccatcccagctagagagacagctccgcgcagtaagtgcggactgccagccaccagccttggcagccagctcgtcgcctccagccccgaccccgacattcatgcccaggagaaggctgcactgggtccctctgggcctttcctaaaagggagatccctgttcactagatgagttccagaaccatccactaaggctttgtagcccccttccatcagctgaccttcactgcatcccctatcgctcaagatgagtggcttcttcacctcgctggacccccggcgggtgcagtggggagctgcctggtatgcaatgcactccaggatcctacgcaccaaaccagtggagtccatgctagagggaactgggaccaccacggcacatggaactaagctagcccaggtactcaccacagtggacctcatctctcttggcgttggcagctgtgtgggcactggcatgtatgtggtctctggcctggtggccaaggaaatggcaggacctggtgtcattgtgtccttcatcattgcagccgtcgcatccatattatcaggcgtctgctatgcagagtttggagttcgagtccccaagaccacaggatctgcctacacctacagctatgtcactgttggggaatttgtggcatttttcattggctggaacctgatcctggagtacctgattggcactgcggccggagccagtgctctgagcagcatgtttgactcactagccaaccacaccatcagccgctggatggcggacagcgtgggaaccctcaatggcctggggaaaggtgaagaatcatacccagaccttctggctctgttgatcgcggtcatcgtgaccatcattgttgctctgggggtgaagaattccataggcttcaacaatgttctcaatgtgctgaacctggcagtatgggtgttcatcatgatcgcaggcctcttcttcatcaatgggaaatactgggcggagggccagttcttgccccacggctggtcaggggtgctgcaaggagcagcaacatgcttctacgctttcattggctttgacatcatcgccaccactggagaggaagccaagaatcccaacacgtccatcccttatgctatcactgcctccctggtcatctgcctgacagcatatgtgtctgtgagcgtgatcttaactctgatggtgccatattataccattgacacggaatccccactcatggagatgtttgtggctcatgggttctatgctgccaaattcgtagtggccattgggtcggttgcaggactgacagtcagcttgctggggtccctcttcccgatgccgagggtcatttatgccatggctggtgacgggctccttttcaggttcctggctcacgtcagctcctacacagagacaccagtggtggcctgcatcgtgtcggggttcctggcagcgctcctcgcactgttggtcagcttgagagacctgatagagatgatgtctatcggcacgctcctggcctacaccttggtctctgtctgtgtcttgctccttcgataccaacctgagagtgacattgatggttttgtcaagttcttgtctgaggagcacaccaagaagaaggagggcattctggctgactgtgagaaggaagcttgttctcctgtgagtgagggggatgagttttctggcccagccaccaacacatgtggggccaagaacttaccatccttgggagacaatgagatgctcatagggaaatcagacaagtcaacctacaacgtcaaccaccccaattacggcaccgtggacatgaccacaggcatagaagctgatgaatccgaaaatatttatctcatcaagttaaagaagctgattgggcctcattattacaccatgagaatccggctgggccttccaggcaaaatggaccggcccacagcagcgacggggcacacggtgaccatctgcgtgctcctgctcttcatcctcatgttcatcttctgctccttcatcatctttggttctgactacatctcagagcagagctggtgggccatccttctggttgttctgatggtgctgctgatcagcaccctggtgtttgtgatcctgcagcagccagagaaccccaagaagctgccctacatggccccttgcctcccctttgtgcctgcctttgccatgctggtgaacatctatctcatgctaaagctctccaccatcacatggatccggtttgcggtctggtgctttgtgggtctgctcatttattttggatatggcatctggaacagcaccctggaaatcagcgctcgagaagaggccctgcaccaaagcacgtaccaacgctacgacgtggatgaccccttctcagtggaggagggtttctcctacgccacagagggcgagagccaggaggactggggcgggcccactgaagacaaaggcttctattaccaacagatgtcagatgcgaaggcaaacggccggacaagtagcaaagcgaagagcaaaagcaaacacaaacagaactcagaggccctgattgcaaatgatgagttagattactctccagagtaggagaaacacacaagtgggtagaaatggtgatgactgattttcagtaacttaacctgtgggctagaaggtgaaaacttttttggctctcatttcacaaatccagccttccccaaattcaatccctagtcatagcctgtcatttgctacttttgctcttcaggatagttctgttgaagggcttaacctgggtcccctaactggtcgccttgttaaataaaataaataaataaacaagaggctatatgaaattccatcttaggtgcaaccaccagagctgatggtaccaaatgtttcctaggcctttgctttgctggttgaagcccaagcaggggctctgggcagaaggcagaatttcagtcacctgagacatggggacaaagctctgttcttggcatgtcaggctgagtgctgctccccgaggtcagggtgggtagatgggcattggcacttcctgagcaagcatcattttatcctgcaatctcacccaaaattaattcatggaaaagacacatgcttctttttattcaccaacattctcacagcttccaaactataattttaggatccagcaaagttcagggactctggaccattttcccaatggtttcagattcaccataaagcagtcaggcagacccagtgatatggtaagaagcaccatcaaagctctatgtaaatgcccagaagaaaattaaataaccatatcttgcggtaaaagccagaagggcattggcagaaattaactctctgtcatggcctctcttatatcagactgcagctcctggtgatatgatgaaagcgggcaaaggtggagcatgatttcatggcactgatatgccttgaaaaagtaggttgtttgttttataatcagataaaaatttttacaaggagaagtgagccagccactgagatcacattgcaaattctctttcatatttctaaaattataaattctaaagtttttgagataggcaaccacttgattggtgtgtgctactctgaaaacaaaataggctgaagtatagcgacttaggtagttgcattccatgagatcacatttcacttctgaaccttattccttggggctagctcactttcagaggtgtatttttttttcctgttatttcccagagtagtttcactgaagcccagagaaatatctacctggtaagatgtaaatttgggccataaaaggggctattaaaagaattttctcagaaatagaatagatgagagaatttgcaaaggaaaaaaacacacatgggctacaatataaattctactcttgggttacaagaattcctgtggctgcactgagatacgtacaaatgtatgtgaaggcacaatttgaatcaagctatcatagaattaaccaagctattaaaattaatcaagctattaataaaatctctgtgaggatttcctgaaagagggacaaaagaagaaattccttgtcctttctctcctggatgtatcagtatgccaaacgttttccagaacatattcgctagcactcaagtctgttctttctgaaaggctgaggctcatgccatcttggcatgctttaggattatggcaaggaggtaaaagtccattttttcattcaactaacactggttgagaatagacccaatgctaagtgacaggaatgaatagaagcatggcacttgcccttgggggctacagtccatggatgagcagcactggagcctggtaaatgcagataaaacaacaaacttgacaagtctccaggctgatgcactgggttttaacatacatataaagatgaattgaaactagtttttaaaaaatatgctttaaataaattacatatcgtaatcatagccaatgtataccattaaactaaaataactgcaattttctagatattttttattcttctgtagtcattgtttagaactctggtttcctgaggtcattttgtcattttaatatcatgcttgacaatgctatgttttctcttccctagagttaaccataaagatacagtgcctactctgtgaaatacagcattaggaattaattataaactaattatcagtcatcttttgaaaacaaagttttgaattggctataggactcaacaaatctgcctggtgtaaatagaatctgttaagcttgatacatatctagatagatgaggaggggttgtattcattaagcatgagaatagagaaataggagtgcaaaatggcaaaatcttaacgtgggtgaaagagcttccttttactagtgaggtttaagtattaaagtaacaatagcctggtggcagatgaatgcaatttctataggatgggaatggaaaatgtatgctttggttaacaccattgctgttgacttcatgcagattctattaagcactctcatttcaggagccatttttcccacatagtatattagtatattttaagcttagctccctttatttttctaaagttgataaatcacctccctagcaaccttagtttt

SEQ ID NO: 206710 - DNA, 2316 bp, Artificial Sequence
  derived and/or modified sequence
atgtcaggcttctttacaagcttagaccctcgcagggtccagtggggggctgcttggtatgcaatgcacagccggattctgcggactaagccagttgagagcatgctcgagggaactggcacaacgacagcacatggtacaaagttagcccaggttctgactacagttgacctgattagtctgggagtcggatcttgtgtgggcaccggcatgtatgttgtgtcaggtctggtggcgaaggaaatggctggtcctggtgtgattgtctcctttattatcgcggctgtggcctccatcctgtctggcgtgtgctatgccgaattcggtgtccgcgtccccaagaccaccgggtctgcctatacctacagctacgtcacagtgggcgagttcgtcgcttttttcattgggtggaaccttatcctggaatacctgataggtacagcagctggcgcatctgccctcagcagtatgtttgactcactggcaaaccatactatctctagatggatggccgacagcgtagggactttgaatggcctgggtaaaggagaggaatcctaccccgacctccttgcactcctaatcgctgtcatcgtgacgatcatcgtggcattaggggttaagaactccatcggttttaacaatgtgttaaatgtcctgaatctggcagtgtgggtgtttataatgattgcagggctgttctttataaatggtaagtactgggcagaggggcagtttcttccgcatggttggtcaggggtgctccagggagcagcaacttgcttctacgcgttcatcgggttcgatattattgccacgaccggggaggaggccaaaaacccaaacacctccatcccctacgcaatcaccgcaagtctggtgatttgcctaactgcctacgtttcagtgtccgttatacttactctcatggttccctattacaccattgacactgaatcccctctgatggagatgtttgttgctcacggtttctatgcggctaaattcgtggtcgctatcgggagcgtagctggccttacggtcagcctgttgggtagcttgttcccaatgccgagggtgatatacgctatggctggagatggcctgctcttcagatttctagctcacgtgtcttcctacactgaaacacccgtcgtggcttgcatcgtttccggcttcctggctgctctgctggccttgcttgtgtctttgcgcgatctgattgagatgatgtccatcggaactctccttgcatacaccctggtgtccgtgtgcgtgctcctattgaggtaccagcctgagtccgacatagacggctttgtgaagtttttatcggaggagcacaccaagaaaaaggagggtatactggctgattgcgagaaggaagcatgttctcctgtgtctgaaggcgatgaattctctgggcctgctactaacacctgcggggcaaagaatctgccaagcctgggggacaacgaaatgctcatcggcaaatctgataagagtacctataatgtgaaccacccgaactatggtaccgttgatatgactactggaatcgaagccgacgaatctgaaaatatatacctgataaaactgaagaaactgatcggccctcactattataccatgagaattcggctgggcctgccaggcaaaatggatcgcccaaccgcagccacagggcacaccgtgaccatctgcgtgttgctgctgttcatcttaatgttcatcttctgttccttcataatattcggatccgactacatcagcgagcagtcctggtgggccattctgttggtcgtgctgatggtgctgcttattagcactctagtgttcgtgatactgcagcagcctgagaatcctaagaaacttccatacatggcaccgtgtttgccctttgtccctgcctttgctatgctagtgaatatatatctcatgcttaaactctcaactataacatggatcagatttgctgtctggtgctttgtcggcctcctgatctactttgggtacgggatctggaactcgactctggaaatcagcgcacgcgaggaagccctgcatcagtctacctaccagcgctatgacgtcgatgatccatttagcgtggaggagggtttttcgtacgccaccgaaggtgaatcccaggaagattggggcggacctaccgaagataaaggattctactaccaacagatgtctgacgcaaaagccaacggacggacttcttctaaggcaaaaagtaagagcaaacataagcaaaacagcgaggcgctcattgccaatgatgagctggactattcgcccgagtag

SEQ ID NO: 206711 - DNA, 2316 bp, Artificial Sequence
  derived and/or modified sequence
atgagcggcttcttcaccagcctggaccccagaagagtgcagtggggcgccgcctggtacgccatgcacagcagaatcctgagaaccaagcccgtggagagcatgctggagggcaccggcaccaccaccgcccacggcaccaagctggcccaggtgctgaccaccgtggacctgatcagcctgggcgtgggcagctgcgtgggcaccggcatgtacgtggtgagcggcctggtggccaaggagatggccggccccggcgtgatcgtgagcttcatcatcgccgccgtggccagcatcctgagcggcgtgtgctacgccgagttcggcgtgagagtgcccaagaccaccggcagcgcctacacctacagctacgtgaccgtgggcgagttcgtggccttcttcatcggctggaacctgatcctggagtacctgatcggcaccgccgccggcgccagcgccctgagcagcatgttcgacagcctggccaaccacaccatcagcagatggatggccgacagcgtgggcaccctgaacggcctgggcaagggcgaggagagctaccccgacctgctggccctgctgatcgccgtgatcgtgaccatcatcgtggccctgggcgtgaagaacagcatcggcttcaacaacgtgctgaacgtgctgaacctggccgtgtgggtgttcatcatgatcgccggcctgttcttcatcaacggcaagtactgggccgagggccagttcctgccccacggctggagcggcgtgctgcagggcgccgccacctgcttctacgccttcatcggcttcgacatcatcgccaccaccggcgaggaggccaagaaccccaacaccagcatcccctacgccatcaccgccagcctggtgatctgcctgaccgcctacgtgagcgtgagcgtgatcctgaccctgatggtgccctactacaccatcgacaccgagagccccctgatggagatgttcgtggcccacggcttctacgccgccaagttcgtggtggccatcggcagcgtggccggcctgaccgtgagcctgctgggcagcctgttccccatgcccagagtgatctacgccatggccggcgacggcctgctgttcagattcctggcccacgtgagcagctacaccgagacccccgtggtggcctgcatcgtgagcggcttcctggccgccctgctggccctgctggtgagcctgagagacctgatcgagatgatgagcatcggcaccctgctggcctacaccctggtgagcgtgtgcgtgctgctgctgagataccagcccgagagcgacatcgacggcttcgtgaagttcctgagcgaggagcacaccaagaagaaggagggcatcctggccgactgcgagaaggaggcctgcagccccgtgagcgagggcgacgagttcagcggccccgccaccaacacctgcggcgccaagaacctgcccagcctgggcgacaacgagatgctgatcggcaagagcgacaagagcacctacaacgtgaaccaccccaactacggcaccgtggacatgaccaccggcatcgaggccgacgagagcgagaacatctacctgatcaagctgaagaagctgatcggcccccactactacaccatgagaatcagactgggcctgcccggcaagatggacagacccaccgccgccaccggccacaccgtgaccatctgcgtgctgctgctgttcatcctgatgttcatcttctgcagcttcatcatcttcggcagcgactacatcagcgagcagagctggtgggccatcctgctggtggtgctgatggtgctgctgatcagcaccctggtgttcgtgatcctgcagcagcccgagaaccccaagaagctgccctacatggccccctgcctgcccttcgtgcccgccttcgccatgctggtgaacatctacctgatgctgaagctgagcaccatcacctggatcagattcgccgtgtggtgcttcgtgggcctgctgatctacttcggctacggcatctggaacagcaccctggagatcagcgccagagaggaggccctgcaccagagcacctaccagagatacgacgtggacgaccccttcagcgtggaggagggcttcagctacgccaccgagggcgagagccaggaggactggggcggccccaccgaggacaagggcttctactaccagcagatgagcgacgccaaggccaacggcagaaccagcagcaaggccaagagcaagagcaagcacaagcagaacagcgaggccctgatcgccaacgacgagctggactacagccccgagtag

SEQ ID NO: 206712 - DNA, 2316 bp, Artificial Sequence
  derived and/or modified sequence
atgagcggattcttcacttcattagaccccagaagagttcaatggggagctgcgtggtatgctatgcactcacgcattctcagaacaaaaccagttgagagcatgcttgagggcaccgggacaaccacagctcacggcacgaagctcgcccaggtcttgactactgtggatctgatcagccttggagtggggtcttgcgtaggcactggaatgtatgtggtgtcaggcctcgtcgctaaagaaatggccgggcctggagtgatagtcagctttattattgctgctgttgcaagcattttaagcggagtgtgttacgctgagttcggagtccgggtacccaaaacaactggaagcgcatacacgtattcatatgttactgtcggcgagtttgtggcattttttattggctggaacttgatactggaatacctaattggaactgctgctggcgcaagcgctttgtcaagcatgtttgattcactagctaatcatactatctccaggtggatggctgacagcgtgggcactctcaatgggctgggaaagggggaagaaagttatccagatctgcttgctttgttgatcgctgttatagtgactatcattgtggccctgggggtcaaaaatagcatcggcttcaacaacgtcctcaatgtcttaaacctggctgtctgggtattcatcatgatcgcggggcttttcttcataaatggcaaatactgggcggaggggcagtttctgccccacgggtggagtggagtcttgcagggggccgcaacgtgtttctatgcttttatcggatttgatatcatcgccacaactggggaggaagctaaaaacccaaacacttccattccctacgcaataacagcgagcctcgtgatatgcctcactgcgtacgtgtcggtgagcgtcatattgaccctgatggttccctactacactattgacaccgaatctccactgatggaaatgtttgtggctcacggattttatgcagcgaagttcgtggttgccataggaagtgtcgctgggctgaccgtgtctttacttggaagtctcttccccatgccaagggtgatttacgccatggccggcgatgggttactgttcagatttctggctcacgtctctagctacaccgagacacctgtagtggcgtgcatcgttagcggcttcttggcagcgctgctggccctgctagtctcactgcgggacctcatagagatgatgtcaatcgggacacttctggcttacacgttggtttcagtctgcgtactgcttcttaggtatcagcctgagagcgacattgacggtttcgtgaagttccttagcgaagagcacaccaagaagaaggaaggtattctggctgattgcgagaaagaggcatgttccccggtgtccgagggcgacgagttctctgggccagccacaaacacctgcggggctaaaaacctgccatctctcggggataacgaaatgcttattggcaagtcagacaagagcacatataatgtcaatcacccaaactatgggaccgtggatatgactacaggaatcgaagccgacgaatccgagaacatatacttgatcaagttgaaaaaattgattggaccccactactacacaatgagaattcgcctggggctgcccggcaagatggatcgccccactgctgccactgggcatacggtgacaatctgtgttctcctattgtttatccttatgtttattttctgcagcttcataatctttgggagcgattacatatcagagcagtcctggtgggcaattcttctcgtggtcctcatggtgttactcattagcaccctggtatttgtgatcctccagcagccagagaatccaaaaaagctgccatatatggccccatgcttgccatttgtgcctgcctttgccatgctggtgaatatctacctcatgctgaaactcagtacaatcacctggatccgctttgccgtgtggtgcttcgtcggcctgctgatttacttcggctatgggatctggaatagcaccctggagatctcagcccgtgaggaggcacttcatcagtcaacataccagcgctacgacgttgacgatcccttttccgtcgaagaagggttttcatacgccacagaaggggagtcccaggaggactggggtgggcctactgaggacaaaggtttttattaccagcagatgtctgacgccaaggctaatggtaggacctccagtaaagccaaaagcaaatcaaagcataaacaaaattcagaggcactgatcgccaatgatgagttggactactcaccagagtag

SEQ ID NO: 206713 - DNA, 2316 bp, Artificial Sequence
  derived and/or modified sequence
atgagcggcttcttcaccagcctggaccccaggagagtgcagtggggcgccgcctggtacgccatgcacagccgcatcctgcggaccaagcctgtggagagcatgctggagggcaccggcaccaccacagcccacggcaccaagctggcccaggtgctgaccaccgtggacctgatcagcctgggcgtgggcagctgtgtgggcaccggcatgtatgtggtgtctggcctggtggccaaggagatggccggccctggggtcatcgtgtccttcatcatcgctgctgtggccagcatcctgtctggagtgtgctacgccgagtttggagtgcgggtgcccaagaccaccggcagcgcctacacctacagctatgtgacagtgggggagtttgtggccttcttcatcggctggaacctgatcctggagtacctgattggaacagctgctggggccagcgccctgagctccatgtttgacagcctggccaaccacaccatcagccgctggatggctgacagcgtgggcaccctgaatggcctgggcaagggggaggagagctacccagacctgctggccctgctgattgctgtgattgtgaccatcatcgtggccctgggcgtgaagaacagcatcggcttcaacaacgtgctgaatgtgctgaacctggccgtgtgggtgttcatcatgattgctggcctcttcttcatcaatggcaagtactgggccgagggccagttcctgccccacggctggagcggcgtgctgcagggcgccgccacctgcttctacgccttcatcggctttgacatcatcgccaccaccggggaggaggccaagaaccccaacaccagcatcccctatgccatcacagccagcctggtgatctgcctgacagcctacgtgtctgtgtctgtcatcctgaccctgatggtgccctactacaccatcgacacagagagccccctgatggagatgtttgtggcccacggcttctatgctgccaagtttgtggtggccatcggctctgtggccggcctgactgtgtccctgctgggcagcctcttccccatgcccagggtcatctatgccatggctggagatggcctgctcttccgcttcctggcccacgtgtcctcctacacagagacccctgtggtggcctgcatcgtgtctggcttcctggccgccctgctggccctgctggtgtccctgcgggacctgattgagatgatgagcatcggcaccctgctggcctacaccctggtgtctgtgtgtgtgctgctgctgcgctaccagcctgagagtgacattgatggctttgtgaagttcctgtctgaggagcacaccaagaagaaggagggcatcctggccgactgtgagaaggaggcctgcagccctgtgtctgaaggagatgagttcagcggccctgccaccaacacctgtggggccaagaacctgcccagcctgggggacaatgagatgctgattggcaagagtgacaagagcacctacaacgtgaaccaccccaactatggaacagtggacatgaccaccggcatcgaggctgatgaaagtgagaacatctacctgatcaagctgaagaagctgattggcccccactactacaccatgaggatccggctgggcctgcccgggaagatggaccggcccacagctgccaccggccacacagtgaccatctgtgtgctgctgctcttcatcctgatgttcatcttctgcagcttcatcatctttggaagtgactacatcagcgagcagagctggtgggccatcctgctggtggtgctgatggtgctgctgatcagcaccctggtgtttgtgatcctgcagcagcctgagaaccccaagaagctgccctacatggccccctgcctgccctttgtgcctgcctttgccatgctggtgaacatctacctgatgctgaagctgagcaccatcacctggatccgctttgctgtgtggtgctttgtgggcctgctgatctacttcggctacggcatctggaacagcaccctggagatcagcgcccgggaggaggccctgcaccagagcacctaccagagatatgatgtggatgaccccttctctgtggaggagggcttctcctatgccacagaaggagagagccaggaggactggggcggccccacagaagataaaggcttctactaccagcagatgtctgatgccaaggccaacggccgcaccagcagcaaggccaagagcaagagcaagcacaagcagaacagcgaggccctgattgccaatgatgagctggactacagccctgagtag

SEQ ID NO: 206714 - DNA, 2316 bp, Artificial Sequence
  derived and/or modified sequence
atgagcggcttcttcaccagcctggacccccggcgggtgcagtggggagctgcatggtatgccatgcattcgcgcatcctgcgaactaaacctgtggaatccatgctggagggcaccggcacgactaccgcccatggcacaaagcttgcccaggtcctgaccactgtcgatctcataagtcttggcgtggggtcctgcgtgggcaccggcatgtacgtggtttccggtctggtcgctaaagaaatggctggacctggagttatagtgagttttatcattgcggccgtggcaagcattctgtctggggtctgctacgcggagtttggtgtgcgcgttcctaaaacgacggggtctgcctatacttatagttatgtcacggtgggagagttcgtagctttcttcattgggtggaacttgatcctagagtacctcattgggacagcagctggcgctagtgcactgagctccatgttcgactcacttgccaaccatacgatttcccgatggatggctgattccgtgggtactttaaacggcttaggcaagggggaagagagttaccctgacctcctggcgcttctcattgcagtcatcgtgacaatcattgttgccttaggggtgaagaactctattggattcaacaacgtgctaaatgtgcttaatttggctgtctgggtgttcattatgattgcaggactgttcttcatcaatggcaaatactgggcagaagggcaattccttccccatggctggtctggcgtgctccagggcgctgctacgtgcttctatgcctttataggattcgatatcatcgcaacaactggggaagaggccaagaaccccaacaccagtatcccctatgcaattactgcatcattagtcatttgtcttaccgcttacgtctccgtaagcgttattcttaccttgatggttccctattataccattgatacggaatcacctttgatggaaatgttcgtggcccatggtttctatgcggcaaagttcgtcgtcgctatcggcagtgtggcgggtctgactgtgagtcttttggggagcctgtttcccatgccacgagtgatctacgcaatggccggggatggactcctgttcagatttctggctcacgttagttcgtacaccgaaacccccgtggtggcatgtattgtaagtggctttctggccgcactgctggccctccttgtgtctctccgtgatctgattgagatgatgagcattggcaccctgttagcctacacccttgtatccgtttgcgtgttactcctgagatatcaacccgagagtgatatcgatggtttcgttaaatttctgagtgaagaacataccaagaagaaggagggaatactggccgactgcgagaaggaagcctgttcgcctgtgagcgaaggtgacgagttctcaggccccgctacaaacacgtgcggagctaagaacctacccagcctgggggataatgagatgctgataggaaagtccgacaagtcaacctacaacgtgaaccacccgaactacggaaccgttgacatgactactggcatcgaagctgacgaatccgagaacatctacctgattaaactcaaaaagctaatcggccctcactattatacaatgcgaattcgccttggcctgcctggcaaaatggaccgcccaacggcagctacaggacacacggttactatatgcgtgctgctgctgtttatcctgatgttcatcttttgcagttttattatttttggatccgactatatcagcgaacagagctggtgggcgattctgctggttgtcctgatggtgttgctcattagcacactggtctttgtcatcctccagcagcccgagaatcccaaaaagctcccatacatggctccgtgcttgccattcgtgccagctttcgccatgctggtgaacatctacctaatgctcaagctctccacaataacctggattcgctttgcagtgtggtgcttcgtcggacttctcatttacttcggctacggcatctggaactctacccttgaaatttctgctcgtgaggaagcccttcaccagagcacctatcaacggtatgacgttgacgatcctttctctgtggaggaggggttctcctatgccaccgaaggagagagccaggaagactggggtggaccaactgaagacaaaggcttctactatcagcagatgtctgatgcaaaggccaatgggcggacatccagtaaagccaagtcgaagtctaagcacaagcagaactctgaggcccttattgcaaatgacgaattggattattccccagaatag

SEQ ID NO: 206715 - protein, 230 aa, Artificial Sequence
  derived and/or modified sequence
MYVRVSFDTKPDLLLHLMTKEWQLELPKLLISVHGGLQNFELQPKLKQVFGKGLIKAAMTTGAWIFTGGVNTGVIRHVGDALKDHASKSRGKICTIGIAPWGIVENQEDLIGRDVVRPYQTMSNPMSKLTVLNSMHSHFILADNGTTGKYGAEVKLRRQLEKHISLQKINTRIGQGVPVVALIVEGGPNVISIVLEYLRDTPPVPVVVCDGSGRASDILAFGHKYSEEGG

SEQ ID NO: 206716 - protein, 1566 aa, Artificial Sequence
  derived and/or modified sequence
MYVRVSFDTKPDLLLHLMTKEWQLELPKLLISVHGGLQNFELQPKLKQVFGKGLIKAAMTTGAWIFTGGVNTGVIRHVGDALKDHASKSRGKICTIGIAPWGIVENQEDLIGRDVVRPYQTMSNPMSKLTVLNSMHSHFILADNGTTGKYGAEVKLRRQLEKHISLQKINTRIGQGVPVVALIVEGGPNVISIVLEYLRDTPPVPVVVCDGSGRASDILAFGHKYSEEGGLINESLRDQLLVTIQKTFTYTRTQAQHLFIILMECMKKKELITVFRMGSEGHQDIDLAILTALLKGANASAPDQLSLALAWNRVDIARSQIFIYGQQWPVGSLEQAMLDALVLDRVDFVKLLIENGVSMHRFLTISRLEELYNTRHGPSNTLYHLVRDVKKGNLPPDYRISLIDIGLVIEYLMGGAYRCNYTRKRFRTLYHNLFGPKRPKALKLLGMEDDIPLRRGRKTTKKREEEVDIDLDDPEINHFPFPFHELMVWAVLMKRQKMALFFWQHGEEAMAKALVACKLCKAMAHEASENDMVDDISQELNHNSRDFGQLAVELLDQSYKQDEQLAMKLLTYELKNWSNATCLQLAVAAKHRDFIAHTCSQMLLTDMWMGRLRMRKNSGLKVILGILLPPSILSLEFKNKDDMPYMSQAQEIHLQEKEAEEPEKPTKEKEEEDMELTAMLGRNNGESSRKKDEEEVQSKHRLIPLGRKIYEFYNAPIVKFWFYTLAYIGYLMLFNYIVLVKMERWPSTQEWIVISYIFTLGIEKMREILMSEPGKLLQKVKVWLQEYWNVTDLIAILLFSVGMILRLQDQPFRSDGRVIYCVNIIYWYIRLLDIFGVNKYLGPYVMMIGKMMIDMMYFVIIMLVVLMSFGVARQAILFPNEEPSWKLAKNIFYMPYWMIYGEVFADQIDRKQVYDSHTPKSAPCGQNETREDGKIIQLPPCKTGAWIVPAIMACYLLVANILLVNLLIAVFNNTFFEVKSISNQVWKFQRYQLIMTFHERPVLPPPLIIFSHMTMIFQHLCCRWRKHESDPDERDYGLKLFITDDELKKVHDFEEQCIEEYFREKDDRFNSSNDERIRVTSERVENMSMRLEEVNEREHSMKASLQTVDIRLAQLEDLIGRMATALERLTGLERAESNKIRSRTSSDCTDAAYIVRQSSFNSQEGNTFKLQESIDPAGEETMSPTSPTLMPRMRSHSFYSVNMKDKGGIEKLESIFKERSLSLHRATSSHSVAKEPKAPAAPANTLAIVPDSRRPSSCIDIYVSAMDELHCDIDPLDNSVNILGLGEPSFSTPVPSTAPSSSAYATLAPTDRPPSRSIDFEDITSMDTRSFSSDYTHLPECQNPWDSEPPMYHTIERSKSSRYLATTPFLLEEAPIVKSHSFMFSPSRSYYANFGVPVKTAEYTSITDCIDTRCVNAPQAIADRAAFPGGLGDKVEDLTCCHPEREAELSHPSSDSEENEAKGRRATIAISSQEGDNSERTLSNNITVPKIERANSYSAEEPSAPYAHTRKSFSISDKLDRQRNTASLRNPFQRSKSSKPEGRGDSLSMRRLSRTSAFQSFESKHN

SEQ ID NO: 206717 - protein, 1063 aa, Artificial Sequence
  derived and/or modified sequence
MECPSCQHVSKEETPKFCSQCGERLPPAAPIADSENNNSTMASASEGEMECGQELKEEGGPCLFPGSDSWQENPEEPCSKASWTVQESKKKKRKKKKKGNKSASSELASLPLSPASPCHLTLLSNPWPQDTALPHSQAQQSGPTGQPSQPPGTATTPLEGDGLSAPTEVGDSPLQAQALGEAGVATGSEAQSSPQFQDHTEGEDQDASIPSGGRGLSQEGTGPPTSAGEGHSRTEDAAQELLLPESKGGSSEPGTELQTTEQQAGASASMAVDAVAEPANAVKGAGKEMKEKTQRMKQPPATTPPFKTHCQEAETKTKDEMAAAEEKVGKNEQGEPEDLKKPEGKNRSAAAVKNEKEQKNQEADVQEVKASTLSPGGGVTVFFHAIISLHFPFNPDLHKVFIRGGEEFGESKWDSNICELHYTRDLGHDRVLVEGIVCISKKHLDKYIPYKYVIYNGESFEYEFIYKHQQKKGEYVNRCLFIKSSLLGSGDWHQYYDIVYMKPHGRLQKVMNHITDGPRKDLVKGKQIAAALMLDSTFSILQTWDTINLNSFFTQFEQFCFVLQQPMIYEGQAQLWTDLQYREKEVKRYLWQHLKKHVVPLPDGKSTDFLPVDCPVRSKLKTGLIVLFVVEKIELLLEGSLDWLCHLLTSDASSPDEFHRDLSHILGIPQSWRLYLVNLCQRCMDTRTYTWLGALPVLHCCMELAPRHKDAWRQPEDTWAALEGLSFSPFREQMLDTSSLLQFMREKQHLLSIDEPLFRSWFSLLPLSHLVMYMENFIEHLGRFPAHILDCLSGIYYRLPGLEQVLNTQDVQDVQNVQNILEMLLRLLDTYRDKIPEEALSPSYLTVCLKLHEAICSSTKLLKFYELPALSAEIVCRMIRLLSLVDSAGQRDETGNNSVQTVFQGTLAATKRWLREVFTKNMLTSSGASFTYVKEIEVWRRLVEIQFPAEHGWKESLLGDMEWRLTKEEPLSQITAYCNSCWDTKGLEDSVAKTFEKCIIEAVSSACQVNNLSSWETDSGSQLCSAMTQLRAMKHPLGLSSSANSEIGKWAPSSLAKGNGAEI

SEQ ID NO: 206718 - DNA, 3192 bp, Artificial Sequence
  derived and/or modified sequence
atggagtgcccttcctgtcagcacgtttctaaggaagaaactccaaagttttgcagccagtgcggtgagaggcttccacccgctgcgcctatcgccgattcagagaataataactccaccatggcatccgcttcagaaggtgagatggaatgcggccaagaattaaaggaggagggcgggccctgcctgttccccggcagtgatagttggcaggagaacccggaagagccctgctcgaaggcatcttggaccgttcaggagagcaagaagaaaaaacgcaagaagaaaaaaaaaggaaataaatccgcttcaagcgagctcgcctcactgcccctgagcccagcgtctccttgtcacctgacgctactcagcaatccttggccacaggacaccgccctgccacattcccaggctcagcagagcggccctaccggccagccatctcagcccccggggaccgcgactacaccactggaaggtgacgggctgtccgcccctacagaggtcggcgattcgccattgcaggcccaagctctgggggaagccggggtagccacgggctccgaggctcaatcctcgccacagtttcaggaccatactgaaggggaggaccaggatgcatccattccaagcgggggcagaggcctttcccaggagggaaccgggccgcctacctccgctggtgaggggcatagcagaactgaggatgccgcccaggaactgctcctaccagagagcaaaggagggtcatcagaacctggcacggaacttcagaccaccgaacagcaggcaggcgctagcgcctcaatggctgttgacgcagttgctgaaccagcgaatgctgtcaagggcgctggcaaggaaatgaaagagaagacgcagagaatgaaacagcctcccgcaactaccccaccgtttaaaactcactgtcaggaagcggagactaagaccaaggatgagatggcagccgccgaagaaaaagttgggaaaaatgaacagggggaaccagaggacctgaagaagccagagggcaagaacaggtccgcggctgcagtgaagaatgagaaagagcagaagaaccaggaggctgatgtgcaagaggttaaggcctcgaccctttcaccaggggggggcgtgacagtattcttccatgctattatctctctgcatttcccttttaaccccgacctgcacaaggtctttattcgaggtggggaagagtttggtgaatccaagtgggatagcaacatttgtgaattgcactacacacgtgaccttggccatgatcgcgtgctggtcgaaggcatcgtgtgcatcagcaagaagcacttagataaatacatcccatacaaatacgttatatataatggcgaaagctttgaatatgaattcatttataaacatcagcagaaaaagggggagtacgtgaaccgttgtctgttcataaaatcctcacttttggggtccggggactggcatcagtattatgatatagtgtatatgaaaccccacggacgtcttcagaaggtgatgaatcacataacagacgggccccgaaaagacctggtgaaaggaaaacaaatcgccgccgctttgatgctagatagcacattcagcattttgcagacatgggacaccatcaatctgaatagcttttttacgcagttcgagcaattttgcttcgtactccagcagccaatgatttacgaaggtcaggcacaactgtggaccgatctccaatatcgcgaaaaagaggtaaagcgctacctatggcagcatctgaaaaagcacgtcgtccctctgcccgacggtaagtcaaccgattttctccctgtggactgtcctgtaagatccaaacttaaaactggactcatcgtcctctttgtcgtggaaaagatcgagctcctgctggagggcagtctggattggctgtgtcacctgttaactagtgatgcttctagtcctgacgagtttcaccgagacctgtcgcacattcttgggattcctcagagctggaggctctacttagtgaacctgtgtcagcgctgtatggatacgagaacttatacctggctgggcgctttgcccgtattgcactgctgtatggagctggcgccacggcacaaagatgcttggagacagcctgaagacacgtgggccgccctggagggactgtccttttcaccatttagagaacagatgcttgacactagttccctgcttcagttcatgcgggaaaaacagcacttactgagcattgacgagcctctgttccggtcctggttctccttactccccttaagtcatctcgttatgtacatggagaactttatcgagcaccttggtcggtttcccgcccacattctggattgcctgtccgggatctattatcggctgcccggtctcgaacaagtccttaacacccaggacgtccaggacgtgcaaaatgtgcagaatattttagaaatgttgctgcggctattggacacctaccgcgacaagatccccgaggaggcattgtcgcctagctatctgaccgtatgtctgaaactccacgaggcaatttgcagcagcaccaagctcttgaagttttacgaactgcctgccctttccgccgaaattgtgtgtaggatgatccggctgctcagtctggtggacagcgcagggcagcgggacgagaccggcaacaatagtgtgcaaaccgttttccaagggacgctcgccgctaccaagagatggctacgagaagtcttcaccaaaaacatgctgacctcatccggagcctcattcacttacgtgaaggagattgaggtgtggaggaggttagtcgagattcagtttccagcagaacacggttggaaagagagtctcctgggagatatggaatggcgcctgaccaaggaagagccattgtcacagattacggcatactgcaactcctgctgggacacaaagggacttgaggactcagtggccaaaacatttgaaaaatgcattatcgaggcagtgtctagcgcgtgccaggttaataatctctctagctgggagaccgactcagggagtcagctctgctccgccatgacacagctgcgggcaatgaagcacccgttggggctatcttcgtccgccaactcggaaatcggaaaatgggccccttcttctttggccaaaggcaatggcgccgaaatctag

SEQ ID NO: 206719 - DNA, 3192 bp, Artificial Sequence
  derived and/or modified sequence
atggagtgccccagctgccagcacgtgtccaaggaggagacccccaagttctgcagccagtgtggggagcggctgcccccagctgcccccatcgctgacagcgagaacaacaacagcaccatggccagcgccagcgagggggagatggagtgtggccaggagctgaaggaggagggcggcccctgcctcttccctggcagtgacagctggcaggagaaccctgaggagccctgcagcaaggcctcctggacagtgcaggagagcaagaagaagaagaggaagaagaagaagaagggcaacaagagcgccagcagcgagctggccagcctgcccctgagccctgccagcccctgccacctgaccctgctgagcaacccctggccccaggacacagccctgccccacagccaggcccagcagagcggccccaccggccagcccagccagcccccaggcacagccaccacccccctggagggagatggcctgagcgcccccacagaggtgggggacagccccctgcaggcccaggccctgggggaggccggcgtggccaccggcagcgaggcccagagcagcccccagttccaggaccacacagaaggagaggaccaggatgccagcatccccagcggcggccggggcctgagccaggagggcactggaccacccaccagcgctggggagggccacagcaggacagaagatgctgcccaggagctgctgctgcctgagagcaaaggaggcagcagcgagcctggaacagagctgcagaccacagagcagcaggccggggccagcgcctccatggctgtggatgctgtggccgagcccgccaatgctgtgaagggagctgggaaggagatgaaggagaagacccagaggatgaagcagcccccagccaccaccccacccttcaagacccactgccaggaggccgagaccaagaccaaggatgagatggctgctgctgaggagaaggtgggcaagaatgagcagggcgagcctgaggacctgaagaagccagagggcaagaacagatctgctgctgctgtgaagaatgagaaggagcagaagaaccaggaggctgatgtgcaggaggtgaaggccagcaccctgagccctgggggcggcgtgaccgtcttcttccacgccatcatcagcctgcacttccccttcaacccagacctgcacaaggtgttcatccggggcggggaggagtttggagagagcaagtgggacagcaacatctgtgagctgcactacacccgggacctgggccatgacagagtgctggtggagggcatcgtgtgcatcagcaagaagcacctggacaagtacatcccctacaagtatgtgatctacaacggggagagctttgaatatgagttcatctacaagcaccagcagaagaagggggagtatgtgaaccgctgcctcttcatcaagagcagcctgctgggcagcggggactggcaccagtactatgacatcgtgtacatgaagccccacggccgcctgcagaaggtgatgaaccacatcacagatggccccaggaaggacctggtgaagggcaagcagattgctgctgccctgatgctggacagcaccttcagcatcctgcagacctgggacaccatcaacctgaacagcttcttcacccagtttgagcagttctgctttgtgctgcagcagcccatgatctatgagggccaggcccagctgtggacagacctgcagtaccgggagaaggaggtgaagcgctacctgtggcagcacctgaagaagcacgtggtgcccctgcctgatggcaagagcacagacttcctgcctgtggactgccctgtgcgcagcaagctgaagacaggcctgattgtgctgtttgtggtggagaagattgagctgctgctggagggcagcctggactggctgtgccacctgctgaccagtgatgccagcagcccagatgagttccaccgggacctgagccacatcctgggcatcccccagagctggaggctgtacctggtgaacctgtgccagcgctgcatggacaccaggacctacacctggctgggcgccctgcctgtgctgcactgctgcatggagctggcccccaggcacaaggatgcctggaggcagcctgaggacacctgggccgccctggagggcctgtccttcagccccttccgggagcagatgctggacaccagcagcctgctgcagttcatgagggagaagcagcacctgctgagcattgatgagcccctcttccgctcctggttcagcctgctgcccctgagccacctggtgatgtacatggagaacttcatcgagcacctgggccgcttccctgcccacatcctggactgcctgagcggcatctactaccgcctgcccggcctggagcaggtgctgaacacccaggatgtgcaggatgtgcagaatgtgcagaacatcctggagatgctgctgcggctgctggacacctacagagacaagatccctgaggaggccctgagccccagctacctgactgtgtgcctgaagctgcacgaggccatctgcagcagcaccaagctgctgaagttctatgagctgcctgccctgtctgctgagatcgtgtgcaggatgatccggctgctgagcctggtggacagcgctggccagagagatgagaccggcaacaacagcgtgcagacagtgttccagggcaccctggccgccaccaagcgctggctgcgggaggtgttcaccaagaacatgctgaccagcagcggggccagcttcacctacgtgaaggagattgaggtgtggaggcggctggtggagatccagtttcctgctgagcacggctggaaggagagcctgctgggggacatggagtggaggctgaccaaggaggagcccctgagccagatcacagcctactgcaacagctgctgggacaccaagggcctggaggacagcgtggccaagacctttgagaagtgcatcatcgaggccgtgtcctctgcctgccaggtgaacaacctgagctcctgggagacagattctggcagccagctgtgcagcgccatgacccagctgcgggccatgaagcaccccctgggcctgagcagcagcgccaacagcgagatcggcaagtgggcccccagcagcctggccaagggaaatggagctgagatctag

SEQ ID NO: 206720 - DNA, 3192 bp, Artificial Sequence
  derived and/or modified sequence
atggagtgccccagctgccagcacgtgagcaaggaggagacccccaagttctgctctcagtgcggagaaaggctgcctcccgctgcacctatcgctgactcagaaaataacaattcaaccatggctagtgcgtcagaaggtgaaatggagtgcggccaggagttaaaggaggaggggggcccctgcctgtttccaggatccgatagttggcaggagaatcctgaggagccctgctcgaaagcgagctggaccgttcaagagagcaaaaaaaaaaaacggaagaaaaagaaaaaagggaacaagagtgcctcatcagaactggcatccctccccctgtcacctgcctcaccatgccaccttacactgctgtctaacccatggccacaggacaccgctctccctcattcccaggctcaacaatctggccctactggacagccaagccagcccccgggcactgccactacgcccctggaaggcgatggactgtcagccccaaccgaggtgggggattctcccttgcaggcgcaggcactcggcgaagccggagttgccacagggtccgaggcacagagttctccccagttccaggaccacaccgaaggggaggaccaggatgcgtcaattcctagcgggggacgcggactttctcaagaggggaccggtccaccaacttccgctggggagggtcacagcagaacggaggacgccgcccaggaactcctcctgccagagtcaaaaggcgggagctctgagcccgggactgagctgcagaccacagagcagcaggcaggggcgagtgccagcatggctgtggatgcagtggccgaacctgctaatgctgttaagggggccggaaaggaaatgaaagagaagacccaacggatgaaacagcccccggccaccacaccaccgtttaaaacccattgtcaggaagccgaaaccaagacaaaggacgagatggccgctgctgaggagaaagttggaaagaacgagcagggtgagccagaggacttgaaaaagccagaaggtaaaaataggagtgccgctgccgtgaagaacgagaaagagcagaaaaaccaggaggccgacgttcaggaagtcaaggctagtaccctctctcccggcggcggggtgacagtatttttccatgcaataatcagtttgcactttccttttaaccctgacctgcacaaggtattcatcagaggaggtgaagagttcggggaatcaaagtgggattcgaacatatgcgagctgcactacactagggatctggggcacgaccgcgtcttggttgaaggaattgtttgcatctccaagaagcacctggacaaatatatcccttataagtacgtgatctataatggagaaagtttcgaatatgagtttatctataagcaccagcagaagaaaggggagtatgtcaaccggtgcctgtttataaagtccagtctactcggcagcggggactggcaccagtactatgatatcgtctatatgaagcctcatggtagacttcagaaggtgatgaaccacatcacagatggccccagaaaagacttggtgaaaggcaagcagatcgccgccgctttgatgctggacagcacctttagcatcctgcagacatgggacacaataaacctcaattctttcttcacccagtttgaacaattctgtttcgtattacagcagccaatgatctatgaaggccaagctcagctttggacagacctacagtacagggaaaaggaagttaaacgctatctctggcagcacctgaagaagcacgtagttcctctgccggatggaaaaagcaccgatttcctaccagtagattgccctgtccgtagcaaactcaagaccggattgatcgtactgttcgtggtcgagaagattgagctgttactcgaagggagcttggattggctttgtcatctcttgacgtctgacgccagcagccccgacgagtttcaccgcgacctttctcatatccttggcatcccacaatcttggaggctatacctggttaacctgtgccagcggtgcatggacacccggacttacacttggctgggggctctgccagtgctgcactgctgcatggaactggctcctcggcataaagatgcctggagacagccagaagacacctgggccgcgctggagggcctctcgttcagcccattccgcgagcagatgctcgatacgagctcccttctgcaattcatgagagagaagcagcacttgctgagcatagatgaacccctctttcggtcctggttttctttgctgccccttagccatctcgtgatgtatatggagaatttcattgagcatctcggtagattcccggcacacattctggattgcctgagcggaatttattataggctgccgggactagagcaggtgctcaatacgcaagacgttcaggacgtgcaaaacgtgcagaatatcctagagatgctgctccggctcctagacacctacagggataagattccagaggaggccctgagtccaagttacctgactgtgtgtctgaaactacatgaggcaatttgcagctccaccaaactactcaaattctacgagctccccgccttatctgctgagattgtctgcagaatgataagacttctgtctctggtggattccgccggccaacgagatgagaccggaaataatagtgtgcagaccgtcttccagggcaccctggccgccacaaagagatggttacgagaagtgttcacaaaaaatatgctcacaagttccggtgctagctttacttatgtcaaagagatcgaggtctggcgaagactagtcgagattcagttcccggctgagcacggttggaaggagagtttgctcggtgacatggagtggcgtctcactaaggaagagcctctcagccagattaccgcctactgcaacagttgttgggacacaaagggtctagaggactcagtggcaaagaccttcgaaaaatgtattattgaagccgtgagcagcgcctgccaggtgaataatcttagctcatgggagactgatagcggtagtcagctgtgttctgctatgacccagcttcgggccatgaagcatcctcttggattgtcatcgtccgcgaatagtgagataggtaagtgggcgcctagctccctggctaaaggcaacggtgccgagatctag

SEQ ID NO: 206721 - DNA, 3192 bp, Artificial Sequence
  derived and/or modified sequence
atggaatgcccaagctgccaacacgtttcaaaggaggagaccccgaagttttgctctcaatgcggtgagcgactgcccccagctgcacccatagcggatagtgaaaataacaacagcacgatggcttccgcgagcgagggagagatggaatgcggccaggagctgaaggaggagggcggaccttgcctatttccagggtcagacagttggcaggaaaaccctgaggagccttgcagcaaagccagctggacggtgcaggagtcaaagaagaaaaaaaggaagaagaaaaaaaagggtaacaagtctgcaagctcggagctcgccagtctcccgctgagtccggctagcccatgtcaccttaccttgctatccaatccttggccccaggacactgctctgccacattcccaagcccagcagagcgggccaacagggcagcctagccaacctccaggcacagcaacgacaccactcgagggcgatggcctttctgctccgaccgaagtcggtgatagtccactgcaagcccaggccctgggggaagccggagttgcaacgggaagtgaggctcagtcatcccctcagtttcaagatcatactgagggggaggaccaggatgcctcaatcccttccgggggacgagggctatcccaagaaggtactggtccccctacctccgcgggtgaagggcacagccgcactgaggacgctgctcaggaacttttattacctgaatccaagggaggctccagcgagcccggtacggagctccagaccaccgagcaacaagctggagcttctgcaagcatggccgtagatgccgttgccgagcctgccaatgccgtgaaaggcgcaggtaaagaaatgaaagagaagacccagcgaatgaagcagccccctgcaacaactcctcctttcaaaacacattgtcaagaggctgagacaaagaccaaggatgagatggcagcagccgaggaaaaagtggggaagaacgaacagggagagcctgaggacctgaagaagcccgaagggaagaatcggtccgccgctgcagtcaagaacgagaaagaacagaaaaatcaggaggctgatgtgcaggaagtgaaagcctcgaccttaagtcctggcggtggtgtgactgtcttttttcacgctatcatcagtctgcactttccattcaatccagaccttcacaaggttttcattaggggtggcgaggaattcggagagagcaagtgggactcgaatatttgcgagctgcactatacccgggatctgggacatgatcgggtactggttgagggaattgtgtgcatcagcaaaaagcacctggacaagtacattccctataaatatgtgatctataatggagaatcattcgaatacgagttcatttataagcatcaacaaaagaagggcgagtatgttaatcgctgtctgttcattaaaagctctttgcttggttccggtgactggcatcagtactacgatatagtttacatgaaaccccatggcaggctccagaaagtgatgaaccatattacggacgggcctcgcaaggatctcgtcaagggcaaacagatagcagccgcactcatgctggactccacatttagcatccttcagacatgggacaccattaacctgaacagtttctttactcagttcgagcaattctgctttgttctccagcaacctatgatctatgaaggacaggcccaactatggacagatcttcagtaccgggaaaaagaggtgaagcgctacctttggcagcacttaaagaagcacgttgtcccactgcccgatggaaaaagcaccgactttctccctgtggactgccccgtacgctccaaactgaaaaccggtctcattgtcttgttcgtggtggagaaaatcgagctgcttctggagggatcattggactggttgtgccacctgctgacgtcagacgcctcgagcccagacgaattccatagggatctctcacatatcctggggataccacaatcgtggcgcctttatctggtgaatttatgccagaggtgcatggacaccaggacctacacatggctgggtgccttgcccgtcctgcattgctgcatggaattggccccaagacacaaggatgcatggcgccagcccgaggatacatgggcggcactagagggactttccttttccccattccgtgaacaaatgttggatacatctagtctcctccaattcatgagggagaagcagcatcttctgtcgatagatgagcccttgttcagaagctggttctctcttttgcctctgtctcatctcgtcatgtacatggagaactttatcgagcatctgggcaggttccccgctcatatccttgactgcctcagcggaatttactatcgcttgcccggactggagcaggtgctcaatacccaggatgttcaagacgtccaaaacgtacagaatatattggagatgttgctcaggctgctggatacctatagagataagattcctgaagaggccctctcaccatcttaccttaccgtgtgtctcaaattacacgaggctatttgtagcagtacaaagcttctgaagttctatgagctgcccgctctgtctgcagagatcgtgtgtaggatgatccgactcttgtcccttgtggattccgcagggcaacgcgacgaaacaggaaacaatagcgtgcagacagtgttccaaggcacactggccgcaactaagaggtggctgcgagaggtttttaccaaaaatatgctaaccagctcaggtgcaagttttacctatgtaaaagagatcgaagtgtggcgcagactcgtcgagatccagtttccagcagagcacggctggaaagagtctctcctgggcgacatggagtggcggctgacaaaagaggagcctctttcacagataactgcctactgcaactcatgttgggatacaaaaggcctggaagattccgtagctaagacattcgaaaagtgtattattgaggcagtctcttctgcttgtcaagtcaacaacctgtcatcttgggaaaccgacagcggctcacagctatgttcggcaatgacccagctgagagctatgaagcacccgctgggcctgagttcatccgcaaactcagaaatagggaagtgggctccatcttccctggccaagggtaacggggctgagatctag

SEQ ID NO: 206722 - DNA, 5313 bp, Artificial Sequence
  derived and/or modified sequence
cagcgcgcggcaggcggcgagctcgggggccgcagaaaatgaaactgaagccgtggtcacgtgacaggacatgtagtatatagcaggctgccagcgactcctgctcttgcttctggatctgcagggcagtcccagcaggacccatggagtgtccttcgtgccagcatgtctccaaggaggaaacccccaagttctgcagccagtgcggagagaggctgcctcctgcagcccccatagcagattctgagaacaataactccacaatggcgtcggcctcggagggtgaaatggagtgtgggcaggagctgaaggaggaagggggcccgtgcttgttcccgggctcagacagttggcaagaaaaccccgaggagccctgttccaaagcctcctggaccgtccaagaaagcaaaaagaagaaaaggaagaagaaaaagaaggggaacaagtccgcttcctcagagctggcttccttgcccctttctcctgccagcccctgtcacctgactttgctttcaaacccgtggcctcaggacacagccctgccccacagccaagcccagcagagtggccccactggccagccgagccagcccccaggcacagccaccacgccactggagggtgacggcctctccgcgcccaccgaggttggcgacagccccctgcaggcccaggctttgggagaggcaggagtggccacaggaagtgaggctcagagcagcccgcaattccaggaccacacggaaggggaggaccaggacgcttccatcccctctgggggcagaggcctgtcccaggaggggaccggtccccccacctctgctggtgaaggccattctaggactgaagatgctgcccaggagctcctgttgcctgagtcaaaaggaggcagctctgagcccgggacagaactgcagaccaccgagcaacaggcaggggcctcagcctctatggcagttgatgctgtagctgagccagccaatgcagttaaaggggccgggaaggaaatgaaagagaagacccagagaatgaaacagccaccagcaaccactcctcctttcaaaacacactgccaggaagctgagaccaagaccaaggacgagatggctgctgctgaagaaaaagtcggtaagaatgaacaaggggagcctgaagacctcaagaagccagaggggaagaacagaagtgcagctgctgtgaaaaacgagaaggagcaaaaaaaccaggaagcagatgtccaggaagtgaaggcaagcacgctgagcccgggtggaggagtcaccgtgttcttccacgccatcatctctcttcatttcccattcaatcctgacctccataaagtcttcatcagaggaggagaagaatttggggagtcaaaatgggacagcaatatctgtgagctgcactacaccagagacttgggtcatgaccgcgttcttgttgaaggcattgtctgcatttccaagaagcacctagataaatacattccttacaagtacgtcatttataatggggaatcttttgagtatgagttcatttacaagcaccagcagaagaagggcgagtacgtcaaccgctgtctgttcataaaatcttcacttctgggctcaggagactggcatcagtactatgacatagtttatatgaagcctcatgggagactccagaaagtcatgaaccacatcacagacgggccgaggaaggacctggtgaaggggaagcagattgccgctgcgctcatgctggacagcaccttcagcatcctgcagacctgggacaccatcaacctgaacagcttcttcacccagttcgagcagttttgctttgtcctgcaacagcctatgatttatgaaggacaggcacagctgtggaccgatttgcagtacagggagaaagaggtgaagagatacctgtggcaacatctgaaaaaacacgtggtaccattgccggacggaaaaagcacggactttttgcctgtggactgcccagtgaggagtaaactgaaaacaggcctgattgtcctttttgtagtggaaaaaattgagcttttattagaaggcagcctggactggttgtgtcacctcctaacctcagatgccagctcaccagatgagtttcaccgtgacctaagccacatccttgggatacctcagagctggcggctgtacctggtgaacctgtgccaaagatgcatggacacaaggacgtacacctggctgggcgccctgcctgtcctgcactgctgtatggagctggccccgcggcacaaggatgcctggagacagcctgaggacacctgggccgctctggagggactctccttctcaccgttccgggaacaaatgctagatacgagttccctacttcagtttatgagagagaagcagcatttgctgagcatagacgagcctctcttccggtcctggtttagtctgctacctctgagtcacctggttatgtatatggaaaacttcattgagcacctgggtcgttttcctgctcatatcctggactgtctttcagggatttactaccggcttccgggacttgagcaagtcttgaatacgcaggatgttcaggatgttcagaacgttcagaacattttagaaatgctgttgcgactcctggacacttaccgggacaagattcccgaggaggccttgtcaccatcctacctgactgtgtgtctgaaactgcatgaagccatctgcagcagcacaaagctacttaagttttacgagctgccagccttatctgccgagattgtctgcagaatgattagacttctatctctggtggattctgcaggacagagagatgaaactggaaataattcagtccaaacagtcttccaagggacccttgctgctacgaaaaggtggctccgagaagtttttacaaagaacatgctcacatcttcaggtgcctcattcacatacgtcaaggaaattgaggtctggaggcggctggtggaaatccaattccccgcggagcatggctggaaggagtcgttgctgggagacatggaatggaggctcacaaaggaggaacccctctcccagatcactgcctactgcaatagttgctgggacaccaaaggcttagaggacagtgtggccaagaccttcgagaaatgcatcattgaagccgtgagctcagcctgccaggtgaacaatctctcctcctgggaaacggattcgggctcacagctgtgttctgccatgacccagctaagggctatgaagcacccgctgggtctcagctcctccgctaactcagagattgggaagtgggcaccctcctccctcgccaagggcaatggcgctgaaatctagttctctccggattcctcagtgtgctgcacagtccctgctgctcgcaccatcctgcatgtgttccatatggaatcacggccgtgcgcgtgtggcacaagtcacacgggcttgcaggccgttcctcagatggccctgtcatcactgtggctgctggtttgattgattgttaacacttgctcagtaggtgtgcgggaagagactccaaaggttgacagaacatttatggaagcaaaatatgtgaaatggaaaattgtatcaatttatttagctcttttcggcaaaggggaagagattgtgcccccctgtctcccaggaacagtctcgcaggcaatgccacatgaggaagctccctgctggccacggctgccctgctcacatttcctaattggacacttaacccctgtacaagcacagccttgcggccacaggggaagtccagaaacattgaggtcattgaattccggggaccaaggggttctaattttttaagtgactgatacctttgataaggttttcctttccctttttcgttaactctttgttgagatattgttcgtatgccatacggtacatctgtcaaaagttccagttcagcaggttttggggtagtcacagatatgtacagtcatcaccacagttaatgacagagcattttcatcacttcaaagagaaacccggcccctttagccatcatcctcctcccctctagtcacccactcccctctgcaggcataaacaattgctgaacataaacaactgcttctgtggctttctctgttctgactgtcatatgaatggaatcatatcatatgtggccttttgggtatggcttatttcactgagcataatgtttttttgttgttggtggtggtggttgtttgttgtttttgagacagagtttcactctttttgcccaggctggagtgcaatggtgcgatcctggctcaccgcaaccgctgcctcccgggttcaagtgattctcctgcctcagcctcccaagtgctggaattacagctactttttgtttaaagagtcttttaattgtttaaagaacaatgtgccgccacactcggttccttttgtatttttagaagagacagggtttctccatgttggtcaggctggtctcgaactcccgacctcaggtgatccacccaccttggcctcccgaagtgccgagattacaggtgtgagccaccgcgcccggccgagcataatgttttgaaagaccgctcaggctggacacggttgctcacgcctgtaatcacggcactttgggagcccaggagttcaagacaagcctgggtaacagagtaagaccctgtctctataaaaactaaaaaataaacaaaaaaaattagccaggcatggccgggcacacctgtggtcccagctacttgggaggctgaggtgggaggctcccttgggcccagaaggtcaaggcagcagtgagccatgatcacaccactgcacttcaacctgggggacagagcaagaccctgtctcaaaaagcaataacaacaaaagtccatccatattgtagcttgtgtccgtttacgttaagtattccttacccaaaatgcttgagaccagaagtgttttggatttcagatgttttcaaattttggaatatttgcatttacataatgagatgtcttccagatgggacccagagtctaaccacaaaattcacttgtttcatatacatcttatacacatagcctgaaggtaattttatacaatatttttaacaattttgtgcatgagacaaagtttgtattaagtatttgtatgttgaatttttcacttgtggcatcattatactcaaaaagtttggattttgtagtattttggatttggggattaggaatgctcaacctatatttcatttttttccatggccaaatattccccgtttatccatgtgtccattgacggccatctatgttgcttcttcggctattataaatctgctgat

SEQ ID NO: 206723 - DNA, 3192 bp, Artificial Sequence
  derived and/or modified sequence
atggagtgccccagctgccagcacgtgagcaaggaggagacccccaagttctgcagccagtgcggcgagagactgccccccgccgcccccatcgccgacagcgagaacaacaacagcaccatggccagcgccagcgagggcgagatggagtgcggccaggagctgaaggaggagggcggcccctgcctgttccccggcagcgacagctggcaggagaaccccgaggagccctgcagcaaggccagctggaccgtgcaggagagcaagaagaagaagagaaagaagaagaagaagggcaacaagagcgccagcagcgagctggccagcctgcccctgagccccgccagcccctgccacctgaccctgctgagcaacccctggccccaggacaccgccctgccccacagccaggcccagcagagcggccccaccggccagcccagccagccccccggcaccgccaccacccccctggagggcgacggcctgagcgcccccaccgaggtgggcgacagccccctgcaggcccaggccctgggcgaggccggcgtggccaccggcagcgaggcccagagcagcccccagttccaggaccacaccgagggcgaggaccaggacgccagcatccccagcggcggcagaggcctgagccaggagggcaccggcccccccaccagcgccggcgagggccacagcagaaccgaggacgccgcccaggagctgctgctgcccgagagcaagggcggcagcagcgagcccggcaccgagctgcagaccaccgagcagcaggccggcgccagcgccagcatggccgtggacgccgtggccgagcccgccaacgccgtgaagggcgccggcaaggagatgaaggagaagacccagagaatgaagcagccccccgccaccaccccccccttcaagacccactgccaggaggccgagaccaagaccaaggacgagatggccgccgccgaggagaaggtgggcaagaacgagcagggcgagcccgaggacctgaagaagcccgagggcaagaacagaagcgccgccgccgtgaagaacgagaaggagcagaagaaccaggaggccgacgtgcaggaggtgaaggccagcaccctgagccccggcggcggcgtgaccgtgttcttccacgccatcatcagcctgcacttccccttcaaccccgacctgcacaaggtgttcatcagaggcggcgaggagttcggcgagagcaagtgggacagcaacatctgcgagctgcactacaccagagacctgggccacgacagagtgctggtggagggcatcgtgtgcatcagcaagaagcacctggacaagtacatcccctacaagtacgtgatctacaacggcgagagcttcgagtacgagttcatctacaagcaccagcagaagaagggcgagtacgtgaacagatgcctgttcatcaagagcagcctgctgggcagcggcgactggcaccagtactacgacatcgtgtacatgaagccccacggcagactgcagaaggtgatgaaccacatcaccgacggccccagaaaggacctggtgaagggcaagcagatcgccgccgccctgatgctggacagcaccttcagcatcctgcagacctgggacaccatcaacctgaacagcttcttcacccagttcgagcagttctgcttcgtgctgcagcagcccatgatctacgagggccaggcccagctgtggaccgacctgcagtacagagagaaggaggtgaagagatacctgtggcagcacctgaagaagcacgtggtgcccctgcccgacggcaagagcaccgacttcctgcccgtggactgccccgtgagaagcaagctgaagaccggcctgatcgtgctgttcgtggtggagaagatcgagctgctgctggagggcagcctggactggctgtgccacctgctgaccagcgacgccagcagccccgacgagttccacagagacctgagccacatcctgggcatcccccagagctggagactgtacctggtgaacctgtgccagagatgcatggacaccagaacctacacctggctgggcgccctgcccgtgctgcactgctgcatggagctggcccccagacacaaggacgcctggagacagcccgaggacacctgggccgccctggagggcctgagcttcagccccttcagagagcagatgctggacaccagcagcctgctgcagttcatgagagagaagcagcacctgctgagcatcgacgagcccctgttcagaagctggttcagcctgctgcccctgagccacctggtgatgtacatggagaacttcatcgagcacctgggcagattccccgcccacatcctggactgcctgagcggcatctactacagactgcccggcctggagcaggtgctgaacacccaggacgtgcaggacgtgcagaacgtgcagaacatcctggagatgctgctgagactgctggacacctacagagacaagatccccgaggaggccctgagccccagctacctgaccgtgtgcctgaagctgcacgaggccatctgcagcagcaccaagctgctgaagttctacgagctgcccgccctgagcgccgagatcgtgtgcagaatgatcagactgctgagcctggtggacagcgccggccagagagacgagaccggcaacaacagcgtgcagaccgtgttccagggcaccctggccgccaccaagagatggctgagagaggtgttcaccaagaacatgctgaccagcagcggcgccagcttcacctacgtgaaggagatcgaggtgtggagaagactggtggagatccagttccccgccgagcacggctggaaggagagcctgctgggcgacatggagtggagactgaccaaggaggagcccctgagccagatcaccgcctactgcaacagctgctgggacaccaagggcctggaggacagcgtggccaagaccttcgagaagtgcatcatcgaggccgtgagcagcgcctgccaggtgaacaacctgagcagctgggagaccgacagcggcagccagctgtgcagcgccatgacccagctgagagccatgaagcaccccctgggcctgagcagcagcgccaacagcgagatcggcaagtgggcccccagcagcctggccaagggcaacggcgccgagatctag

SEQ ID NO: 206724 - protein, 147 aa, Artificial Sequence
  derived and/or modified sequence
MEARSRSAEELRRAELVEIIVETEAQTGVSGINVAGGGKEGIFVRELREDSPAARSLSLQEGDQLLSARVFFENFKYEDALRLLQCAEPYKVSFCLKRTVPTGDLALRPGTVSGYEIKGPRAKVAKLVRVLSPAPALDCPSDPVSAP

SEQ ID NO: 206725 - DNA, 444 bp, Artificial Sequence
  derived and/or modified sequence
atggaggctaggtctcggagtgctgaggagctgcggcgggccgagctcgtggaaatcattgtcgaaactgaggctcagaccggagtgtcaggcataaacgtggcggggggtggcaaggaaggcatcttcgtgagagagctgagagaagactctccggctgccagaagcttgtcgctgcaggaaggcgaccagctcttgtcagccagagtctttttcgagaacttcaaatatgaagacgcactaaggctacttcagtgcgccgaaccatacaaggtttcattttgtctgaaacgtaccgtacctacgggggacctcgctctcaggccaggaactgtgtctgggtacgagattaagggaccccgcgcgaaggtggccaagctggtgagggtgttgagccctgcgcccgccttggattgcccaagcgatcctgtgagcgctccctag

SEQ ID NO: 206726 - DNA, 444 bp, Artificial Sequence
  derived and/or modified sequence
atggaggcccggagccgctctgctgaggagctgcggcgggcagagctggtggagatcatcgtggagacagaggcccagacaggagtgtctggcatcaacgtggccggcggcggcaaggagggcatctttgtgcgggagctgcgggaggacagccctgctgcccggagcctgagcctgcaggagggggaccagctgctgagcgcccgggtcttctttgagaacttcaagtatgaagatgccctgcggctgctgcagtgtgccgagccctacaaggtgtccttctgcctgaagaggacagtgcccaccggggacctggccctgcggcccggcaccgtgtctggctatgagatcaagggcccccgggccaaggtggccaagctggtgcgggtgctgagccctgccccagccctggactgccccagcgaccctgtgtctgccccctag

SEQ ID NO: 206727 - DNA, 444 bp, Artificial Sequence
  derived and/or modified sequence
atggaggcccggagccggagcgccgaggagctgcggcgggccgagttagtcgaaatcatagtggaaactgaagcccagacgggtgtgtccggaatcaatgttgccggcggcggcaaagaaggtattttcgtgcgcgaactgcgggaggattctccagccgctcgctctctaagcttgcaggaaggggaccagctcctttcagccagagtattttttgaaaatttcaagtacgaagacgcccttcgcctccttcagtgtgctgagccatacaaagtgagcttctgtctgaagcggactgtgcctactggggacctggcccttcgtccagggacagtctccggctacgagattaaagggccacgcgccaaggttgccaagctggtgcgagtcctgtcgccggctcctgcattggattgtccgagcgatcccgtctccgccccttag

SEQ ID NO: 206728 - DNA, 444 bp, Artificial Sequence
  derived and/or modified sequence
atggaggctagatcacgtagcgccgaagaactgcgtcgcgctgaactggtagagattattgtggagacagaagcacagaccggagtgagcggaattaatgtggccggagggggaaaagagggtattttcgtccgggaactcagagaagacagccccgcagcacgttcactgagcctgcaggaaggagatcaactcctgtctgcaagggtgttctttgaaaattttaaatacgaagatgccctgaggctgcttcagtgcgctgagccttataaggtgtctttctgtctgaaaagaaccgtgccaacaggcgatctggctctcagacccggaaccgtttccggatatgaaatcaaagggccaagggctaaggttgccaagctggtgcgcgtcctctcacctgcccctgccctcgactgcccaagcgatcctgtttctgcaccttag

SEQ ID NO: 206729 - DNA, 444 bp, Artificial Sequence
  derived and/or modified sequence
atggaggccagaagcagaagcgccgaggagctgagaagagccgagctggtggagatcatcgtggagaccgaggcccagaccggcgtgagcggcatcaacgtggccggcggcggcaaggagggcatcttcgtgagagagctgagagaggacagccccgccgccagaagcctgagcctgcaggagggcgaccagctgctgagcgccagagtgttcttcgagaacttcaagtacgaggacgccctgagactgctgcagtgcgccgagccctacaaggtgagcttctgcctgaagagaaccgtgcccaccggcgacctggccctgagacccggcaccgtgagcggctacgagatcaagggccccagagccaaggtggccaagctggtgagagtgctgagccccgcccccgccctggactgccccagcgaccccgtgagcgccccctag

SEQ ID NO: 206730 - protein, 2579 aa, Artificial Sequence
  derived and/or modified sequence
MAEAVKPQRRAKAKASRTKTKEKKKYETPQREESSEVSLPKTSREQEIPSLACEFKGDHLKVVTDSQLQDDASGQNESEMFDVPLTSLTISNEESLTCNTEPPKEGGEARPCVGDSAVTPKVHPGDNVGTKVETPKNFTEVEENMSVQGGLSESAPQSNFSYTQPAMENIQVRETQNSKEDKQGLVCSSEVPQNVGLQSSCPAKHGFQTPRVKKLYPQLPAEIAGEAPALVAVKPLLRSERLYPELPSQLELVPFTKEQLKILEPGSWLENVESYLEEFDSMAHQDRHEFYELLLNYSRCRKQLLLAEAELLTLTSDCQNAKSRLWQFKEEQMSVQGICADQVKVFSYHRYQRVEMNENALVELKKLFDAKSEHLHQTLALHSYTSVLSRLQVESYIYALLSSSAVLRSSAIHQQGRASKQTESIPSDLCQLKECISVLFMFTRRVNEDTQFHDDILLWLQKLVSVLQRVGCPGDHLFLLNHILRCPAGVSKWAVPFIQIKVLHNPSGVFHFMQSLALLMSPVKNRAEFMCHMKPSERKPSSSGPGSGTWTLVDEGGEEDEDPETSWILLNEDDLVTILAQFPFHELFQHLLGFKAKGDYLPETTRPQEMMKIFAFANSLVELLAVGLETFNRARYRQFVKRIGYMIRMTLGYVSDHWAQYVSHNQGSGLAQQPYSMEKLQVEFDELFLRAVLHVLKAKRLGIWLFMSEMPFGTLSVQMLWKLFYLMHQVESENLQQLSSSLQPAQCKQQLQDPEHFTNFEKCLSSMNSSEEICLLTTFAQMAQARRTNVDEDFIKIIVLEIYEVSYVTLSTRETFSKVGRELLGTITAVHPEIISVLLDRVQETIDQVGMVSLYLFKELPLYLWQPSASEIAVIRDWLLNYNLTVVKNKLACVILEGLNWGFAKQATLHLDQAVHAEVALMVLEAYQKYLAQKPYAGILSESMKQVSYLASIVRYGETPETSFNQWAWNLILRLKLHKNDYGIQPNCPAVPFSVTVPDMTESPTFHPLLKAVKAGMPIGCYLALSMTAVGHSIEKFCAEGIPLLGILVQSRHLRTVVHVLDKILPLFYPCQYYLLKNEQFLSHLLLFLHLDSGVPQGVTQQVTHKVAQHLTGASHGDNVKLLNSMIQAHISVSTQPNEVGPVAVLEFWVQALISQHLWYREQPILFLMDHLCKAAFQLMQEDCIQKLLYQQHKNALGYHCDRSLLSSLVSWIVAGNITPSFVEGLATPTQVWFAWTVLNMESIFEEDSQLRRVIEGELVINSAFTPDQALKKAQTQLKLPIVPSLQRLLIYRWAHQALVTPSDHPLLPLIWQKFFLLYLHRPGPQYGLPIDGCIGRRFFQSPAHINLLKEMKRRLTEVADFHHAASKALRVPAEGSEGLPESHSGTPGYLTSPELHKELVRLFNVYILWLEDENFQKGDTYIPSLPKHYDIHRLAKVMQNQQDLWMEYLNMERIYHEFQETVGLWTQAKLESHSTPCSLSVQLDFTDPLLAKERVLSNLRKHEAPQPPLALHPTKPPVPVISSAVLLSQKDATQLVCTDLNLLQQQARTAALRESQQVALDGELLDTMPKQYVNREEQTTLHLECRGSSGKKCQGAAVVTVQFEGMHKNEAISQQLHVLRKEVKQLQAEAAKPPSLNIVEAAVHAENLITALVNAYKLQPTPGIQKVGISLFFTIVDYVSDETQRHPPTRQFFTSCIEILGQVFISGIKSECRKVLETILKNSRLCSLLSPFFTPNAAPAEFIQLYEQVVKFLSEDNSDMIFMLLTKFDLKQWLSATKPPLSDRTRLLESIHLALTAWGLEPDEDILMPFNLFCKHWTYLLLYQFPDQYSDILRLLMQSSAEQLLSPECWKATLRALGCCAPSCQQGAASTEGAVLPSSSDALLSDKQVMETIQWLSDFFYKLRLSKMDFKSFGLFSKWSPYMADVKTFLGYLVKRLIDLEMTCLAQDPTASRKTVLKSLHSVIIQLFKPWILVLEDNESSQQRHYPWLESDTVVASSIVQLFTDCIDSLHESFKDKLLPGDAGALWLHLMHYCEACTAPKMPEFILYAFHSTYRKLPWKDLHPDQMLMEAFFKVERGSPKSCFLFLGSVLCEVNWVSVLSDAWNSSPHPETRSMIVCLLFMMILLAKEVQLVDQTDSPLLSLLGQTSSLSWHLVDIVSYQSVLSYFSSHYPPSIILAKESYAELIMKLLKVSAGLSIPTDSQKHLDAVPKCQAFTHQMVQFLSTLEQNGKITLAVLEQEMSKLLDDIIVFNPPDMDSQTRHMALSSLFMEVLMMMNNATIPTAEFLRGSIRTWIGQKMHGLVVLPLLTAACQSLASVRHMAETTEACITAYFKESPLNQNSGWGPILVSLQVPELTMEEFLQECLTLGSYLTLYVYLLQCLNSEQTLRNEMKVLLILSKWLEQVYPSSVEEEAKLFLWWHQVLQLSLIQTEQNDSVLTESVIRILLLVQSRQNLVAEERLSSGILGAIGFGRKSPLSNRFRVVARSMAAFLSVQVPMEDQIRLRPGSELHLTPKAQQALNALESMASSKQYVEYQDQILQATQFIRHPGHCLQDGKSFLALLVNCLYPEVHYLDHIR

SEQ ID NO: 206731 - protein, 1356 aa, Artificial Sequence
  derived and/or modified sequence
MIQAHISVSTQPNEVGPVAVLEFWVQALISQHLWYREQPILFLMDHLCKAAFQLMQEDCIQKLLYQQHKNALGYHCDRSLLSSLVSWIVAGNITPSFVEGLATPTQVWFAWTVLNMESIFEEDSQLRRVIEGELVINSAFTPDQALKKAQTQLKLPIVPSLQRLLIYRWAHQALVTPSDHPLLPLIWQKFFLLYLHRPGPQYGLPIDGCIGRRFFQSPAHINLLKEMKRRLTEVADFHHAASKALRVPAEGSEGLPESHSGTPGYLTSPELHKELVRLFNVYILWLEDENFQKGDTYIPSLPKHYDIHRLAKVMQNQQDLWMEYLNMERIYHEFQETVGLWTQAKLESHSTPCSLSVQLDFTDPLLAKERVLSNLRKHEAPQPPLALHPTKPPVPVISSAVLLSQKDATQLVCTDLNLLQQQARTAALRESQQVALDGELLDTMPKQYVNREEQTTLHLECRGSSGKKCQGAAVVTVQFEGMHKNEAISQQLHVLRKEVKQLQAEAAKPPSLNIVEAAVHAENLITALVNAYKLQPTPGIQKVGISLFFTIVDYVSDETQRHPPTRQFFTSCIEILGQVFISGIKSECRKVLETILKNSRLCSLLSPFFTPNAAPAEFIQLYEQVVKFLSEDNSDMIFMLLTKFDLKQWLSATKPPLSDRTRLLESIHLALTAWGLEPDEDILMPFNLFCKHWTYLLLYQFPDQYSDILRLLMQSSAEQLLSPECWKATLRALGCCAPSCQQGAASTEGAVLPSSSDALLSDKQVMETIQWLSDFFYKLRLSKMDFKSFGLFSKWSPYMADVKTFLGYLVKRLIDLEMTCLAQDPTASRKTVLKSLHSVIIQLFKPWILVLEDNESSQQRHYPWLESDTVVASSIVQLFTDCIDSLHESFKDKLLPGDAGALWLHLMHYCEACTAPKMPEFILYAFHSTYRKLPWKDLHPDQMLMEAFFKVERGSPKSCFLFLGSVLCEVNWVSVLSDAWNSSPHPETRSMIVCLLFMMILLAKEVQLVDQTDSPLLSLLGQTSSLSWHLVDIVSYQSVLSYFSSHYPPSIILAKESYAELIMKLLKVSAGLSIPTDSQKHLDAVPKCQAFTHQMVQFLSTLEQNGKITLAVLEQEMSKLLDDIIVFNPPDMDSQTRHMALSSLFMEVLMMMNNATIPTAEFLRGSIRTWIGQKMHGLVVLPLLTAACQSLASVRHMAETTEACITAYFKESPLNQNSGWGPILVSLQVPELTMEEFLQECLTLGSYLTLYVYLLQCLNSEQTLRNEMKVLLILSKWLEQVYPSSVEEEAKLFLWWHQVLQLSLIQTEQNDSVLTESVIRILLLVQSRQNLVAEERLSSGILGAIGFGRKSPLSNR

SEQ ID NO: 206732 - protein, 507 aa, Artificial Sequence
  derived and/or modified sequence
TTPVERGSPKSCFLFLGSVLCEVNWVSVLSDAWNSSPHPETRSMIVCLLFMMILLAKEVQLVDQTDSPLLSLLGQTSSLSWHLVDIVSYQSVLSYFSSHYPPSIILAKESYAELIMKLLKVSAGLSIPTDSQKHLDAVPKCQAFTHQMVQFLSTLEQNGKITLAVLEQEMSKLLDDIIVFNPPDMDSQTRHMALSSLFMEVLMMMNNATIPTAEFLRGSIRTWIGQKMHGLVVLPLLTAACQSLASVRHMAETTEACITAYFKESPLNQNSGWGPILVSLQVPELTMEEFLQECLTLGSYLTLYVYLLQCLNSEQTLRNEMKVLLILSKWLEQVYPSSVEEEAKLFLWWHQVLQLSLIQTEQNDSVLTESVIRILLLVQSRQNLVAEERLSSGILGAIGFGRKSPLSNRFRVVARSMAAFLSVQVPMEDQIRLRPGSELHLTPKAQQALNALESMASSKQYVEYQDQILQATQFIRHPGHCLQDGKSFLALLVNCLYPEVHYLDHIR

SEQ ID NO: 206733 - DNA, 7740 bp, Artificial Sequence
  derived and/or modified sequence
atggccgaggccgtgaagccccagagaagagccaaggccaaggccagcagaaccaagaccaaggagaagaagaagtacgagaccccccagagagaggagagcagcgaggtgagcctgcccaagaccagcagagagcaggagatccccagcctggcctgcgagttcaagggcgaccacctgaaggtggtgaccgacagccagctgcaggacgacgccagcggccagaacgagagcgagatgttcgacgtgcccctgaccagcctgaccatcagcaacgaggagagcctgacctgcaacaccgagccccccaaggagggcggcgaggccagaccctgcgtgggcgacagcgccgtgacccccaaggtgcaccccggcgacaacgtgggcaccaaggtggagacccccaagaacttcaccgaggtggaggagaacatgagcgtgcagggcggcctgagcgagagcgccccccagagcaacttcagctacacccagcccgccatggagaacatccaggtgagagagacccagaacagcaaggaggacaagcagggcctggtgtgcagcagcgaggtgccccagaacgtgggcctgcagagcagctgccccgccaagcacggcttccagacccccagagtgaagaagctgtacccccagctgcccgccgagatcgccggcgaggcccccgccctggtggccgtgaagcccctgctgagaagcgagagactgtaccccgagctgcccagccagctggagctggtgcccttcaccaaggagcagctgaagatcctggagcccggcagctggctggagaacgtggagagctacctggaggagttcgacagcatggcccaccaggacagacacgagttctacgagctgctgctgaactacagcagatgcagaaagcagctgctgctggccgaggccgagctgctgaccctgaccagcgactgccagaacgccaagagcagactgtggcagttcaaggaggagcagatgagcgtgcagggcatctgcgccgaccaggtgaaggtgttcagctaccacagataccagagagtggagatgaacgagaacgccctggtggagctgaagaagctgttcgacgccaagagcgagcacctgcaccagaccctggccctgcacagctacaccagcgtgctgagcagactgcaggtggagagctacatctacgccctgctgagcagcagcgccgtgctgagaagcagcgccatccaccagcagggcagagccagcaagcagaccgagagcatccccagcgacctgtgccagctgaaggagtgcatcagcgtgctgttcatgttcaccagaagagtgaacgaggacacccagttccacgacgacatcctgctgtggctgcagaagctggtgagcgtgctgcagagagtgggctgccccggcgaccacctgttcctgctgaaccacatcctgagatgccccgccggcgtgagcaagtgggccgtgcccttcatccagatcaaggtgctgcacaaccccagcggcgtgttccacttcatgcagagcctggccctgctgatgagccccgtgaagaacagagccgagttcatgtgccacatgaagcccagcgagagaaagcccagcagcagcggccccggcagcggcacctggaccctggtggacgagggcggcgaggaggacgaggaccccgagaccagctggatcctgctgaacgaggacgacctggtgaccatcctggcccagttccccttccacgagctgttccagcacctgctgggcttcaaggccaagggcgactacctgcccgagaccaccagaccccaggagatgatgaagatcttcgccttcgccaacagcctggtggagctgctggccgtgggcctggagaccttcaacagagccagatacagacagttcgtgaagagaatcggctacatgatcagaatgaccctgggctacgtgagcgaccactgggcccagtacgtgagccacaaccagggcagcggcctggcccagcagccctacagcatggagaagctgcaggtggagttcgacgagctgttcctgagagccgtgctgcacgtgctgaaggccaagagactgggcatctggctgttcatgagcgagatgcccttcggcaccctgagcgtgcagatgctgtggaagctgttctacctgatgcaccaggtggagagcgagaacctgcagcagctgagcagcagcctgcagcccgcccagtgcaagcagcagctgcaggaccccgagcacttcaccaacttcgagaagtgcctgagcagcatgaacagcagcgaggagatctgcctgctgaccaccttcgcccagatggcccaggccagaagaaccaacgtggacgaggacttcatcaagatcatcgtgctggagatctacgaggtgagctacgtgaccctgagcaccagagagaccttcagcaaggtgggcagagagctgctgggcaccatcaccgccgtgcaccccgagatcatcagcgtgctgctggacagagtgcaggagaccatcgaccaggtgggcatggtgagcctgtacctgttcaaggagctgcccctgtacctgtggcagcccagcgccagcgagatcgccgtgatcagagactggctgctgaactacaacctgaccgtggtgaagaacaagctggcctgcgtgatcctggagggcctgaactggggcttcgccaagcaggccaccctgcacctggaccaggccgtgcacgccgaggtggccctgatggtgctggaggcctaccagaagtacctggcccagaagccctacgccggcatcctgagcgagagcatgaagcaggtgagctacctggccagcatcgtgagatacggcgagacccccgagaccagcttcaaccagtgggcctggaacctgatcctgagactgaagctgcacaagaacgactacggcatccagcccaactgccccgccgtgcccttcagcgtgaccgtgcccgacatgaccgagagccccaccttccaccccctgctgaaggccgtgaaggccggcatgcccatcggctgctacctggccctgagcatgaccgccgtgggccacagcatcgagaagttctgcgccgagggcatccccctgctgggcatcctggtgcagagcagacacctgagaaccgtggtgcacgtgctggacaagatcctgcccctgttctacccctgccagtactacctgctgaagaacgagcagttcctgagccacctgctgctgttcctgcacctggacagcggcgtgccccagggcgtgacccagcaggtgacccacaaggtggcccagcacctgaccggcgccagccacggcgacaacgtgaagctgctgaacagcatgatccaggcccacatcagcgtgagcacccagcccaacgaggtgggccccgtggccgtgctggagttctgggtgcaggccctgatcagccagcacctgtggtacagagagcagcccatcctgttcctgatggaccacctgtgcaaggccgccttccagctgatgcaggaggactgcatccagaagctgctgtaccagcagcacaagaacgccctgggctaccactgcgacagaagcctgctgagcagcctggtgagctggatcgtggccggcaacatcacccccagcttcgtggagggcctggccacccccacccaggtgtggttcgcctggaccgtgctgaacatggagagcatcttcgaggaggacagccagctgagaagagtgatcgagggcgagctggtgatcaacagcgccttcacccccgaccaggccctgaagaaggcccagacccagctgaagctgcccatcgtgcccagcctgcagagactgctgatctacagatgggcccaccaggccctggtgacccccagcgaccaccccctgctgcccctgatctggcagaagttcttcctgctgtacctgcacagacccggcccccagtacggcctgcccatcgacggctgcatcggcagaagattcttccagagccccgcccacatcaacctgctgaaggagatgaagagaagactgaccgaggtggccgacttccaccacgccgccagcaaggccctgagagtgcccgccgagggcagcgagggcctgcccgagagccacagcggcacccccggctacctgaccagccccgagctgcacaaggagctggtgagactgttcaacgtgtacatcctgtggctggaggacgagaacttccagaagggcgacacctacatccccagcctgcccaagcactacgacatccacagactggccaaggtgatgcagaaccagcaggacctgtggatggagtacctgaacatggagagaatctaccacgagttccaggagaccgtgggcctgtggacccaggccaagctggagagccacagcaccccctgcagcctgagcgtgcagctggacttcaccgaccccctgctggccaaggagagagtgctgagcaacctgagaaagcacgaggccccccagccccccctggccctgcaccccaccaagccccccgtgcccgtgatcagcagcgccgtgctgctgagccagaaggacgccacccagctggtgtgcaccgacctgaacctgctgcagcagcaggccagaaccgccgccctgagagagagccagcaggtggccctggacggcgagctgctggacaccatgcccaagcagtacgtgaacagagaggagcagaccaccctgcacctggagtgcagaggcagcagcggcaagaagtgccagggcgccgccgtggtgaccgtgcagttcgagggcatgcacaagaacgaggccatcagccagcagctgcacgtgctgagaaaggaggtgaagcagctgcaggccgaggccgccaagccccccagcctgaacatcgtggaggccgccgtgcacgccgagaacctgatcaccgccctggtgaacgcctacaagctgcagcccacccccggcatccagaaggtgggcatcagcctgttcttcaccatcgtggactacgtgagcgacgagacccagagacacccccccaccagacagttcttcaccagctgcatcgagatcctgggccaggtgttcatcagcggcatcaagagcgagtgcagaaaggtgctggagaccatcctgaagaacagcagactgtgcagcctgctgagccccttcttcacccccaacgccgcccccgccgagttcatccagctgtacgagcaggtggtgaagttcctgagcgaggacaacagcgacatgatcttcatgctgctgaccaagttcgacctgaagcagtggctgagcgccaccaagccccccctgagcgacagaaccagactgctggagagcatccacctggccctgaccgcctggggcctggagcccgacgaggacatcctgatgcccttcaacctgttctgcaagcactggacctacctgctgctgtaccagttccccgaccagtacagcgacatcctgagactgctgatgcagagcagcgccgagcagctgctgagccccgagtgctggaaggccaccctgagagccctgggctgctgcgcccccagctgccagcagggcgccgccagcaccgagggcgccgtgctgcccagcagcagcgacgccctgctgagcgacaagcaggtgatggagaccatccagtggctgagcgacttcttctacaagctgagactgagcaagatggacttcaagagcttcggcctgttcagcaagtggagcccctacatggccgacgtgaagaccttcctgggctacctggtgaagagactgatcgacctggagatgacctgcctggcccaggaccccaccgccagcagaaagaccgtgctgaagagcctgcacagcgtgatcatccagctgttcaagccctggatcctggtgctggaggacaacgagagcagccagcagagacactacccctggctggagagcgacaccgtggtggccagcagcatcgtgcagctgttcaccgactgcatcgacagcctgcacgagagcttcaaggacaagctgctgcccggcgacgccggcgccctgtggctgcacctgatgcactactgcgaggcctgcaccgcccccaagatgcccgagttcatcctgtacgccttccacagcacctacagaaagctgccctggaaggacctgcaccccgaccagatgctgatggaggccttcttcaaggtggagagaggcagccccaagagctgcttcctgttcctgggcagcgtgctgtgcgaggtgaactgggtgagcgtgctgagcgacgcctggaacagcagcccccaccccgagaccagaagcatgatcgtgtgcctgctgttcatgatgatcctgctggccaaggaggtgcagctggtggaccagaccgacagccccctgctgagcctgctgggccagaccagcagcctgagctggcacctggtggacatcgtgagctaccagagcgtgctgagctacttcagcagccactacccccccagcatcatcctggccaaggagagctacgccgagctgatcatgaagctgctgaaggtgagcgccggcctgagcatccccaccgacagccagaagcacctggacgccgtgcccaagtgccaggccttcacccaccagatggtgcagttcctgagcaccctggagcagaacggcaagatcaccctggccgtgctggagcaggagatgagcaagctgctggacgacatcatcgtgttcaacccccccgacatggacagccagaccagacacatggccctgagcagcctgttcatggaggtgctgatgatgatgaacaacgccaccatccccaccgccgagttcctgagaggcagcatcagaacctggatcggccagaagatgcacggcctggtggtgctgcccctgctgaccgccgcctgccagagcctggccagcgtgagacacatggccgagaccaccgaggcctgcatcaccgcctacttcaaggagagccccctgaaccagaacagcggctggggccccatcctggtgagcctgcaggtgcccgagctgaccatggaggagttcctgcaggagtgcctgaccctgggcagctacctgaccctgtacgtgtacctgctgcagtgcctgaacagcgagcagaccctgagaaacgagatgaaggtgctgctgatcctgagcaagtggctggagcaggtgtaccccagcagcgtggaggaggaggccaagctgttcctgtggtggcaccaggtgctgcagctgagcctgatccagaccgagcagaacgacagcgtgctgaccgagagcgtgatcagaatcctgctgctggtgcagagcagacagaacctggtggccgaggagagactgagcagcggcatcctgggcgccatcggcttcggcagaaagagccccctgagcaacagattcagagtggtggccagaagcatggccgccttcctgagcgtgcaggtgcccatggaggaccagatcagactgagacccggcagcgagctgcacctgacccccaaggcccagcaggccctgaacgccctggagagcatggccagcagcaagcagtacgtggagtaccaggaccagatcctgcaggccacccagttcatcagacaccccggccactgcctgcaggacggcaagagcttcctggccctgctggtgaactgcctgtaccccgaggtgcactacctggaccacatcagatag

SEQ ID NO: 206734 - DNA, 4071 bp, Artificial Sequence
  derived and/or modified sequence
atgatccaggcccacatcagcgtgagcacccagcccaacgaggtgggccccgtggccgtgctggagttctgggtgcaggccctgatcagccagcacctgtggtacagagagcagcccatcctgttcctgatggaccacctgtgcaaggccgccttccagctgatgcaggaggactgcatccagaagctgctgtaccagcagcacaagaacgccctgggctaccactgcgacagaagcctgctgagcagcctggtgagctggatcgtggccggcaacatcacccccagcttcgtggagggcctggccacccccacccaggtgtggttcgcctggaccgtgctgaacatggagagcatcttcgaggaggacagccagctgagaagagtgatcgagggcgagctggtgatcaacagcgccttcacccccgaccaggccctgaagaaggcccagacccagctgaagctgcccatcgtgcccagcctgcagagactgctgatctacagatgggcccaccaggccctggtgacccccagcgaccaccccctgctgcccctgatctggcagaagttcttcctgctgtacctgcacagacccggcccccagtacggcctgcccatcgacggctgcatcggcagaagattcttccagagccccgcccacatcaacctgctgaaggagatgaagagaagactgaccgaggtggccgacttccaccacgccgccagcaaggccctgagagtgcccgccgagggcagcgagggcctgcccgagagccacagcggcacccccggctacctgaccagccccgagctgcacaaggagctggtgagactgttcaacgtgtacatcctgtggctggaggacgagaacttccagaagggcgacacctacatccccagcctgcccaagcactacgacatccacagactggccaaggtgatgcagaaccagcaggacctgtggatggagtacctgaacatggagagaatctaccacgagttccaggagaccgtgggcctgtggacccaggccaagctggagagccacagcaccccctgcagcctgagcgtgcagctggacttcaccgaccccctgctggccaaggagagagtgctgagcaacctgagaaagcacgaggccccccagccccccctggccctgcaccccaccaagccccccgtgcccgtgatcagcagcgccgtgctgctgagccagaaggacgccacccagctggtgtgcaccgacctgaacctgctgcagcagcaggccagaaccgccgccctgagagagagccagcaggtggccctggacggcgagctgctggacaccatgcccaagcagtacgtgaacagagaggagcagaccaccctgcacctggagtgcagaggcagcagcggcaagaagtgccagggcgccgccgtggtgaccgtgcagttcgagggcatgcacaagaacgaggccatcagccagcagctgcacgtgctgagaaaggaggtgaagcagctgcaggccgaggccgccaagccccccagcctgaacatcgtggaggccgccgtgcacgccgagaacctgatcaccgccctggtgaacgcctacaagctgcagcccacccccggcatccagaaggtgggcatcagcctgttcttcaccatcgtggactacgtgagcgacgagacccagagacacccccccaccagacagttcttcaccagctgcatcgagatcctgggccaggtgttcatcagcggcatcaagagcgagtgcagaaaggtgctggagaccatcctgaagaacagcagactgtgcagcctgctgagccccttcttcacccccaacgccgcccccgccgagttcatccagctgtacgagcaggtggtgaagttcctgagcgaggacaacagcgacatgatcttcatgctgctgaccaagttcgacctgaagcagtggctgagcgccaccaagccccccctgagcgacagaaccagactgctggagagcatccacctggccctgaccgcctggggcctggagcccgacgaggacatcctgatgcccttcaacctgttctgcaagcactggacctacctgctgctgtaccagttccccgaccagtacagcgacatcctgagactgctgatgcagagcagcgccgagcagctgctgagccccgagtgctggaaggccaccctgagagccctgggctgctgcgcccccagctgccagcagggcgccgccagcaccgagggcgccgtgctgcccagcagcagcgacgccctgctgagcgacaagcaggtgatggagaccatccagtggctgagcgacttcttctacaagctgagactgagcaagatggacttcaagagcttcggcctgttcagcaagtggagcccctacatggccgacgtgaagaccttcctgggctacctggtgaagagactgatcgacctggagatgacctgcctggcccaggaccccaccgccagcagaaagaccgtgctgaagagcctgcacagcgtgatcatccagctgttcaagccctggatcctggtgctggaggacaacgagagcagccagcagagacactacccctggctggagagcgacaccgtggtggccagcagcatcgtgcagctgttcaccgactgcatcgacagcctgcacgagagcttcaaggacaagctgctgcccggcgacgccggcgccctgtggctgcacctgatgcactactgcgaggcctgcaccgcccccaagatgcccgagttcatcctgtacgccttccacagcacctacagaaagctgccctggaaggacctgcaccccgaccagatgctgatggaggccttcttcaaggtggagagaggcagccccaagagctgcttcctgttcctgggcagcgtgctgtgcgaggtgaactgggtgagcgtgctgagcgacgcctggaacagcagcccccaccccgagaccagaagcatgatcgtgtgcctgctgttcatgatgatcctgctggccaaggaggtgcagctggtggaccagaccgacagccccctgctgagcctgctgggccagaccagcagcctgagctggcacctggtggacatcgtgagctaccagagcgtgctgagctacttcagcagccactacccccccagcatcatcctggccaaggagagctacgccgagctgatcatgaagctgctgaaggtgagcgccggcctgagcatccccaccgacagccagaagcacctggacgccgtgcccaagtgccaggccttcacccaccagatggtgcagttcctgagcaccctggagcagaacggcaagatcaccctggccgtgctggagcaggagatgagcaagctgctggacgacatcatcgtgttcaacccccccgacatggacagccagaccagacacatggccctgagcagcctgttcatggaggtgctgatgatgatgaacaacgccaccatccccaccgccgagttcctgagaggcagcatcagaacctggatcggccagaagatgcacggcctggtggtgctgcccctgctgaccgccgcctgccagagcctggccagcgtgagacacatggccgagaccaccgaggcctgcatcaccgcctacttcaaggagagccccctgaaccagaacagcggctggggccccatcctggtgagcctgcaggtgcccgagctgaccatggaggagttcctgcaggagtgcctgaccctgggcagctacctgaccctgtacgtgtacctgctgcagtgcctgaacagcgagcagaccctgagaaacgagatgaaggtgctgctgatcctgagcaagtggctggagcaggtgtaccccagcagcgtggaggaggaggccaagctgttcctgtggtggcaccaggtgctgcagctgagcctgatccagaccgagcagaacgacagcgtgctgaccgagagcgtgatcagaatcctgctgctggtgcagagcagacagaacctggtggccgaggagagactgagcagcggcatcctgggcgccatcggcttcggcagaaagagccccctgagcaacagatag

SEQ ID NO: 206735 - DNA, 1524 bp, Artificial Sequence
  derived and/or modified sequence
accacccccgtggagagaggcagccccaagagctgcttcctgttcctgggcagcgtgctgtgcgaggtgaactgggtgagcgtgctgagcgacgcctggaacagcagcccccaccccgagaccagaagcatgatcgtgtgcctgctgttcatgatgatcctgctggccaaggaggtgcagctggtggaccagaccgacagccccctgctgagcctgctgggccagaccagcagcctgagctggcacctggtggacatcgtgagctaccagagcgtgctgagctacttcagcagccactacccccccagcatcatcctggccaaggagagctacgccgagctgatcatgaagctgctgaaggtgagcgccggcctgagcatccccaccgacagccagaagcacctggacgccgtgcccaagtgccaggccttcacccaccagatggtgcagttcctgagcaccctggagcagaacggcaagatcaccctggccgtgctggagcaggagatgagcaagctgctggacgacatcatcgtgttcaacccccccgacatggacagccagaccagacacatggccctgagcagcctgttcatggaggtgctgatgatgatgaacaacgccaccatccccaccgccgagttcctgagaggcagcatcagaacctggatcggccagaagatgcacggcctggtggtgctgcccctgctgaccgccgcctgccagagcctggccagcgtgagacacatggccgagaccaccgaggcctgcatcaccgcctacttcaaggagagccccctgaaccagaacagcggctggggccccatcctggtgagcctgcaggtgcccgagctgaccatggaggagttcctgcaggagtgcctgaccctgggcagctacctgaccctgtacgtgtacctgctgcagtgcctgaacagcgagcagaccctgagaaacgagatgaaggtgctgctgatcctgagcaagtggctggagcaggtgtaccccagcagcgtggaggaggaggccaagctgttcctgtggtggcaccaggtgctgcagctgagcctgatccagaccgagcagaacgacagcgtgctgaccgagagcgtgatcagaatcctgctgctggtgcagagcagacagaacctggtggccgaggagagactgagcagcggcatcctgggcgccatcggcttcggcagaaagagccccctgagcaacagattcagagtggtggccagaagcatggccgccttcctgagcgtgcaggtgcccatggaggaccagatcagactgagacccggcagcgagctgcacctgacccccaaggcccagcaggccctgaacgccctggagagcatggccagcagcaagcagtacgtggagtaccaggaccagatcctgcaggccacccagttcatcagacaccccggccactgcctgcaggacggcaagagcttcctggccctgctggtgaactgcctgtaccccgaggtgcactacctggaccacatcagatag

SEQ ID NO: 206736 - DNA, 7740 bp, Artificial Sequence
  derived and/or modified sequence
atggctgaagccgttaaacctcaacgcagagcaaaggccaaagcgagccggactaagaccaaggagaaaaagaagtacgagacaccccagcgagaggaatcctccgaggtttccctgccgaaaaccagtcgtgaacaggaaattccctccttagcctgcgagtttaaaggcgaccacttgaaagtcgtcacagattcccaactgcaggacgacgcttctggccagaacgagtctgagatgtttgacgtgccactgacttcccttaccatctccaacgaagagtcactgacatgcaacaccgagccgcctaaggagggtggagaggccagaccctgcgttggcgattccgcagttacgcctaaagtgcatcctggcgacaatgtggggacaaaggtggagactcctaagaattttaccgaagtcgaagagaatatgtccgtgcagggtggactgtctgaaagtgccccccagtccaacttttcctatacacagcccgccatggagaacatacaggtccgggagacccagaactcaaaggaagacaaacaaggactggtgtgctcctctgaggtcccccaaaatgtaggccttcaatctagttgccctgcaaagcacgggtttcagaccccaagggtcaagaagctgtacccacagctgcccgccgagatagccggggaagcaccagcactggtcgctgtcaaacctctgctgcgcagcgaaagactctaccctgaacttccatcccagctggagctggttccatttactaaggaacagctgaagatcctggaacctggatcctggttggaaaacgtggaaagctaccttgaagagttcgattcgatggcgcaccaagacagacatgagttttacgaattattgttgaactattcacgatgtcgaaaacagctactgctcgccgaggccgagcttctaacgctcacttccgattgtcagaacgcgaaaagtcgcctttggcagttcaaagaggaacagatgtccgtgcaggggatctgtgcagatcaagtgaaggtgttcagctatcaccgttatcagcgcgtcgaaatgaacgagaacgccctggtagagttaaagaaattgtttgatgccaaatccgagcatctccaccagactcttgctctccattcttacacatctgtgctgtccagattgcaagtagagagttatatttacgctctgttatctagtagcgcagttctgcgctcttccgccattcatcagcagggacgagcttctaaacagacagagtctattccaagcgacctttgtcagttgaaggagtgtatatctgttctgtttatgttcacccggcgcgtgaacgaggatactcaattccatgatgatattttgctgtggctccagaaactcgtttccgttttacagcgggtaggttgtcctggcgatcacctcttccttttgaatcacattctgcggtgccccgcaggtgtgtcaaagtgggcggtgccattcatccagatcaaggtcctgcataacccttccggagtgttccacttcatgcagagcttggcattattgatgtcgcccgtgaagaatcgggcagagttcatgtgtcatatgaagccgtcagagcgaaaaccctcctcatctggtcctgggagcggcacgtggactctggtggacgaaggcggagaagaagacgaggacccagagactagctggatcctcttaaacgaggatgacctggtgactatattggctcagttccctttccatgagttgttccagcacttattggggtttaaggctaaaggcgattatcttcccgaaactacgaggccgcaagaaatgatgaagattttcgcatttgccaattcattggtcgaactcctggcagtcggactggaaacctttaacagagcaaggtaccgccagttcgtgaaacggatagggtatatgatcagaatgacccttggatacgtttcagaccactgggcccaatatgttagccacaatcagggatcgggcttggctcagcaaccctactcaatggagaagctgcaagtggagttcgatgagctgttcctccgcgcggtgttgcacgtgctgaaggctaaacgattaggtatttggttgttcatgagtgaaatgccgttcgggactctttccgttcagatgctctggaaactcttctatttgatgcatcaggtagagtcagagaatctccagcagctgtcctcttcccttcaacctgcccagtgtaagcagcagctgcaggaccctgagcatttcactaatttcgagaaatgtctatcttccatgaattcttctgaagagatctgtctgttaactactttcgcccagatggctcaggccaggcgtacgaacgtggacgaagactttataaagatcatagtattggagatctatgaggttagctatgtgacgctttccactcgggaaactttcagtaaggtcggacgcgagctgctgggaacaatcacagccgtgcatccagaaatcatttccgtattactcgaccgagtacaggaaaccatcgatcaggtcggtatggtgagtctctatttattcaaggagcttcctctctacctctggcagccctctgcttctgagattgctgtgatccgggactggctcctgaattataacctgaccgtggtgaaaaacaaactggcatgtgttattctggagggcctgaattggggattcgctaagcaggccacactacaccttgatcaagccgtgcatgcggaggttgcactgatggtgctcgaagcttaccagaaatatttagcacagaagccctatgccggcatcctgtctgagtccatgaagcaggtgagctatcttgcctctattgtccggtacggtgaaactccggagacgtctttcaaccagtgggcctggaacctaatactgcgtctgaagttgcataagaacgactatggaatccagcccaattgtccagccgttccctttagtgttacagtgcccgacatgaccgaatctccgacattccaccccttactgaaggcagtgaaggctggaatgcccattgggtgctatctggctctgtccatgaccgccgtcggacactcaattgaaaaattttgcgccgagggtatccctctgctcgggattctcgtccaatcgcggcatctgagaacagtggtccacgtactagataagattctgcccctgttctatccctgccaatactacctccttaaaaatgagcaatttctgtcccacctgctcctgtttcttcacctcgactctggtgtgccacagggggtcacacaacaagtgacacataaggtcgcccagcacttaacaggtgcttcacacggggataacgttaagctgctcaattctatgatacaggcccatatctccgttagtacgcaaccaaacgaggtgggccccgtggcggtcctggagttttgggtgcaagcgctcatatcacagcatctgtggtatagggaacaacccattctgttcctgatggatcatctgtgtaaagcagcctttcagttgatgcaagaggattgcatccaaaagttactatatcagcaacacaaaaacgcactgggctatcattgcgataggagccttctctccagcttggttagttggattgtggcaggaaatataacacccagcttcgtggagggccttgccaccccgacccaggtgtggtttgcgtggaccgtgttaaatatggagtctatcttcgaagaagattcacagctcaggagagtcatagaaggggaactggtaatcaactctgccttcactccggaccaggccctgaagaaggctcagacacagctcaagctgccaattgtgccgagtctgcagcgccttctgatctaccgatgggcgcaccaggccctggtaactccgtctgaccatccacttctgcccttaatctggcagaaattctttttgctgtacctgcaccggcctggaccccagtatggtttacccattgatggatgcataggaagacggtttttccagagccccgctcatattaacctgctgaaagagatgaaaagaagattgacggaggtagcggacttccatcacgctgctagcaaagcgctccgcgttccggccgaggggagcgaggggctgccagaaagtcacagcggcaccccagggtacttaaccagccctgagctccacaaagaactggttaggctgttcaatgtatacattttgtggctggaggatgaaaactttcagaagggcgacacttatatcccttcactccctaagcactatgatatacaccggctcgccaaggttatgcagaaccagcaagacctttggatggaataccttaacatggagcgaatttaccatgaatttcaggaaaccgtcggcctgtggacacaggcgaaattagaaagccactccaccccgtgtagcctgtccgtgcagctcgacttcaccgatcccctgctggccaaagagagagtcctgtcaaacttgaggaaacacgaggcaccccagccacctctcgccttacacccgaccaaacctcctgttcccgtgataagttctgctgtgctgctttcccaaaaagacgccacccagttagtgtgcacagacctcaatctgcttcagcaacaggcaaggacagctgccctgagggaatcccagcaagtggccctggacggcgaactgctggacaccatgcctaagcaatatgtgaatagggaggagcagaccactctgcacctggagtgccgcggctcttccggaaaaaagtgtcagggagctgccgtggttacagtacagttcgaaggaatgcataagaatgaggctatctcccagcagctacatgttctccgcaaggaagtcaagcaattgcaggccgaggccgccaaacctccctcactgaacattgtggaggcggccgtgcacgcagagaacttgatcactgctctggtgaacgcgtacaagctgcagccaacccccgggatccagaaggtggggatttccctgtttttcactattgttgattacgtaagcgatgagactcaacgacaccctccaacccggcagttcttcacatcctgcattgaaatcttggggcaagtgttcataagcggtatcaagtccgagtgtcgcaaggtcctggaaactatcttaaagaatagccgattgtgctcattgctaagtcctttcttcacgcctaacgccgctccagctgaatttatacagttatacgagcaagtcgttaaattcctttctgaagacaattctgatatgatctttatgctgctcacaaagttcgatttgaaacaatggctgtccgcgaccaaaccgcccctgagtgaccgtaccagactgttggagtctatccaccttgcactgaccgcctggggtctggagcccgacgaagatattctgatgccatttaatctgttttgtaagcactggacatacttactcctgtaccagtttccggatcagtatagtgacatactccgtttgctgatgcaaagctccgctgagcagttgctttcccctgagtgttggaaagccaccctgcgcgccctggggtgctgtgctccctcgtgtcagcaaggcgctgcaagcaccgaaggcgcagtgctccccagcagttctgacgcacttctgtccgacaaacaagtgatggaaactatccagtggctgtctgacttcttttacaagctccgtctttctaagatggattttaagtcttttggcctgttttccaagtggtccccatacatggcagacgtgaaaacattcctgggctatcttgtaaagagacttattgacctcgagatgacatgtctggcacaggacccaacagcttcaaggaagaccgttctgaaaagcctgcacagtgtgattattcaactgttcaagccatggattttagtgttggaggataacgaaagttctcaacagcgtcactatccttggctggaatcagataccgtcgtagcgtcctcaatagtacaattgttcactgactgcatagactctttgcacgagtccttcaaggataagctcctccctggcgacgccggtgcactgtggttgcatctcatgcactactgtgaagcctgtaccgctccaaagatgccggagttcattctgtatgcctttcactcaacctacaggaagctcccgtggaaggacctacatcctgatcagatgctgatggaggctttcttcaaggtggaaagaggttcccccaaatcatgtttcctttttctgggaagcgtcctgtgtgaggtcaattgggtgtccgtgctgtcagacgcttggaactcaagtccccatcctgaaacgaggtccatgatcgtttgtctcttgtttatgatgatcttactggccaaggaggtgcaactcgtggaccagacggacagcccactcctgtctttactcggccagaccagcagcctgagctggcacttagtagatattgtgtcatatcagtccgttctaagctatttctccagtcattacccccctagtattatcctcgctaaggagtcttatgccgagctcatcatgaagctgctcaaggtgagcgccggactgtctattcctacagattcgcaaaagcatctcgacgctgtgcctaagtgtcaagcgtttacccaccagatggtacaattcctgtctactctggagcaaaacggcaagattaccctagctgtgctcgaacaagaaatgtccaaactgctggatgacattattgtattcaatccacccgacatggactcgcaaactcgccacatggccctttccagcttattcatggaagtgctcatgatgatgaataatgctactattccaactgcagagttcctgcggggctctatcaggacctggatcggccagaagatgcacggactggtcgtcctacccctcctgactgcagcttgccagtcgctggctagtgtgcgtcacatggcggagactaccgaagcgtgtatcaccgcctactttaaagagtcccccctgaatcagaactctgggtggggtccgatccttgtgtcacttcaagtacccgagttgactatggaagaattcttgcaggagtgcctcaccttgggtagctacctcacgctatatgtttatctgcttcaatgcctaaacagtgaacagacactgcgaaatgagatgaaagtgctgttaattctgtccaagtggcttgagcaggtctaccccagctcagtagaggaggaggcgaaacttttcctgtggtggcatcaggttctgcagttgtctctgattcaaacagagcagaacgacagcgttctgacagagtcggtgattagaattctcttgctggtgcagagtagacagaaccttgtggccgaggaaagattgtccagcggcatacttggcgcaataggctttggcaggaagtcgcctcttagcaatcgatttcgggtggtggcacgctccatggctgcgttcctgagtgttcaggtgcccatggaggatcagattaggctgagacccggctccgaactgcacttaacgcctaaggctcagcaagctttgaatgcgttggagtctatggcgtcaagcaagcagtatgtggagtaccaggatcaaatcctgcaggccacacagttcatccggcacccgggtcattgtctgcaggacgggaagagtttcctcgcgctgctagtaaactgtctttatcccgaggtacactatttggaccacataaggtag

SEQ ID NO: 206737 - DNA, 4071 bp, Artificial Sequence
  derived and/or modified sequence
atgatacaggcccacatctctgtgtccacgcagcctaatgaagtcggaccagtcgctgtgctagaattctgggtgcaggccctaatcagtcagcacctctggtaccgcgagcagcctatcttgtttttaatggaccatctgtgtaaagcagctttccagctgatgcaggaggactgtatccagaagctcttgtatcagcagcacaaaaacgctttaggctatcactgcgatcggtccctgctgagctcactggtgagctggattgtggctggtaacatcaccccatctttcgtcgagggactggctactcccacgcaggtgtggtttgcctggactgtgctgaatatggagagcatctttgaggaggactcccaattgcgaagagttatagaaggggagttggtgatcaattccgccttcaccccagaccaggcccttaaaaaagcacagactcagctcaaactgccaattgtgccctctctgcagcgactgctcatttaccggtgggctcatcaggcgctagtgacccccagcgaccacccacttctgcccttgatctggcagaagttctttctgctgtacttgcacaggcccgggccccagtatggattgcccattgacggctgcatcggtcggagattttttcagagtcctgcacacattaatctgttgaaggaaatgaaacggcgattgactgaggtagccgatttccaccatgcagccagcaaagctctgcgagtgcctgccgaggggtcagagggtctgcccgagtcacactctggtacaccaggttacctgacatctcccgagctccataaagaactagtaaggctattcaatgtgtacatcctgtggctagaggatgaaaattttcagaagggcgatacatatatccccagccttccaaagcactatgatattcaccgcctggccaaagtgatgcaaaaccagcaggacctctggatggagtatctgaatatggagcggatctaccacgaattccaggagacagttggactctggacccaagccaagctcgaatcacacagcactccatgttccctcagcgttcagcttgattttacagatcctctcctggccaaggagagagtcttaagcaatctgcgaaaacacgaggctccccagccccccctggctttgcaccctaccaagccccctgttcctgttatttcatctgcagtgcttctaagccaaaaagatgcaactcagctcgtctgtaccgatctcaatttgttacagcagcaggcccggaccgcggcccttagagagtcccagcaggtcgccctggatggtgagttgctagacactatgcccaaacagtacgtgaaccgggaggaacagacaaccctgcacctggagtgcaggggttcttccgggaagaagtgccaaggcgcagcagtagtgaccgtgcaattcgagggcatgcacaaaaacgaagccatctctcagcagctgcacgtgctacgtaaggaggtgaagcagttgcaagccgaggccgcgaaacccccttctctcaacatcgtcgaggctgctgttcacgccgaaaacctgattaccgcgttggtgaacgcttacaaactgcagccgactccaggcatccagaaggtcggcatatcactgtttttcactatcgttgattacgttagtgacgaaacgcaaagacatcctccgacacggcagttttttactagttgtattgaaattctcgggcaggtttttatctcggggatcaagtctgagtgtcggaaggttttagagaccatcctgaaaaatagtagactctgcagcttgctcagtcccttttttacaccaaatgccgcgccagccgagtttatccagttatacgagcaagtggtgaagtttcttagcgaagataacagtgacatgatatttatgttgctgaccaagtttgatctgaagcaatggctcagcgccaccaagccacctctctctgacaggacccggctgcttgagtcaatacaccttgccctgactgcctggggacttgagcccgacgaggatattctgatgccattcaacttgttttgtaagcattggacatatctgctactctatcagttccctgaccagtatagcgacattttaaggctcttaatgcagagttccgctgaacagcttctgagcccagagtgttggaaggctacactgcgggctctggggtgctgtgccccaagctgtcagcagggggccgcctctaccgagggagccgtcctgcctagctcttctgacgctttgttgagcgacaagcaagtgatggaaacgatacaatggctgtctgatttcttctacaagctgcgtctgtccaagatggacttcaagtccttcggactgttttccaagtggagcccatatatggcagacgtgaaaacgttcctgggatatctcgtcaaacgcctcatcgacctggaaatgacctgtctggcacaagatcctactgccagccggaaaactgtccttaagagcctccatagcgtgatcatccagctcttcaaaccctggattttggtgctcgaagataacgagtcctctcagcagagacattatccctggcttgagagcgacacagtcgttgcctctagcattgtccagctattcacagattgcatcgattctttacacgaaagcttcaaagacaaattgctgccaggggatgccggagctctgtggctgcacctgatgcactactgcgaagcctgtaccgcccccaagatgcccgagtttattctatatgcttttcatagtacttacagaaaactgccttggaaggatctgcaccctgaccagatgcttatggaggcattctttaaggtggaacgggggtcacccaagtcatgtttcctctttttgggctcagtcctgtgtgaggttaactgggtgagcgtgctgtccgatgcttggaattcaagtccgcacccagaaacacggtccatgatagtatgtctgctcttcatgatgatcctactagcgaaagaagttcagctggtcgaccaaaccgattcccctcttctgagtctgttaggacagacttcctccctctcctggcacctggtggacatagtaagttatcagtccgttctttcttatttctcaagccactatccaccaagcataatcctggctaaggagtcatatgccgagttaattatgaaactcctaaaagttagcgccggcctgtctatcccaacagacagtcagaagcatttagatgcggtgcctaaatgccaggcatttacccatcagatggtgcagttcctgtctaccctggaacagaatgggaagattacgcttgccgtgttggaacaagaaatgtccaaactccttgacgacataatcgtcttcaacccgcccgacatggactctcagacgagacatatggccctcagcagcttgtttatggaagttctgatgatgatgaacaacgctaccatcccaaccgcagagttcctgcgtggtagcatacggacctggatcgggcagaagatgcacggactcgtagtgctacctctgctgacagccgcttgtcagtctctcgcatctgtaaggcacatggccgagacgaccgaagcgtgcataacagcgtacttcaaagagagtccgctgaaccaaaattctggttggggacccatacttgtgagcctccaagtcccagagttgactatggaagagttcctccaggagtgtctgacgttgggaagctatcttaccctgtacgtgtatctcctccagtgtctgaacagcgagcagaccctgcgtaatgagatgaaagtgctgctgattttgtcaaaatggcttgaacaggtttatccttcaagcgtggaagaagaagccaagcttttcctgtggtggcaccaggttctgcagctttccctcatccaaaccgagcagaatgacagcgtgttaaccgagtcggtcatcaggattttgctgctggttcagagcagacagaatctggtagctgaagagcggctgtctagcggaatcctaggggcaattggattcggccggaagtccccactgtcaaatagatag

SEQ ID NO: 206738 - DNA, 1524 bp, Artificial Sequence
  derived and/or modified sequence
acaactcccgtggagagaggcagccctaaatcatgtttcctcttcctcggctccgtgctgtgcgaggtcaactgggtcagcgtccttagcgatgcctggaactcatctccccacccggagacaagaagcatgatagtttgcctactgttcatgatgatattactcgcaaaggaggtacaactggttgatcagacagactcccccctgctgtccctgctcggacagacctctagtctgagttggcacctcgtcgacattgtgtcttaccagtccgtcctgtcttatttttcaagtcattaccccccatcgattatcttggcgaaagaatcttacgccgagctgattatgaaactactgaaggtgtctgcggggctctcaattccaactgactcacagaaacatctggacgcagtgccaaaatgtcaggccttcactcaccagatggtgcagtttctgagcactttagagcagaatggcaagatcacactggctgtgttggagcaggagatgagcaagctcctcgatgatatcattgttttcaaccctccggatatggactcacagacgcgccacatggctctgtcttcattatttatggaggtacttatgatgatgaacaacgccacaattccaactgctgaattcttgaggggcagtatccgaacctggatcggacaaaaaatgcacggactcgtggtcctccccctccttacagctgcttgtcaatccctagcctcagtccgtcatatggcagagacgacagaggcttgtataacagcgtattttaaggagagtccgttaaatcagaatagcggttggggtccgatcctcgtctccctgcaagtgcctgaactcaccatggaagagttcctacaagaatgcctgacactcgggtcctacctcacactatatgtgtacttgctgcagtgtctgaactccgagcaaacactgaggaacgagatgaaggtattgctaattctgtccaaatggttggaacaagtgtatcctagctccgtggaggaggaggcaaagttatttctttggtggcatcaggttctgcaattgtctctgattcagaccgaacaaaacgacagcgttcttaccgagtcagtgatacgcatactgctgctggtgcagtcccgacaaaacctcgtagccgaagagcgattgtcctctggcattctgggcgcgataggctttggacgcaagtcgcccctgagtaaccggttccgcgttgtcgctcggtccatggcagcatttctatccgttcaggtacctatggaggatcaaataaggcttcggccaggtagcgagctgcacctgacccctaaagcccagcaggccttaaacgcattagagagcatggccagttcaaagcagtacgtggaatatcaggaccagattttgcaagccacccagtttataagacaccccggccattgtctgcaggatgggaagtcgttcctcgctctgttggtcaattgcctgtatccggaggttcactatctggaccatattcggtag

SEQ ID NO: 206739 - DNA, 12633 bp, Artificial Sequence
  derived and/or modified sequence
caaaaacaaacggtgacggcgccgcggaagggtctatggccgaggcggtgaagccccagcgccgggccaaggccaaggccagccggactaaaacaaaggaaaagaagaagtatgaaactcctcagagggaagagtccagtgaagtctcccttccaaaaacctccagagagcaggaaatcccttctctagcctgtgaattcaaaggagaccatctgaaggtggtaactgattcccagctccaggatgatgccagtggacaaaatgagagtgaaatgtttgatgtaccactcacctccttaactataagcaatgaagagtccctgacgtgtaacacagagcccccaaaggaagggggagaggccagaccctgtgtgggggacagtgcagtcactccaaaggtccaccctggagacaatgttggaactaaagtagaaacccccaagaacttcacagaggtagaggaaaatatgtcggtacaaggtggactttcagaaagtgcaccccaatctaatttttcttatactcagccagcaatggaaaatatacaagtcagagaaactcagaatagtaaagaagacaaacaaggcctggtttgttcttcagaggtgccacagaatgttggcttgcagagttcttgcccagccaaacatggttttcagacacctagagtgaagaaactgtatccccagttgccagctgaaattgctggagaagcaccagctttggtggcagtgaaacccttgcttcgcagtgagcgactctacccagaactcccgtctcaactggaactagtaccatttactaaagaacagctaaaaatcttggagcctggttcatggctggaaaatgttgagtcatatttagaagaatttgacagcatggctcatcaagacaggcatgaattttatgagttgcttttgaactactcacgatgtaggaagcaactgctgctggctgaagctgagctgcttactctgacatctgattgccaaaatgctaaaagtcggctgtggcagtttaaggaggaacaaatgtctgtacagggtatctgtgcagatcaagtgaaagttttcagctatcatcgctaccaaagagtagaaatgaatgaaaatgcactggtggagctaaagaagctattcgatgccaaatctgagcacctccaccagaccctggcccttcattcttatacttctgtgctctcaagattgcaagtggagtcttacatctatgcattgctcagtagttcagctgttctgagatcttcagcaattcaccagcaaggccgagcgtctaagcagacagaaagcattccctctgatctgtgtcaactaaaggaatgcattagtgtcttattcatgttcaccaggagagttaatgaagatactcagtttcatgatgatattcttctctggctgcagaaattggtatccgtgctacaaagagttggctgtcctggagatcacctcttccttctaaaccatattcttcgatgccccgctggtgttagtaaatgggctgttccttttatccagatcaaagtgttgcataacccatcaggggtctttcattttatgcaatcccttgccctgctgatgtctcctgtcaaaaatcgagctgagtttatgtgccacatgaagcccagcgagcggaagccatcctcctcagggcctgggtctgggacttggacgctagtagacgaaggaggagaagaggatgaagaccctgagaccagttggattctccttaatgaagatgatttggttaccattttagcacagttcccctttcatgaactctttcagcatcttcttgggtttaaagcaaaaggtgattatttacctgaaacaacaagacctcaagagatgatgaaaatttttgcctttgccaactcactagtggaacttctggctgtggggttagaaacctttaatagagcacgctataggcagtttgtgaagcgaattggttatatgatcaggatgactcttggttatgtaagtgaccattgggcacagtatgtgagccataaccaaggctcaggattggcccaacagccctactctatggagaaactacaggttgaatttgatgaactgtttttgagggctgtcctacatgtgctgaaggccaaaagacttggcatttggctgtttatgtccgagatgccctttgggactctgtctgtgcaaatgctgtggaagctcttctacctcatgcaccaggtggagagcgagaacctgcagcagctctcctcctccctgcagcccgcccagtgcaagcagcagctccaagacccagaacattttaccaactttgagaagtgtctttcttctatgaatagctcagaagagatttgccttctgactacctttgctcagatggctcaggccagaagaaccaatgtggacgaagacttcataaaaattattgttctggagatatatgaggtatcttatgtcaccttgtctaccagagagactttttcaaaggttggtcgagagcttttagggactatcacagctgttcaccctgagataatttccgtccttctggatagagttcaagagaccattgaccaggttggaatggtttctctatacttgtttaaagaactgcctttgtatctttggcaaccttctgcatctgagatagcggtgattcgggattggttattgaattacaacctgacagtggtgaagaataaactggcctgtgttattcttgaaggactgaattggggatttgctaaacaggctacccttcatctggatcaagcagtccatgctgaagtggctttaatggttcttgaagcttatcagaagtaccttgcacagaagccatatgctgggattctctctgaaagtatgaagcaggtttcatatttggccagtattgttcgatatggagagacacccgagacctcatttaaccaatgggcctggaatttaatcttgaggctaaaactgcacaaaaacgattatggaatacagccgaattgtccagctgttcccttctccgtcactgtgcctgacatgacagagtcacccacgtttcatcctctcttgaaggctgtgaaagcgggcatgcccattggctgttatctagccttatctatgacagctgtgggccacagcattgagaagttctgtgcagaaggcatcccactattgggaattctggtccagtcaagacatttgagaacagtggttcatgtcctggataagattctgcctttattttacccttgccagtattaccttctgaagaatgagcagtttttatcgcatctcctcttgttcctacacttggacagcggtgtccctcagggtgtcacacaacaggtcacccacaaggtggcacagcacctgacaggagccagccatggggacaacgtgaagcttctcaacagcatgatccaggcacacatatctgtaagcactcagcccaatgaagtgggccccgttgctgtgttggagttctgggttcaggctctcataagccagcatctctggtaccgagaacaacctatcctcttcctcatggaccacttgtgtaaagcagcttttcagctgatgcaggaagactgcatacagaaattactctaccaacaacataagaatgccttgggttaccactgtgaccggagtctgctctcatctttggtaagctggattgtggcaggcaacatcactccttcctttgtggagggcttggccacgcccactcaggtctggtttgcctggacagtgctcaacatggaatccatctttgaagaggactcccagctccggagagttattgaaggggaattggtgataaactctgctttcacccctgaccaagctctgaagaaagcccagacccagctgaagctccccatcgtgccatccctccagaggctgctgatttatcgctgggcccaccaggctctggtcacaccttctgatcaccccctcctgccactcatttggcagaagttcttccttctgtatcttcaccgtccgggaccacagtatgggttacccatagatggttgtattggaagaaggttttttcaaagtcctgctcatatcaatttgttgaaagaaatgaagagacgtttgaccgaggtggctgacttccaccatgctgcaagcaaggccctccgtgttccagcagagggcagtgaagggctgccagagagccactctggcacccctggttacctgacttcaccagaactgcacaaggagctggtgaggctcttcaatgtatatatattatggctagaagatgagaattttcaaaaaggagatacctatatcccttctctaccaaagcattatgatattcacaggctagcaaaagtgatgcagaatcagcaggatctgtggatggagtatttgaacatggagcgcatctatcatgagtttcaggagactgttggtctgtggacacaggccaagcttgagtcccattccacaccctgcagtttgtccgtgcagctggacttcactgatcctttgctggctaaagaaagggttttaagtaacttgcggaagcatgaggctccccagcctccccttgctctgcacccgacgaagcctcctgtgccagttatttcctctgctgtgctattgagtcagaaggacgccacccagctggtgtgcacagacctgaatctgttgcaacagcaggccagaaccgcagctcttcgggaatctcagcaggttgctctggatggtgagctgttagacacaatgccaaagcagtatgtgaatcgtgaagaacagaccacactacatttggagtgcagaggcagcagcggtaagaaatgccaaggagccgcagttgtcacggttcagtttgaaggcatgcataagaatgaagccataagccaacagcttcatgttttacggaaggaagtgaagcagttgcaagcagaagctgctaaaccaccatcacttaatattgtggaagctgctgtacatgcagaaaacttgatcacggccttagtgaatgcctacaagttgcagcctacacctgggattcagaaagttggcattagccttttctttactattgtggattacgtcagcgatgagacgcagcgtcatcccccaacaaggcagttctttacttcatgtattgagatcttgggacaggtatttatcagtggcattaaatcagagtgcagaaaagtacttgaaaccattctgaagaacagcaggctctgctccctgctgtctcctttcttcactcccaatgctgcacctgcagagttcatacagctgtatgagcaagtggtgaagtttctaagtgaggacaacagtgatatgattttcatgctgctaaccaagttcgatcttaaacaatggttaagcgccactaaacctcctctgtctgatcgtaccaggcttctggagtccattcacttggcacttactgcctggggccttgaaccagatgaggatattttgatgccatttaatcttttctgtaagcactggacttatcttcttctctaccagtttcctgaccagtacagtgacattctcaggctgcttatgcaaagctccgcggagcagcttctgagccccgagtgttggaaggccactctgagagccctgggctgctgcgcccccagctgccagcagggggcagcgtccaccgagggcgccgtgcttcccagctcttctgatgctctcttgtcagacaagcaggtaatggagactatacagtggctttcagactttttttataagcttcggttatccaagatggactttaaaagctttggtttattctcaaaatggagtccttatatggctgatgtgaagacattcttgggctaccttgtgaaaaggctgattgacttagaaatgacctgtttggcccaagacccaactgccagcaggaaaacagtgctgaaatccctacattcagtaatcattcagctctttaagccatggatcctggttttagaggacaacgaaagcagccaacagcggcattacccctggctagagagtgatactgtggtggcctcaagcattgtgcagctgttcactgactgtattgactcactgcatgagagttttaaagataagctgttgccaggtgatgcaggagccctttggttgcacctgatgcattattgtgaagcatgtacagcacccaaaatgccagagttcattctgtacgctttccatagcacgtaccggaaactgccatggaaggacctgcaccctgaccagatgctcatggaggccttcttcaaagtggaacgaggaagccccaagagctgtttcttatttttggggtctgtactctgtgaagtcaactgggttagtgtgctctctgatgcctggaattccagtccccacccagaaacccgcagcatgattgtctgcctccttttcatgatgattttattggcaaaggaagttcaactggtagaccaaacagattcacctttacttagtctccttggacagacaagctcactttcatggcatcttgtggatattgtgtcgtaccagagtgtgctaagttatttcagcagccattacccgccgtccatcatcctggcaaaagaatcttatgctgaattaatcatgaagctcctaaaagtgtctgcgggcctttctattcctactgacagccagaagcatcttgatgcagttccaaaatgccaagcttttactcatcagatggttcaattcctcagcaccctggaacaaaatggaaaaatcaccttagcagtcctagaacaggaaatgtctaagctcttagacgatatcattgtctttaacccgcccgacatggacagccagacccgccacatggccctcagcagcctctttatggaagtcctgatgatgatgaacaacgcgactattccaacagcagagttccttcggggcagtatccggacctggattggccaaaaaatgcatgggctggtggtgctgccccttttaacagcagcctgccagagcctggcgtccgtccgccacatggctgagactacagaagcctgcatcactgcctacttcaaagaaagccctctcaatcagaattcaggatggggacccattctggtatcccttcaggttcccgagctcaccatggaagagttcctgcaggagtgcctcaccttgggcagttacttgactctttacgtctacttgcttcagtgtttaaacagcgaacagactttaaggaatgaaatgaaagtgctgctcatcttaagcaagtggctggaacaggtgtacccaagctccgtggaggaagaggcaaagctgtttttgtggtggcaccaagtccttcagctctccctcattcagacagagcagaatgactccgtcctgacagaatctgtcattcgaattctgctcttggttcagagcaggcagaacctcgtggctgaggagagactcagctctgggatcctgggggcaattgggtttggccggaagtcgcctttgtctaacaggttccgagtggttgcccgaagcatggctgccttcctttcagttcaggttcctatggaagatcagatccgtttgaggcctggctctgaattacatctgacccccaaagctcagcaggctctgaatgctcttgaatccatggcatcaagtaagcagtatgttgaataccaggatcaaatattgcaagccacccaatttataaggcatcctggccattgccttcaagatgggaaaagcttcttggctcttctcgttaactgtctgtatccagaagtgcattatttggaccacatacgatagttaacactgaggctcttgaaaaacccattgctgtttatgtttacatttaactttgctgttgcacaagtaactttgctcaattgcactgtagagctcagtttggccaatgtgtagttgactgagatgcaagttgggaggcgttagatattagataattttggggtgtgtgtgtgtgtgtgtgtgtgttttcttagctcttaagaccttctggggactctttaagtttttatatttatccacaagagaaacttactaagttccacttgggtgcagagccactcacagttgccgaatgtcccagtcatctcacaagacctccagatggagttctttgtatgtttccacttctgtctctgttttatgtaaatgttccagatctgacaaccttggaagtcactcagtacccttacttttaaaccccatttgtgttcctccaaagtaaagaagtcaattttgaaaaatttctgcatttctcaaatgtggacaaatacaatagttttaaagtattgtttttctcagaagggagataaaaatgccgagttagttaaagtgggtcatgtgtaaaatacgaccacttgatcgtgattatagtgggcagtagagatgatgacaagtcaatttccatccagccgtgtatcctcatggagaagctgcctgtctgaatcaggatggcaagctggcagtctgggaggagcatgttttgcacagatgttttgtttggtccacttggtgaggagtgcagacagggctgcctctctctagtcgggagagtctgtgcattccctcgggccctgaccctagcctcattcacatcacttgcccctgtcgacacctaagtttgcaccctttgatagacaccatgttcgatatctgaaaggctcagtgtcaggagacagagactgagggagactgaagacctgattctctgttccctgcttgttttttaacttcaaactcagatgaagccaatggacctgctgaaacacttgtctgtggaaactgggtcaggtcgggagatctactgaaatttggctttttttccatagccacgtgccttctgttgttgacagttcattcattaccaaagcctgtgtgtaactttgccttgttctgtggccatcttcttgctcatgttatttctcctgggaatgagcagtttgacttctgttcccacgttcctcattctatcagctctagatggattttgcctgcatagctggcttaatatgtctttgtgtatgggtagtctgtagcctgagaatatttacctaaaaatgtctaaacagccaccaagaatgtttataggggtataggaatatagttaacagagtgctaatctctcctcaaatgtccttttggaatgcttcccccaaaattgggaagttggtaggagcttttctttactttgaatttctttacttggacagaacgattctgccttaaagacacgctttgcagctctgataaagaacatccctgtttagtctcttgagttttacaggccacaaaatgtccgtctcagagggatctgtctcagcttttcttatttttgcttctctccgttttcaaaattaatcatcttgttctctgtataagaaaatttgagaagctgtggacaatttaatagtctgatctggcaacagcgatttttgtttggaaatattttgtgttttctttgaggaggatataattactgatatcctaggatgtgaaatttttgagtgacagtatgcacattttaaagaaaattatgattaatctgtataatgttttttggtctgtaaaaattataaaaaataaaatcatttatctttggttgtaactgtttaaaaaccaaattatagggatatcacactatcttgtaaagtgtttcagctgttaaagttgctgtaggtttttatgcctgatgtcatttaatttatttgacattgaacttcattaataatcagagatggtcagtgaaagcgcttcctctttaactctttcttgcttaaccttggaaggttgactcaactcctaggtgtctatgggaaactctgggctaggaacgtgctataaagacactgagctagttcagacatggccatgctgctgtagcctcctgggaaagaagggcggcagagagaccagcccgcctgttggcttgcaggggtaatgagccttggcttgaaaaaattgttggcctccagagagcacggggctgtggtttcagaatcagtgatgggtgccgcacatcaagacgggaatcaagcaagaccaaggccctgtggactgagcagcgtggagggcgaacggctgcaggctccagacttcaccacagggtggccaacagtggcatcgggaccaaataaagatgtctaacagcttcctgggagcaggaggaggcaggattctggttgccatgaaaaacatctctctccctctccatcactccccatgctgcagtgcacaggtgggttgcagaggcaggctgcatcccggaatcatgttgtcccactgcctattaatagaacaagtgaagggcagaatgctggaacacaccagacatagagggagggaggtcctgccagatgtgtctacacaactgtctacatagcatgacagtagcagtggattcgggacccacctgtacatgtttccaaagctccttcctgcacactcgggacctcagctccaaggcgtgactcatttctcagtctcaccatcctttgttggctcagacatcgcatgcctctgccccactggggttgtgtgcctgcgtctctcacttctttgaggttggggaaagcctagtccagaaaatgaaaacccatagaccagcctaacttcctttcaaccaagtgacggcctcctggttcctctcagttcatcatcaaaatcagtgtgtacatgtcatacaagccaagagtgttcatgtcctcgttcctttcaaatgaaggtgatatatactttttcactgagtttttattcctgaaattctttcttctggagcaggaagcaaatgtcctggaatcgtagacttttacagtcagaagggtcattcacgttcatctagtgcccctctcactctgcagggatcctcctgcctctcctctgcccctgtccagtgcctggtggtccagcctgtgatgggcaggcctaggctgccatccgcaggctctgtagttctgctttctattgaaccaagatgtttctacgttgcctattggtcgtggttctgtccagagcagttcaggctggggctgttcacttgcccctccttgaggcagacctttagatattttcagttttcatcacatgtctaacaccacttccaccccacccctcacctcttaggctaaatccaagctaaatcccccaatgtcttttttttttttttttttttgagacgagtctcatctgtcacccaggctggagtgcaatggcatggtctcggctcactgcaacctccgcctcctgggttcaagctattctgcctcagcctcccaaggagccaggactacaggtgcatgccaccacgcccggctaatttttgtattttttagtagagacagggtttcacccagccattgagacaagctggtttcaaactcctgaccttgtggtccgcccgccccggcctcccagagtgctgggattacaggcgtgagccaccgcgcccatctcccctgcaatgtctttagttagaccttttccaccatcatgtctaactgggctacggtttggggaaagtgtccaaattagtccgtgttatcctaaaaggggtgtgccccggattagcagggccagggctagggtgagacaaatgaggcacctggggcatacatttaagttggtgcttgcttgcaggtgccaagagagtgcttccttgggtttacccccgtggtgcctcctttacctcattctggccccagccctggggttagagtcgcaccagtgtggtccaagtggcataattatctccctaaatgcttgggcagcatcagctttcagtagctgtgccccatgggaggcacattaagctagtggcaagttgagactgcagacctcagcttaatatcagttgttgcccaagacagatctcaccccacatcttcatgacaggcctaacaacaaggcactttgcccttaatcctctactactgcctgctcttcattttgggccaactgtacagctcattttgagatagtagctgatcatttttctgatcagttaactttgtcttattaagcaaaatggagaatataatgttgggaaataagtgtgttgattaaaagaaagtatccccttctaccatcttccatttgtgtctgggttgtgctgggtaaagttctagacttactaacgcagacttcattttggtccggtttccacagcatgcctcgggcatcagtgtccaggagtagctgtatttgaggtttccttcactctggtaggttcctgattcctgatgaaaataacttgaaaaaaaaataattatactactgatcctcttttgggataatgaaattgcgaaggaatgttgttgattataacttttattttttaatgtacagatgtactgtctctcattgagcactgatagaatttatttttctttcaatagtttaaaatcacttatgtggagacacatacttaagtgtgttcaactcgttttcttcccacatatctagtgtgacctttaaaaaccacaactttattttggacattaaatgtgcaatattcactacttattcattgttccacatttttcatacttgtacaaagggtaagtttttatataatggtgagaaacaggaagaaatgacaactggttaagtaaaattctgcaaataaactagattcgaatttaattta

SEQ ID NO: 206740 - DNA, 4348 bp, Artificial Sequence
  derived and/or modified sequence
ccttctgaagaatgagcagtttttatcgcatctcctcttgttcctacacttggacagcggtgtccctcagggtgtcacacaacaggtcacccacaaggtggcacagcacctgacaggagccagccatggggacaacgtgaagcttctcaacagcatgatccaggcacacatatctgtaagcactcagcccaatgaagtgggccccgttgctgtgttggagttctgggttcaggctctcataagccagcatctctggtaccgagaacaacctatcctcttcctcatggaccacttgtgtaaagcagcttttcagctgatgcaggaagactgcatacagaaattactctaccaacaacataagaatgccttgggttaccactgtgaccggagtctgctctcatctttggtaagctggattgtggcaggcaacatcactccttcctttgtggagggcttggccacgcccactcaggtctggtttgcctggacagtgctcaacatggaatccatctttgaagaggactcccagctccggagagttattgaaggggaattggtgataaactctgctttcacccctgaccaagctctgaagaaagcccagacccagctgaagctccccatcgtgccatccctccagaggctgctgatttatcgctgggcccaccaggctctggtcacaccttctgatcaccccctcctgccactcatttggcagaagttcttccttctgtatcttcaccgtccgggaccacagtatgggttacccatagatggttgtattggaagaaggttttttcaaagtcctgctcatatcaatttgttgaaagaaatgaagagacgtttgaccgaggtggctgacttccaccatgctgcaagcaaggccctccgtgttccagcagagggcagtgaagggctgccagagagccactctggcacccctggttacctgacttcaccagaactgcacaaggagctggtgaggctcttcaatgtatatatattatggctagaagatgagaattttcaaaaaggagatacctatatcccttctctaccaaagcattatgatattcacaggctagcaaaagtgatgcagaatcagcaggatctgtggatggagtatttgaacatggagcgcatctatcatgagtttcaggagactgttggtctgtggacacaggccaagcttgagtcccattccacaccctgcagtttgtccgtgcagctggacttcactgatcctttgctggctaaagaaagggttttaagtaacttgcggaagcatgaggctccccagcctccccttgctctgcacccgacgaagcctcctgtgccagttatttcctctgctgtgctattgagtcagaaggacgccacccagctggtgtgcacagacctgaatctgttgcaacagcaggccagaaccgcagctcttcgggaatctcagcaggttgctctggatggtgagctgttagacacaatgccaaagcagtatgtgaatcgtgaagaacagaccacactacatttggagtgcagaggcagcagcggtaagaaatgccaaggagccgcagttgtcacggttcagtttgaaggcatgcataagaatgaagccataagccaacagcttcatgttttacggaaggaagtgaagcagttgcaagcagaagctgctaaaccaccatcacttaatattgtggaagctgctgtacatgcagaaaacttgatcacggccttagtgaatgcctacaagttgcagcctacacctgggattcagaaagttggcattagccttttctttactattgtggattacgtcagcgatgagacgcagcgtcatcccccaacaaggcagttctttacttcatgtattgagatcttgggacaggtatttatcagtggcattaaatcagagtgcagaaaagtacttgaaaccattctgaagaacagcaggctctgctccctgctgtctcctttcttcactcccaatgctgcacctgcagagttcatacagctgtatgagcaagtggtgaagtttctaagtgaggacaacagtgatatgattttcatgctgctaaccaagttcgatcttaaacaatggttaagcgccactaaacctcctctgtctgatcgtaccaggcttctggagtccattcacttggcacttactgcctggggccttgaaccagatgaggatattttgatgccatttaatcttttctgtaagcactggacttatcttcttctctaccagtttcctgaccagtacagtgacattctcaggctgcttatgcaaagctccgcggagcagcttctgagccccgagtgttggaaggccactctgagagccctgggctgctgcgcccccagctgccagcagggggcagcgtccaccgagggcgccgtgcttcccagctcttctgatgctctcttgtcagacaagcaggtaatggagactatacagtggctttcagactttttttataagcttcggttatccaagatggactttaaaagctttggtttattctcaaaatggagtccttatatggctgatgtgaagacattcttgggctaccttgtgaaaaggctgattgacttagaaatgacctgtttggcccaagacccaactgccagcaggaaaacagtgctgaaatccctacattcagtaatcattcagctctttaagccatggatcctggttttagaggacaacgaaagcagccaacagcggcattacccctggctagagagtgatactgtggtggcctcaagcattgtgcagctgttcactgactgtattgactcactgcatgagagttttaaagataagctgttgccaggtgatgcaggagccctttggttgcacctgatgcattattgtgaagcatgtacagcacccaaaatgccagagttcattctgtacgctttccatagcacgtaccggaaactgccatggaaggacctgcaccctgaccagatgctcatggaggccttcttcaaagtggaacgaggaagccccaagagctgtttcttatttttggggtctgtactctgtgaagtcaactgggttagtgtgctctctgatgcctggaattccagtccccacccagaaacccgcagcatgattgtctgcctccttttcatgatgattttattggcaaaggaagttcaactggtagaccaaacagattcacctttacttagtctccttggacagacaagctcactttcatggcatcttgtggatattgtgtcgtaccagagtgtgctaagttatttcagcagccattacccgccgtccatcatcctggcaaaagaatcttatgctgaattaatcatgaagctcctaaaagtgtctgcgggcctttctattcctactgacagccagaagcatcttgatgcagttccaaaatgccaagcttttactcatcagatggttcaattcctcagcaccctggaacaaaatggaaaaatcaccttagcagtcctagaacaggaaatgtctaagctcttagacgatatcattgtctttaacccgcccgacatggacagccagacccgccacatggccctcagcagcctctttatggaagtcctgatgatgatgaacaacgcgactattccaacagcagagttccttcggggcagtatccggacctggattggccaaaaaatgcatgggctggtggtgctgccccttttaacagcagcctgccagagcctggcgtccgtccgccacatggctgagactacagaagcctgcatcactgcctacttcaaagaaagccctctcaatcagaattcaggatggggacccattctggtatcccttcaggttcccgagctcaccatggaagagttcctgcaggagtgcctcaccttgggcagttacttgactctttacgtctacttgcttcagtgtttaaacagcgaacagactttaaggaatgaaatgaaagtgctgctcatcttaagcaagtggctggaacaggtgtacccaagctccgtggaggaagaggcaaagctgtttttgtggtggcaccaagtccttcagctctccctcattcagacagagcagaatgactccgtcctgacagaatctgtcattcgaattctgctcttggttcagagcaggcagaacctcgtggctgaggagagactcagctctgggatcctgggggcaattgggtttggccggaagtcgcctttgtctaacaggtaaggaagcgcctttctaacactgttgttctaaataggcctcagacatctgtacctacttacaggttgtgatatacttcagtaggtttttcgacttaggatctaggttctccagaaagattaatgg

SEQ ID NO: 206741 - DNA, 6381 bp, Artificial Sequence
  derived and/or modified sequence
actactccagtggaacgaggaagccccaagagctgtttcttatttttggggtctgtactctgtgaagtcaactgggttagtgtgctctctgatgcctggaattccagtccccacccagaaacccgcagcatgattgtctgcctccttttcatgatgattttattggcaaaggaagttcaactggtagaccaaacagattcacctttacttagtctccttggacagacaagctcactttcatggcatcttgtggatattgtgtcgtaccagagtgtgctaagttatttcagcagccattacccgccgtccatcatcctggcaaaagaatcttatgctgaattaatcatgaagctcctaaaagtgtctgcgggcctttctattcctactgacagccagaagcatcttgatgcagttccaaaatgccaagcttttactcatcagatggttcaattcctcagcaccctggaacaaaatggaaaaatcaccttagcagtcctagaacaggaaatgtctaagctcttagacgatatcattgtctttaacccgcccgacatggacagccagacccgccacatggccctcagcagcctctttatggaagtcctgatgatgatgaacaacgcgactattccaacagcagagttccttcggggcagtatccggacctggattggccaaaaaatgcatgggctggtggtgctgccccttttaacagcagcctgccagagcctggcgtccgtccgccacatggctgagactacagaagcctgcatcactgcctacttcaaagaaagccctctcaatcagaattcaggatggggacccattctggtatcccttcaggttcccgagctcaccatggaagagttcctgcaggagtgcctcaccttgggcagttacttgactctttacgtctacttgcttcagtgtttaaacagcgaacagactttaaggaatgaaatgaaagtgctgctcatcttaagcaagtggctggaacaggtgtacccaagctccgtggaggaagaggcaaagctgtttttgtggtggcaccaagtccttcagctctccctcattcagacagagcagaatgactccgtcctgacagaatctgtcattcgaattctgctcttggttcagagcaggcagaacctcgtggctgaggagagactcagctctgggatcctgggggcaattgggtttggccggaagtcgcctttgtctaacaggttccgagtggttgcccgaagcatggctgccttcctttcagttcaggttcctatggaagatcagatccgtttgaggcctggctctgaattacatctgacccccaaagctcagcaggctctgaatgctcttgaatccatggcatcaagtaagcagtatgttgaataccaggatcaaatattgcaagccacccaatttataaggcatcctggccattgccttcaagatgggaaaagcttcttggctcttctcgttaactgtctgtatccagaagtgcattatttggaccacatacgatagttaacactgaggctcttgaaaaacccattgctgtttatgtttacatttaactttgctgttgcacaagtaactttgctcaattgcactgtagagctcagtttggccaatgtgtagttgactgagatgcaagttgggaggcgttagatattagataattttggggtgtgtgtgtgtgtgtgtgtgtgttttcttagctcttaagaccttctggggactctttaagtttttatatttatccacaagagaaacttactaagttccacttgggtgcagagccactcacagttgccgaatgtcccagtcatctcacaagacctccagatggagttctttgtatgtttccacttctgtctctgttttatgtaaatgttccagatctgacaaccttggaagtcactcagtacccttacttttaaaccccatttgtgttcctccaaagtaaagaagtcaattttgaaaaatttctgcatttctcaaatgtggacaaatacaatagttttaaagtattgtttttctcagaagggagataaaaatgccgagttagttaaagtgggtcatgtgtaaaatacgaccacttgatcgtgattatagtgggcagtagagatgatgacaagtcaatttccatccagccgtgtatcctcatggagaagctgcctgtctgaatcaggatggcaagctggcagtctgggaggagcatgttttgcacagatgttttgtttggtccacttggtgaggagtgcagacagggctgcctctctctagtcgggagagtctgtgcattccctcgggccctgaccctagcctcattcacatcacttgcccctgtcgacacctaagtttgcaccctttgatagacaccatgttcgatatctgaaaggctcagtgtcaggagacagagactgagggagactgaagacctgattctctgttccctgcttgttttttaacttcaaactcagatgaagccaatggacctgctgaaacacttgtctgtggaaactgggtcaggtcgggagatctactgaaatttggctttttttccatagccacgtgccttctgttgttgacagttcattcattaccaaagcctgtgtgtaactttgccttgttctgtggccatcttcttgctcatgttatttctcctgggaatgagcagtttgacttctgttcccacgttcctcattctatcagctctagatggattttgcctgcatagctggcttaatatgtctttgtgtatgggtagtctgtagcctgagaatatttacctaaaaatgtctaaacagccaccaagaatgtttataggggtataggaatatagttaacagagtgctaatctctcctcaaatgtccttttggaatgcttcccccaaaattgggaagttggtaggagcttttctttactttgaatttctttacttggacagaacgattctgccttaaagacacgctttgcagctctgataaagaacatccctgtttagtctcttgagttttacaggccacaaaatgtccgtctcagagggatctgtctcagcttttcttatttttgcttctctccgttttcaaaattaatcatcttgttctctgtataagaaaatttgagaagctgtggacaatttaatagtctgatctggcaacagcgatttttgtttggaaatattttgtgttttctttgaggaggatataattactgatatcctaggatgtgaaatttttgagtgacagtatgcacattttaaagaaaattatgattaatctgtataatgttttttggtctgtaaaaattataaaaaataaaatcatttatctttggttgtaactgtttaaaaaccaaattatagggatatcacactatcttgtaaagtgtttcagctgttaaagttgctgtaggtttttatgcctgatgtcatttaatttatttgacattgaacttcattaataatcagagatggtcagtgaaagcgcttcctctttaactctttcttgcttaaccttggaaggttgactcaactcctaggtgtctatgggaaactctgggctaggaacgtgctataaagacactgagctagttcagacatggccatgctgctgtagcctcctgggaaagaagggcggcagagagaccagcccgcctgttggcttgcaggggtaatgagccttggcttgaaaaaattgttggcctccagagagcacggggctgtggtttcagaatcagtgatgggtgccgcacatcaagacgggaatcaagcaagaccaaggccctgtggactgagcagcgtggagggcgaacggctgcaggctccagacttcaccacagggtggccaacagtggcatcgggaccaaataaagatgtctaacagcttcctgggagcaggaggaggcaggattctggttgccatgaaaaacatctctctccctctccatcactccccatgctgcagtgcacaggtgggttgcagaggcaggctgcatcccggaatcatgttgtcccactgcctattaatagaacaagtgaagggcagaatgctggaacacaccagacatagagggagggaggtcctgccagatgtgtctacacaactgtctacatagcatgacagtagcagtggattcgggacccacctgtacatgtttccaaagctccttcctgcacactcgggacctcagctccaaggcgtgactcatttctcagtctcaccatcctttgttggctcagacatcgcatgcctctgccccactggggttgtgtgcctgcgtctctcacttctttgaggttggggaaagcctagtccagaaaatgaaaacccatagaccagcctaacttcctttcaaccaagtgacggcctcctggttcctctcagttcatcatcaaaatcagtgtgtacatgtcatacaagccaagagtgttcatgtcctcgttcctttcaaatgaaggtgatatatactttttcactgagtttttattcctgaaattctttcttctggagcaggaagcaaatgtcctggaatcgtagacttttacagtcagaagggtcattcacgttcatctagtgcccctctcactctgcagggatcctcctgcctctcctctgcccctgtccagtgcctggtggtccagcctgtgatgggcaggcctaggctgccatccgcaggctctgtagttctgctttctattgaaccaagatgtttctacgttgcctattggtcgtggttctgtccagagcagttcaggctggggctgttcacttgcccctccttgaggcagacctttagatattttcagttttcatcacatgtctaacaccacttccaccccacccctcacctcttaggctaaatccaagctaaatcccccaatgtcttttttttttttttttttttgagacgagtctcatctgtcacccaggctggagtgcaatggcatggtctcggctcactgcaacctccgcctcctgggttcaagctattctgcctcagcctcccaaggagccaggactacaggtgcatgccaccacgcccggctaatttttgtattttttagtagagacagggtttcacccagccattgagacaagctggtttcaaactcctgaccttgtggtccgcccgccccggcctcccagagtgctgggattacaggcgtgagccaccgcgcccatctcccctgcaatgtctttagttagaccttttccaccatcatgtctaactgggctacggtttggggaaagtgtccaaattagtccgtgttatcctaaaaggggtgtgccccggattagcagggccagggctagggtgagacaaatgaggcacctggggcatacatttaagttggtgcttgcttgcaggtgccaagagagtgcttccttgggtttacccccgtggtgcctcctttacctcattctggccccagccctggggttagagtcgcaccagtgtggtccaagtggcataattatctccctaaatgcttgggcagcatcagctttcagtagctgtgccccatgggaggcacattaagctagtggcaagttgagactgcagacctcagcttaatatcagttgttgcccaagacagatctcaccccacatcttcatgacaggcctaacaacaaggcactttgcccttaatcctctactactgcctgctcttcattttgggccaactgtacagctcattttgagatagtagctgatcatttttctgatcagttaactttgtcttattaagcaaaatggagaatataatgttgggaaataagtgtgttgattaaaagaaagtatccccttctaccatcttccatttgtgtctgggttgtgctgggtaaagttctagacttactaacgcagacttcattttggtccggtttccacagcatgcctcgggcatcagtgtccaggagtagctgtatttgaggtttccttcactctggtaggttcctgattcctgatgaaaataacttgaaaaaaaaataattatactactgatcctcttttgggataatgaaattgcgaaggaatgttgttgattataacttttattttttaatgtacagatgtactgtctctcattgagcactgatagaatttatttttctttcaatagtttaaaatcacttatgtggagacacatacttaagtgtgttcaactcgttttcttcccacatatctagtgtgacctttaaaaaccacaactttattttggacattaaatgtgcaatattcactacttattcattgttccacatttttcatacttgtacaaagggtaagtttttatataatggtgagaaacaggaagaaatgacaactggttaagtaaaattctgcaaataaactagattcgaatttaattt

SEQ ID NO: 206742 - DNA, 7740 bp, Artificial Sequence
  derived and/or modified sequence
atggccgaggccgtgaagccccagaggcgggccaaggccaaggccagcaggaccaagaccaaggagaagaagaagtatgagaccccccagcgggaggagagcagcgaggtgtccctgcccaagaccagccgggagcaggagatccccagcctggcctgtgagttcaagggggaccacctgaaggtggtgacagacagccagctgcaggatgatgccagcggccagaatgaaagtgagatgtttgatgtgcccctgaccagcctgaccatcagcaatgaggagagcctgacctgcaacacagagccccccaaggagggcggggaggcccggccctgtgtgggggacagcgctgtgacccccaaggtgcaccctggggacaacgtgggcaccaaggtggagacccccaagaacttcacagaggtggaggagaacatgtctgtgcagggcggcctgtctgagagcgccccccagagcaacttctcctacacccagcctgccatggagaacatccaggtgcgggagacccagaacagcaaggaggacaagcagggcctggtgtgcagcagcgaggtgccccagaatgtgggcctgcagagcagctgcccagccaagcacggcttccagaccccccgggtgaagaagctgtacccccagctgcctgctgagattgctggggaggccccagccctggtggccgtgaagcccctgctgcggtctgagcggctgtacccagagctgcccagccagctggagctggtgcccttcaccaaggagcagctgaagatcctggagcccggctcctggctggagaatgtggagagctacctggaggagtttgacagcatggcccaccaggacagacatgagttctatgagctgctgctgaactacagccgctgcaggaagcagctgctgctggccgaggccgagctgctgaccctgaccagtgactgccagaatgccaagagccggctgtggcagttcaaggaggagcagatgtctgtgcagggcatctgtgccgaccaggtgaaggtgttctcctaccaccgctaccagagggtggagatgaatgaaaatgccctggtggagctgaagaagctgtttgatgccaagtctgagcacctgcaccagaccctggccctgcacagctacacctctgtgctgagccggctgcaggtggagagctacatctatgccctgctgagcagcagcgctgtgctgcggagcagcgccatccaccagcagggccgggccagcaagcagacagagagcatccccagcgacctgtgccagctgaaggagtgcatctctgtgctcttcatgttcacccggcgggtgaatgaagacacccagttccatgatgacatcctgctgtggctgcagaagctggtgtctgtgctgcagagggtgggctgccctggggaccacctgttcctgctgaaccacatcctgcgctgcccagctggggtgtccaagtgggccgtgcccttcatccagatcaaggtgctgcacaaccccagcggggtcttccacttcatgcagagcctggccctgctgatgagccctgtgaagaacagagctgagttcatgtgccacatgaagcccagcgagaggaagcccagcagcagcggccctggcagcggcacctggaccctggtggatgagggcggggaggaggatgaagatcctgagacctcctggatcctgctgaatgaagatgacctggtgaccatcctggcccagttccccttccacgagctgttccagcacctgctgggcttcaaggccaagggggactacctgcctgagaccacccggccccaggagatgatgaagatctttgcctttgccaacagcctggtggagctgctggccgtgggcctggagaccttcaacagagcccgctaccggcagtttgtgaagagaattggctacatgatccgcatgaccctgggctacgtgtctgaccactgggcccagtatgtgagccacaaccagggcagcggcctggcccagcagccctacagcatggagaagctgcaggtggagtttgatgagctgttcctgcgggctgtgctgcacgtgctgaaggccaagaggctgggcatctggctgttcatgtctgagatgcccttcggcaccctgtctgtgcagatgctgtggaagctgttctacctgatgcaccaggtggagagcgagaacctgcagcagctgagcagcagcctgcagcctgcccagtgcaagcagcagctgcaggaccctgagcacttcaccaactttgagaagtgcctgagctccatgaacagcagcgaggagatctgcctgctgaccacctttgcccagatggcccaggcccggaggaccaacgtggatgaggacttcatcaagatcatcgtgctggagatctatgaggtgtcctatgtgaccctgagcacccgggagaccttcagcaaggtgggccgggagctgctgggcaccatcacagctgtgcaccctgagatcatctctgtgctgctggacagagtgcaggagaccatcgaccaggtgggcatggtgtccctgtacctgttcaaggagctgcccctgtacctgtggcagcccagcgccagcgagattgctgtgatccgggactggctgctgaactacaacctgactgtggtgaagaacaagctggcctgtgtgatcctggagggcctgaactggggctttgccaagcaggccaccctgcacctggaccaggccgtgcatgctgaggtggccctgatggtgctggaggcctaccagaagtacctggcccagaagccctatgccggcatcctgtctgagagcatgaagcaggtgtcctacctggccagcatcgtgcgctacggggagaccccagagaccagcttcaaccagtgggcctggaacctgatcctgcggctgaagctgcacaagaatgactatggcatccagcccaactgcccagctgtgcccttctctgtgacagtgcctgacatgacagagagccccaccttccaccccctgctgaaggctgtgaaggccggcatgcccatcggctgctacctggccctgtccatgacagctgtgggccacagcattgagaagttctgtgccgagggcatccccctgctgggcatcctggtgcagagccgccacctgaggacagtggtgcacgtgctggacaagatcctgcccctcttctacccctgccagtactacctgctgaagaatgagcagttcctgagccacctgctgctcttcctgcacctggacagcggcgtgccccagggcgtgacccagcaggtgacccacaaggtggcccagcacctgaccggggccagccacggggacaacgtgaagctgctgaacagcatgatccaggcccacatctctgtgtccacccagcccaatgaggtgggccctgtggccgtgctggagttctgggtgcaggccctgatcagccagcacctgtggtaccgggagcagcccatcctcttcctgatggaccacctgtgcaaggccgccttccagctgatgcaggaggactgcatccagaagctgctgtaccagcagcacaagaatgccctgggctaccactgtgacaggagcctgctgagcagcctggtgtcctggatcgtggccggcaacatcacccccagctttgtggagggcctggccacccccacccaggtgtggtttgcctggacagtgctgaacatggagagcatctttgaggaggacagccagctgcggcgggtgattgaaggagagctggtgatcaacagcgccttcaccccagaccaggccctgaagaaggcccagacccagctgaagctgcccatcgtgcccagcctgcagaggctgctgatctaccgctgggcccaccaggccctggtgacccccagcgaccaccccctgctgcccctcatctggcagaagttcttcctgctgtacctgcacaggcctggcccccagtatggcctgcccattgatggctgcattggaagacgcttcttccagagccctgcccacatcaacctgctgaaggagatgaagaggcggctgacagaggtggccgacttccaccacgccgccagcaaggccctgcgggtgcctgctgagggcagcgagggcctgcctgagagccacagcggcaccccaggctacctgaccagccctgagctgcacaaggagctggtgcggctcttcaacgtgtacatcctgtggctggaggatgagaacttccagaagggggacacctacatccccagcctgcccaagcactatgacatccaccggctggccaaggtgatgcagaaccagcaggacctgtggatggagtacctgaacatggagcgcatctaccacgagttccaggagaccgtgggcctgtggacccaggccaagctggagagccacagcaccccctgcagcctgtctgtgcagctggacttcacagaccccctgctggccaaggagcgggtgctgagcaacctgaggaagcatgaggccccccagccccccctggccctgcaccccaccaagccccctgtgcctgtgatcagcagcgctgtgctgctgagccagaaggatgccacccagctggtgtgcacagacctgaacctgctgcagcagcaggccaggacagctgccctgcgggagagccagcaggtggccctggatggagagctgctggacaccatgcccaagcagtatgtgaaccgggaggagcagaccaccctgcacctggagtgccggggcagcagcggcaagaagtgccagggcgctgctgtggtgacagtgcagtttgagggcatgcacaagaatgaggccatcagccagcagctgcacgtgctgaggaaggaggtgaagcagctgcaggccgaggccgccaagccacccagcctgaacatcgtggaggccgctgtgcatgctgaaaatctcatcacagccctggtgaatgcctacaagctgcagcccaccccaggcatccagaaggtgggcatcagcctcttcttcaccatcgtggactatgtgtctgatgagacccagaggcacccccccacccggcagttcttcaccagctgcatcgagatcctgggccaggtgttcatcagcggcatcaagtctgagtgcaggaaggtgctggagaccatcctgaagaacagccggctgtgcagcctgctgagccccttcttcaccccaaatgctgccccagctgagttcatccagctgtatgagcaggtggtgaagttcctgtctgaggacaacagcgacatgatcttcatgctgctgaccaagtttgacctgaagcagtggctgagcgccaccaagccacccctgagtgacaggacccggctgctggagagcatccacctggccctgacagcctggggcctggagccagatgaggacatcctgatgcccttcaacctcttctgcaagcactggacctacctgctgctgtaccagttcccagaccagtacagcgacatcctgcggctgctgatgcagagcagcgctgagcagctgctgagccctgagtgctggaaggccaccctgcgggccctgggctgctgtgcccccagctgccagcagggcgccgccagcacagagggcgctgtgctgcccagcagcagtgatgccctgctgagtgacaagcaggtgatggagaccatccagtggctgagtgacttcttctacaagctgcggctgagcaagatggacttcaagagctttggcctcttcagcaagtggagcccctacatggctgatgtgaagaccttcctgggctacctggtgaagaggctgattgacctggagatgacctgcctggcccaggaccccacagccagcaggaagacagtgctgaagagcctgcacagcgtcatcatccagctgttcaagccctggatcctggtgctggaggacaatgaaagcagccagcagaggcactacccctggctggagagtgacacagtggtggccagcagcatcgtgcagctgttcacagactgcatcgacagcctgcacgagagcttcaaggacaagctgctgcctggagatgctggggccctgtggctgcacctgatgcactactgtgaggcctgcacagcccccaagatgcctgagttcatcctgtatgccttccacagcacctacaggaagctgccctggaaggacctgcacccagaccagatgctgatggaggccttcttcaaggtggagcggggcagccccaagagctgcttcctgttcctgggctctgtgctgtgtgaggtgaactgggtgtctgtgctgagtgatgcctggaacagcagcccccaccctgagaccaggtccatgattgtgtgcctgctcttcatgatgatcctgctggccaaggaggtgcagctggtggaccagacagacagccccctgctgagcctgctgggccagaccagcagcctgtcctggcacctggtggacatcgtgtcctaccagagcgtgctgagctacttcagcagccactacccacccagcatcatcctggccaaggagagctatgcagagctgatcatgaagctgctgaaggtgtctgctggcctgagcatccccacagacagccagaagcacctggatgctgtgcccaagtgccaggccttcacccaccagatggtgcagttcctgagcaccctggagcagaatggcaagatcaccctggccgtgctggagcaggagatgagcaagctgctggatgacatcatcgtgttcaaccccccagacatggacagccagaccaggcacatggccctgagcagcctcttcatggaggtgctgatgatgatgaacaatgccaccatccccacagctgagttcctgcggggcagcatccgcacctggattggccagaagatgcacggcctggtggtgctgcccctgctgacagctgcctgccagagcctggcctctgtgcgccacatggccgagaccacagaggcctgcatcacagcctacttcaaggagagccccctgaaccagaacagcggctggggccccatcctggtgtccctgcaggtgcctgagctgaccatggaggagttcctgcaggagtgcctgaccctgggcagctacctgaccctgtatgtgtacctgctgcagtgcctgaacagcgagcagaccctgagaaatgagatgaaggtgctgctgatcctgagcaagtggctggagcaggtgtaccccagctctgtggaggaggaggccaagctgttcctgtggtggcaccaggtgctgcagctgagcctcatccagacagagcagaatgattctgtgctgacagagagcgtcatccgcatcctgctgctggtgcagagccggcagaacctggtggccgaggagcggctgagcagcggcatcctgggcgccatcggcttcggcaggaagagccccctgagcaaccgcttccgggtggtggcccgctccatggccgccttcctgtctgtgcaggtgcccatggaggaccagatccggctgcggcccggcagcgagctgcacctgacccccaaggcccagcaggccctgaatgccctggagagcatggccagcagcaagcagtatgtggagtaccaggaccagatcctgcaggccacccagttcatccgccaccctggccactgcctgcaggacggcaagagcttcctggccctgctggtgaactgcctgtacccagaggtgcactacctggaccacatcagatag

SEQ ID NO: 206743 - DNA, 4071 bp, Artificial Sequence
  derived and/or modified sequence
atgatccaggcccacatctctgtgtccacccagcccaatgaggtgggccctgtggccgtgctggagttctgggtgcaggccctgatcagccagcacctgtggtaccgggagcagcccatcctcttcctgatggaccacctgtgcaaggccgccttccagctgatgcaggaggactgcatccagaagctgctgtaccagcagcacaagaatgccctgggctaccactgtgacaggagcctgctgagcagcctggtgtcctggatcgtggccggcaacatcacccccagctttgtggagggcctggccacccccacccaggtgtggtttgcctggacagtgctgaacatggagagcatctttgaggaggacagccagctgcggcgggtcatcgagggggagctggtgatcaacagcgccttcaccccagaccaggccctgaagaaggcccagacccagctgaagctgcccatcgtgcccagcctgcagaggctgctgatctaccgctgggcccaccaggccctggtgacccccagcgaccaccccctgctgcccctcatctggcagaagttcttcctgctgtacctgcaccggcccggcccccagtatggcctgcccattgatggctgcatcggccgccgcttcttccagagccctgcccacatcaacctgctgaaggagatgaagaggcggctgacagaggtggccgacttccaccacgccgccagcaaggccctgcgggtgcctgctgagggcagcgagggcctgcctgagagccacagcggcaccccaggctacctgaccagccctgagctgcacaaggagctggtgcggctcttcaacgtgtacatcctgtggctggaggatgagaacttccagaagggggacacctacatccccagcctgcccaagcactatgacatccaccggctggccaaggtgatgcagaaccagcaggacctgtggatggagtacctgaacatggagcgcatctaccacgagttccaggagaccgtgggcctgtggacccaggccaagctggagagccacagcaccccctgcagcctgtctgtgcagctggacttcacagaccccctgctggccaaggagcgggtgctgagcaacctgaggaagcatgaggccccccagccccccctggccctgcaccccaccaagccccctgtgcctgtgatcagcagcgctgtgctgctgagccagaaggatgccacccagctggtgtgcacagacctgaacctgctgcagcagcaggccaggacagctgccctgcgggagagccagcaggtggccctggatggagagctgctggacaccatgcccaagcagtatgtgaaccgggaggagcagaccaccctgcacctggagtgccggggcagcagcggcaagaagtgccagggcgctgctgtggtgacagtgcagtttgagggcatgcacaagaatgaggccatcagccagcagctgcacgtgctgaggaaggaggtgaagcagctgcaggccgaggccgccaagccacccagcctgaacatcgtggaggccgctgtgcatgctgagaacctgatcacagccctggtgaatgcctacaagctgcagcccaccccaggcatccagaaggtgggcatcagcctcttcttcaccatcgtggactatgtgtctgatgagacccagaggcacccccccacccggcagttcttcaccagctgcatcgagatcctgggccaggtgttcatcagcggcatcaagtcagaatgtaggaaggtgctggagaccatcctgaagaacagccggctgtgcagcctgctgagccccttcttcaccccaaatgctgccccagctgagttcatccagctgtatgagcaggtggtgaagttcctgtctgaggacaacagcgacatgatcttcatgctgctgaccaagtttgacctgaagcagtggctgagcgccaccaagccacccctgagtgacaggacccggctgctggagagcatccacctggccctgacagcctggggcctggagccagatgaggacatcctgatgcccttcaacctcttctgcaagcactggacctacctgctgctgtaccagttcccagaccagtacagcgacatcctgcggctgctgatgcagagcagcgctgagcagctgctgagccctgagtgctggaaggccaccctgcgggccctgggctgctgtgcccccagctgccagcagggcgccgccagcacagaaggagctgtgctgcccagcagcagtgatgccctgctgagtgacaagcaggtgatggagaccatccagtggctgagtgacttcttctacaagctgcggctgagcaagatggacttcaagagctttggcctcttcagcaagtggagcccctacatggctgatgtgaagaccttcctgggctacctggtgaagaggctgattgacctggagatgacctgcctggcccaggaccccacagccagcaggaagacagtgctgaagagcctgcacagcgtcatcatccagctgttcaagccctggatcctggtgctggaggacaatgaaagcagccagcagaggcactacccctggctggagagtgacacagtggtggccagcagcatcgtgcagctgttcacagactgcatcgacagcctgcacgagagcttcaaggacaagctgctgcctggagatgctggggccctgtggctgcacctgatgcactactgtgaggcctgcacagcccccaagatgcctgagttcatcctgtatgccttccacagcacctacaggaagctgccctggaaggacctgcacccagaccagatgctgatggaggccttcttcaaggtggagcggggcagccccaagagctgcttcctgttcctgggctctgtgctgtgtgaggtgaactgggtgtctgtgctgagtgatgcctggaacagcagcccccaccctgagaccaggtccatgattgtgtgcctgctcttcatgatgatcctgctggccaaggaggtgcagctggtggaccagacagacagccccctgctgagcctgctgggccagaccagcagcctgtcctggcacctggtggacatcgtgtcctaccagagcgtgctgagctacttcagcagccactacccacccagcatcatcctggccaaggagagctatgcagagctgatcatgaagctgctgaaggtgtctgctggcctgagcatccccacagacagccagaagcacctggatgctgtgcccaagtgccaggccttcacccaccagatggtgcagttcctgagcaccctggagcagaatggcaagatcaccctggccgtgctggagcaggagatgagcaagctgctggatgacatcatcgtgttcaaccccccagacatggacagccagaccaggcacatggccctgagcagcctcttcatggaggtgctgatgatgatgaacaatgccaccatccccacagctgagttcctgcggggcagcatccgcacctggattggccagaagatgcacggcctggtggtgctgcccctgctgacagctgcctgccagagcctggcctctgtgcgccacatggccgagaccacagaggcctgcatcacagcctacttcaaggagagccccctgaaccagaacagcggctggggccccatcctggtgtccctgcaggtgcctgagctgaccatggaggagttcctgcaggagtgcctgaccctgggcagctacctgaccctgtatgtgtacctgctgcagtgcctgaacagcgagcagaccctgagaaatgagatgaaggtgctgctgatcctgagcaagtggctggagcaggtgtaccccagctctgtggaggaggaggccaagctgttcctgtggtggcaccaggtgctgcagctgagcctcatccagacagagcagaatgacagcgtgctgacagaatctgtcatccgcatcctgctgctggtgcagagccggcagaacctggtggccgaggagcggctgagcagcggcatcctgggcgccatcggctttggaaggaagagccccctgagcaacagatag

SEQ ID NO: 206744 - DNA, 1524 bp, Artificial Sequence
  derived and/or modified sequence
accacccctgtggagcggggcagccccaagagctgcttcctgttcctgggctctgtgctgtgtgaggtgaactgggtgtctgtgctgagtgatgcctggaacagcagcccccaccctgagaccaggtccatgattgtgtgcctgctcttcatgatgatcctgctggccaaggaggtgcagctggtggaccagacagacagccccctgctgagcctgctgggccagaccagcagcctgtcctggcacctggtggacatcgtgtcctaccagagcgtgctgagctacttcagcagccactacccacccagcatcatcctggccaaggagagctatgcagagctgatcatgaagctgctgaaggtgtctgctggcctgagcatccccacagacagccagaagcacctggatgctgtgcccaagtgccaggccttcacccaccagatggtgcagttcctgagcaccctggagcagaatggcaagatcaccctggccgtgctggagcaggagatgagcaagctgctggatgacatcatcgtgttcaaccccccagacatggacagccagaccaggcacatggccctgagcagcctcttcatggaggtgctgatgatgatgaacaatgccaccatccccacagctgagttcctgcggggcagcatccgcacctggattggccagaagatgcacggcctggtggtgctgcccctgctgacagctgcctgccagagcctggcctctgtgcgccacatggccgagaccacagaggcctgcatcacagcctacttcaaggagagccccctgaaccagaacagcggctggggccccatcctggtgtccctgcaggtgcctgagctgaccatggaggagttcctgcaggagtgcctgaccctgggcagctacctgaccctgtatgtgtacctgctgcagtgcctgaacagcgagcagaccctgagaaatgagatgaaggtgctgctgatcctgagcaagtggctggagcaggtgtaccccagctctgtggaggaggaggccaagctgttcctgtggtggcaccaggtgctgcagctgagcctcatccagacagagcagaatgattctgtgctgacagagagcgtcatccgcatcctgctgctggtgcagagccggcagaacctggtggccgaggagcggctgagcagcggcatcctgggcgccatcggcttcggcaggaagagccccctgagcaaccgcttccgggtggtggcccgctccatggccgccttcctgtctgtgcaggtgcccatggaggaccagatccggctgcggcccggcagcgagctgcacctgacccccaaggcccagcaggccctgaatgccctggagagcatggccagcagcaagcagtatgtggagtaccaggaccagatcctgcaggccacccagttcatccgccaccctggccactgcctgcaggacggcaagagcttcctggccctgctggtgaactgcctgtacccagaggtgcactacctggaccacatcagatag

SEQ ID NO: 206745 - DNA, 7740 bp, Artificial Sequence
  derived and/or modified sequence
atggccgaggccgtgaagccccagcggcgggccaaggccaaggccagccgcaccaagaccaaggaaaagaaaaaatacgaaacgccccagcgggaggagtcctccgaagtgtctctgcctaagactagtcgggagcaggaaatcccttctttagcatgtgagttcaaaggagatcatcttaaggtcgtgaccgactcccagctgcaggatgatgcatccggccagaatgaaagtgagatgtttgatgtgccccttacgtctctgacaattagcaacgaggagtccttaacatgcaatactgagccaccaaaagagggaggtgaggcccgtccatgcgtgggggactctgcagtgactcccaaagtgcatccaggagacaatgtgggcacaaaggtggagaccccaaagaactttaccgaggtcgaagaaaacatgtccgtgcagggcgggttgagtgaatcagccccacagtccaacttctcttatacccagcctgccatggagaatatccaggtccgtgagacacagaacagcaaagaggacaaacagggtttagtctgtagttctgaggttccacaaaatgtcggcctgcagagctcttgtccagcgaagcacggctttcaaacacccagggtgaagaagctgtaccctcagctgccggctgaaatcgctggagaagctcctgcgcttgtggctgtcaagccacttctgaggtccgagaggctctacccggagctgccttcgcagctagagttggttccttttacgaaggagcagctgaagattttggaaccaggtagttggctggaaaatgtggaaagttatcttgaagagtttgactccatggcacaccaggatcgacacgaattttatgagctactactcaattatagcagatgcagaaaacagctcttgctggccgaggccgagttacttactttaacatccgattgccagaatgccaagtcaagactgtggcagttcaaagaggagcagatgtctgttcaagggatttgcgctgatcaggtgaaagtcttcagctatcatagataccagcgtgtggagatgaatgagaacgccttggtggagctcaagaagcttttcgatgccaaatccgaacatctccatcagaccctcgctctccactcatatacaagtgtcctctcacgtttgcaggtagagagctacatatacgccctgctgtcctcaagcgcggtgctgaggagttccgcaatccatcagcaaggtcgagcctccaaacagacggagagtatcccatcagacctgtgccagcttaaggaatgtatttccgtcctgttcatgtttactaggcgcgtaaatgaagacacgcaatttcacgacgatattttactctggctgcagaagctggtgtccgtcctgcagcgggtgggatgcccaggggaccacctgttcctgcttaaccacatactgcgctgtccagcaggcgttagcaagtgggccgtgccatttattcaaatcaaggtattgcataatcccagtggagtctttcacttcatgcaaagcttggctctgctcatgtcgcctgtcaagaacagagccgaatttatgtgccacatgaagccatccgaaagaaagccaagtagtagcggcccaggatcaggcacatggacactagtagatgagggaggggaagaggacgaagacccagaaactagctggatcctgttgaacgaagatgacctcgtcactatcctagcgcagtttcccttccacgagttgtttcagcacctcctgggtttcaaggcaaagggcgattacttacctgagacgacaaggccgcaggaaatgatgaagatctttgccttcgccaacagtctggtagagctcctggcggtgggactggagacgtttaaccgagcacgatatcgccagttcgtgaaacgcattggctacatgatccgcatgacactggggtatgtctctgaccactgggcccagtatgtctcccacaatcaaggctccggcctcgcacaacagccatacagcatggaaaagctccaggtcgagttcgacgagctgttcttgcgggcagttctccacgtactgaaggcaaaacgcctgggcatttggttgtttatgtccgaaatgcccttcgggaccttgtctgtgcagatgttatggaagctgttctatctcatgcaccaggtcgagtctgagaacttgcagcagctcagtagtagtctgcagcccgcacagtgtaagcagcagctgcaggacccggaacactttactaacttcgaaaagtgcttgagttcaatgaactcctcagaagaaatttgtctccttacaacgttcgctcagatggcccaggcccgccggacaaatgttgacgaagacttcataaagattatcgttttagagatctacgaagtttcctacgtaacgctcagtacaagggagacattctccaaggtggggagagaactactgggaaccataactgcggtgcatcctgagatcatctccgttcttttggatcgcgtgcaagagactatcgatcaggtgggtatggtgtccctgtatctgtttaaggagctgcctttgtacctttggcaaccgtcagccagtgagatcgccgtgattcgggattggctccttaattacaacttgacagtggttaaaaataaactcgcatgtgtgatcttggagggcctcaattggggcttcgctaaacaagccaccttgcatttggatcaggccgtgcacgccgaggttgccctgatggttcttgaggcctaccaaaaatacttggcacaaaagccgtatgccggaatcctgagcgaatcaatgaagcaagtgtcatacctggctagcattgtacggtatggggaaacaccagagaccagcttcaaccaatgggcctggaacctgatcctgcgcctaaagctacataaaaacgattatggtattcaaccaaattgcccagccgtgcctttttcggtcacagtgccagacatgaccgaatctcccacattccacccactgttgaaggctgtgaaggctggaatgcccattggctgctacttggccctctctatgacagcagtgggccatagcatagagaagttctgcgctgaggggatacccctgctaggcatccttgtacagtcccgccatttacgcactgtggttcacgttctagataaaattctgccactgttttatccttgccagtattacctgttgaaaaacgagcaattccttagccacctcctgctgtttttacatctcgattctggcgtgccacagggagtaacacagcaggtcacgcataaggttgcccagcacctgacgggtgctagccacggtgacaacgtaaagttgctgaattcaatgatccaggcacacatcagcgtctcgacccagcctaatgaagtggggcccgtggctgttttagagttctgggtgcaggcacttataagccaacatctgtggtatcgggagcaacctattcttttccttatggatcacttgtgcaaagccgcgtttcagctgatgcaagaagattgcatccagaagctgttatatcagcagcataagaacgctcttggataccactgtgaccgatctcttctgtcctctttggtgtcttggatagttgctggtaacatcactccatcttttgtggagggccttgccactccaacccaggtatggttcgcatggaccgttctgaatatggagagtatttttgaggaagatagccagctgagacgcgtgatagaaggcgaactagttattaactccgcctttactccagatcaggccctcaaaaaggctcagacccagcttaaattgcccatcgtgcccagcctgcagcgcctactcatttacagatgggcccaccaggccttggtgactccttctgaccacccgttacttccactgatctggcaaaaattctttctcctgtatctccacaggcctggaccccagtatggtctgccaatagatggttgcatcggacgaaggttcttccaatccccagcgcatatcaacttgttgaaagagatgaagagacgccttactgaagttgcggacttccaccatgctgcaagcaaagcccttcgcgtccctgccgagggctccgagggacttccagagtctcattccggcaccccagggtatctcaccagtcctgagctgcataaggagttggttcgactttttaatgtatacattctttggctggaagacgaaaacttccaaaaaggggacacctacatcccgagcctgccaaagcactatgatatccaccgtctagcgaaggtgatgcagaatcagcaggacttatggatggaatatctgaatatggaaaggatttaccacgaatttcaggaaacggtaggcctgtggactcaggctaagctcgagtctcatagtacgccttgttctctgtctgtgcagcttgatttcacagatcccctgctggcaaaggagagagtgttgtccaacttgcgcaaacatgaagcaccacaaccaccgcttgcccttcatcctaccaagcctcctgtccccgtcatcagctcagcagtgctcttgtctcagaaagatgcgacccagttggtgtgcacggatctgaacttgctgcagcagcaggctcgtaccgcagcgttgcgggagtcacagcaggtggcactggatggcgagcttttggacacaatgcctaagcagtatgtcaaccgcgaggagcagactactctgcatttagagtgccgtggatcgtccgggaaaaaatgccaaggggcagcagttgtgactgtgcagtttgagggcatgcataaaaatgaagccatctcacagcaactccatgtcctgcgtaaagaagttaagcagctgcaggctgaagctgccaaaccgccatctctgaacatagtcgaggccgccgttcacgccgagaatctcatcactgcactggtcaatgcctataagttgcagcccactccggggatacagaaggttggcatatctcttttttttactattgttgattatgtctccgacgagacacagcgccaccccccgacgcggcagttttttacttcctgcatagaaatcctgggccaggtcttcatcagtgggatcaaatccgagtgtcgtaaggtgctggaaactatactcaagaactcaagattgtgctcccttctctcacctttttttactccgaacgctgcccccgccgagttcatccagctgtacgagcaggtggttaagtttttgtcggaagacaatagcgatatgatcttcatgctactcacgaagttcgatctaaaacagtggctgtctgccactaaaccgcccctgtcagaccggactcggttgcttgagtcgatccacctggctttgacagcgtggggtcttgaaccagatgaagacatcctaatgccattcaacctgttttgtaagcactggacctacctgctcttataccagttcccggatcagtactcggacatcctccggctccttatgcagtcctcagccgagcagctgctctcacctgagtgctggaaggcaactctgagagccctcggatgctgcgctccgagttgccaacagggagcagcatcgactgagggtgccgttttgccctctagtagcgatgctcttttgtccgataaacaggtgatggagactatacagtggctgagcgactttttttacaagctgcgtttgtctaaaatggattttaagtcttttgggttgttttcgaagtggagtccctatatggcggatgtcaagacatttctcggatacttagtgaagagacttatcgacctggagatgacctgtctcgctcaggatcctaccgctagcaggaagaccgtcctcaaatccctgcattccgtgatcatacagctttttaaaccctggattctggttctcgaggacaatgagtcttcccagcagaggcactatccgtggctggaatctgacacagtagtggcctcaagcatcgttcaactgttcacggactgtattgacagtctgcacgaatcgttcaaggataagctgcttcccggggacgctggagcactgtggctccacctcatgcactactgtgaggcctgcaccgcccctaaaatgcccgagttcattttatatgcctttcactcaacctatcgtaagctgccttggaaggatttgcatcccgaccagatgcttatggaagcattctttaaggtggagaggggcagtcctaagtcatgtttcctgttccttggaagtgtgctgtgcgaagtgaactgggtgtccgtgctgtctgatgcatggaactcttcgccccatccagaaacgcgctccatgatagtgtgtcttcttttcatgatgattctactggctaaagaagtgcaacttgtggaccagacggactcaccgttactctcactgttagggcagacatcctcgcttagctggcatctcgtggatatcgtttcatatcagagtgtcctcagctatttttcctcccactacccccctagcattatcctcgccaaggagtcgtacgcggagctcatcatgaagctcttgaaggtgtctgccggattgtcgatacccacggacagccagaaacacctagacgcagtgccaaaatgtcaagcctttacacaccagatggtgcagtttttgtccactttagagcagaacgggaagattacccttgccgtattggagcaagagatgagcaagctcctcgatgacataatcgtctttaatccaccagatatggacagtcaaacgaggcacatggccctgagcagcctgtttatggaggtcctcatgatgatgaacaatgctaccattccaacagccgagttcctaaggggcagcatccgcacgtggatcggtcagaagatgcacgggctggtcgtgctgccacttcttactgccgcctgccagtcactcgcctcagtgaggcacatggctgaaactactgaggcctgcattacagcttactttaaggaatctccactgaatcagaacagcggctggggtcctatcctggtctcgctgcaggtgccagagctgacaatggaggaatttttgcaggaatgcctgaccctcggaagttacctcacgttgtatgtgtacctgctccagtgcctgaactccgagcagactctacgcaacgaaatgaaggtcctgctgattctaagtaagtggctggagcaggtatatcctagttccgtcgaggaagaggcaaaactcttcctctggtggcaccaggttctgcagctgagtttaatccaaacagaacaaaacgactcagttctgactgaatccgtgattcggatcttactcctcgtccagtcccgtcagaacctcgtggccgaggaacggctgtcaagcggtatactgggagcaatcggctttggtagaaagagcccgctgtctaaccgcttcagggtggttgctcggagtatggcagccttcctgagcgtacaagttcccatggaggaccagattcgtttgagaccagggagcgaattgcacctcactcctaaagcccagcaggctttgaatgccctggagagcatggcttcttcgaagcagtatgtggaataccaagaccagatcctgcaggcgacgcagtttatcagacatcctggccattgcctccaggatggtaagtcattcctcgccctgctggtgaattgcttgtatcctgaggtgcattatctagatcatatccggtag

SEQ ID NO: 206746 - DNA, 4071 bp, Artificial Sequence
  derived and/or modified sequence
atgatccaggcccacatcagcgtgagcacccagcccaacgaggtggggcctgtagcagtgttggagttttgggtccaggccttgattagccagcatctctggtaccgcgagcagcccattctctttctgatggatcatttgtgtaaagcggccttccagctaatgcaggaggactgcatacagaaattgctttatcagcagcataagaacgcactgggataccactgcgatcggtctctcctgtcgtcgctggtgtcctggatcgtcgccggaaacataacccctagtttcgtggaaggattagcaaccccaacacaagtgtggttcgcttggactgtgctcaacatggaaagtatatttgaggaggattctcagcttcggagagtcattgagggagaactcgtgatcaattcagccttcacccctgatcaggccctcaagaaggcgcagacccagttgaaattgccgattgtgcccagcctgcaacggctgctaatatacagatgggctcaccaggcccttgtgactccatccgaccaccccctgctgcctctgatatggcaaaagtttttccttctgtatctccatcggccagggccccaatatggcttgcccattgacgggtgcatcgggcgacggttctttcaatcaccagcacacataaatttactgaaagaaatgaagcgtagattaacagaggtcgcagactttcatcacgccgcgtccaaggcgttacgagtgccagctgagggaagcgagggtcttcctgaatctcatagcggcacacccggctacctgacctctcctgaacttcacaaagagcttgtacggctgttcaacgtatacatcctgtggctggaggacgaaaattttcagaaaggggatacttacattccctcgcttccaaaacattatgacatacaccggctggctaaggtaatgcagaatcagcaggacttgtggatggagtatctcaatatggaaaggatctatcatgagttccaggagactgtgggtctctggacgcaggccaaactggaatctcactcaaccccttgttctctgtcagtgcagctcgattttactgacccactcttagcgaaagaacgagtcttaagtaacctgagaaaacacgaggccccacagcccccccttgcactacatccaaccaaacctcccgtccccgtaatatcaagcgcggtgctactgagccagaaggacgccactcaactggtgtgtaccgacctgaatctgctacaacagcaggccagaactgcagctctgcgagaatcccagcaggttgccttggacggggaattactcgacacaatgccaaagcagtacgtgaaccgcgaagaacagaccacattgcacctggaatgtcgagggtcttccgggaaaaagtgtcaaggcgccgctgtcgttaccgtgcagtttgaaggaatgcataaaaatgaggccatcagccagcagctccacgtattgcgcaaagaagtcaaacaattacaggccgaggccgcgaagccgccctcattaaacatcgtggaagctgcagttcacgcagagaacctcataacggctctcgtgaatgcgtataaactccagcctacgcctgggatccaaaaagttgggataagcttgttctttaccatagttgattacgtatccgatgaaacacaacggcatccacctaccagacagttttttactagctgcattgagatcctgggccaggtgttcatttccgggataaaatctgagtgtcggaaggtgctcgaaacaatcctgaagaatagccgcctgtgctctctcttaagtcctttttttacacccaacgccgcacccgctgaatttatccagttgtacgaacaggtggtgaaatttctgtccgaggacaactcggacatgatcttcatgctcctgactaagttcgacttaaagcagtggctgtctgcaacaaagccccccctcagcgacagaacaaggctgctggaaagcatacatttggcccttaccgcttggggactggaacccgacgaagacatccttatgcctttcaacctattctgcaagcattggacctatctacttctttaccagttccctgaccagtattccgacattctgagattactaatgcagagctctgccgaacagcttttaagtcccgaatgttggaaggccaccctgcgggcactagggtgctgcgcccctagctgccagcaaggggctgcctccaccgagggggctgtgctgccctcctcttccgatgctttgctgtcagacaagcaagtgatggagactattcaatggctctctgacttcttttataagttacggctgtccaagatggatttcaagagtttcgggttgttcagtaaatggtctccgtatatggcggatgtcaaaacgtttcttggttacttagtgaaaagactgatcgatctggaaatgacgtgtcttgcccaggatcctacggccagccgcaaaactgttctgaagtccctccatagtgtaatcattcagctattcaagccgtggatccttgtgctggaggacaacgagagctcccaacagcgtcactacccttggttggagtcagatacagtggtcgcctctagcatcgtacagttgttcacagactgcatcgatagtctgcacgaaagtttcaaggacaaactgcttcctggtgacgcgggcgccctgtggctgcatctaatgcactactgtgaggcatgcacagctcccaagatgcctgagttcattctgtatgctttccactcaacatatcgaaaattaccctggaaggatctccatcctgatcagatgctgatggaagcgtttttcaaggtggagcgagggagtcctaagtcatgctttctctttctgggttccgtgctctgtgaagtgaactgggtttctgtgctgagcgatgcctggaacagctccccacatcccgagacaaggagcatgatcgtatgcctacttttcatgatgattctgctggccaaagaggttcagttggtcgatcagaccgactcacccttgctcagtctcctgggacaaacaagttccttatcatggcatctggtggacatagtttcttatcaatccgtgctgagttacttttctagccactaccctccaagtattattctggcgaaggagtcttacgcagagctgattatgaagctgctgaaggtgtccgctggcctttctatcccaacggacagccagaaacacctggatgctgtgcctaaatgtcaggccttcacacatcagatggtccagttcctgtctaccctggaacagaatggaaagatcactctagccgtccttgaacaagagatgagtaagttgcttgatgacatcatcgtgttcaacccgcccgatatggactcacagacaaggcatatggctttgagtagcctcttcatggaggtcctaatgatgatgaacaatgctacaattcccacggctgaatttctgcgcggctccatccgaacctggatcggacagaagatgcacggactggtggtgctgccccttttgacggccgcttgccagagtctagcatccgtccgccacatggccgaaactaccgaagcttgtataactgcctactttaaagaaagcccactcaatcagaatagcggttggggcccaatcttggtgtccctgcaggttcccgaactgacaatggaggaattcctgcaggagtgcctgactcttggctcctacctgacattatatgtgtacctgttgcagtgcctgaactcagagcagaccttacggaacgagatgaaagttctgctgatcttgagcaaatggctggagcaggtctatccttcttctgtcgaggaggaagccaagctattcctgtggtggcatcaggtcctccagctcagcctgattcagactgaacagaatgattcggtattaacggaatccgtcatccgcatccttctgctggtgcagtcaaggcagaatcttgtggctgaagagcggctgtccagtggcattctgggggcgatcggttttggaagaaagtccccactgtccaataggtag

SEQ ID NO: 206747 - DNA, 1524 bp, Artificial Sequence
  derived and/or modified sequence
accacccccgtggagcggggcagccccaagagctgcttcctgttcctggggtccgtgctgtgcgaggtaaactgggtctctgtcttgagcgatgcttggaactctagcccccacccggagaccaggtccatgatagtctgcttgctctttatgatgatcttgctggcgaaggaggtccaactagtggaccaaaccgactctccactgttgtcgctactgggccagactagcagcctgtcatggcatttggtcgacattgtaagctatcaatcagtattgagctactttagctcccactatccgccctccatcatcctcgccaaggagtcatacgcagagctcatcatgaaactgctgaaagtgtctgccggtctctcgatccccacagacagtcagaagcacctggatgcagtcccgaaatgtcaggcattcacgcaccaaatggtccagttcctgtccactcttgaacagaatggcaaaataactctggcagttctggaacaagagatgagcaaactattggacgatataatcgttttcaatcctcccgacatggactctcagacgagacatatggccctctcaagcctgttcatggaagtcctgatgatgatgaacaacgcaaccattccaacggctgagttcctcaggggcagtatcagaacctggatcggccagaagatgcacgggctcgtcgttctgcctctcttgacggctgcgtgtcaaagcctcgcctctgttagacacatggcagagactacagaggcctgtattaccgcatattttaaagaaagccctttgaaccaaaacagtggctgggggcctattctcgtgagtttgcaggttcctgagctaacgatggaggagttcctgcaggaatgcctcaccctgggctcatatctgaccttgtatgtgtaccttttgcaatgtctgaactccgagcagactctgcgaaacgaaatgaaggtgttgctaatcttgtccaaatggttggaacaggtttatccctcctcagtggaagaagaggctaagctgtttctgtggtggcatcaggttctgcagctgtccctcatccaaaccgagcaaaatgattctgtgctgaccgaaagtgtgataagaatactcctcctggtccaaagcagacagaacctcgtcgccgaagagcgcctctcgtccggcatactcggcgccatcggctttgggaggaagtctcctttatccaaccggtttcgggtcgtcgctcgtagcatggctgctttcctgagcgtgcaggtgccaatggaggatcagatcaggctccgtccgggcagcgaactgcacctcacccctaaagcacagcaggccctgaacgctctagagtctatggcaagcagcaagcagtacgttgaatatcaggaccagatcctgcaagcaacccagttcattaggcacccaggacattgcctgcaagacggaaaatcattcctcgcactcctcgtaaactgcctttaccctgaggtacactatctcgatcacatcaggtag

SEQ ID NO: 206748 - DNA, 7740 bp, Artificial Sequence
  derived and/or modified sequence
atggccgaggcagttaagccacaacggagagctaaagccaaggcctcccgtaccaagacaaaggagaaaaagaagtacgagactccacagcgggaggaatcatctgaagtgagtttgccgaaaacatcaagagaacaagaaattccatccctggcctgtgagttcaaaggggaccaccttaaggtggtcacggactcccagttgcaggacgatgcctccggccagaacgagagcgaaatgtttgacgtaccactcacctccctgaccatctccaacgaggagtctctaacctgcaataccgaacccccaaaggaaggaggcgaggccagaccgtgcgtcggagattcggctgttacgccaaaggtgcacccaggcgacaatgtggggaccaaggtagagactcctaaaaacttcacagaagttgaagagaacatgtcggttcagggcggactgtccgagtcggccccacagtctaatttctcttatactcagccggctatggagaatatccaggtgcgggagacacaaaacagcaaagaggataagcaggggcttgtctgttcatccgaagtgcctcagaacgtcggtcttcagtcaagctgcccggctaagcacggattccagacgccacgtgtgaagaagctctacccacaactccccgcagaaatcgccggtgaggccccagccttggtggccgtgaaaccccttcttagatcagaaagactatacccggagctaccatcacaattagagctagttcctttcaccaaggaacagctcaagatcttagagccaggatcctggttggagaacgttgagagctatctggaagagtttgactctatggctcaccaggaccgccacgagttttatgagctcctgctaaactatagcagatgcaggaagcagctgctgctcgccgaggcggagctactgaccctgacgtccgactgtcagaacgcaaaatctagactgtggcagttcaaagaggagcagatgtctgttcaggggatttgcgctgatcaggtcaaggtttttagctaccacaggtatcaaagagttgagatgaatgagaatgctttggtcgaactaaagaagctgtttgatgcaaaatccgagcacctgcaccagacgctggctctgcatagctacacgtcagttctttctcgcttacaggtggagtcctatatttatgccttgctatcaagctccgctgtgcttcggagctcagccattcaccagcagggcagagcatccaaacagaccgagtccatcccctccgatctgtgccaattgaaggagtgtatttcagtacttttcatgttcacaagaagagtaaatgaagacacgcagtttcacgatgatatactgctgtggttgcagaaattggtttctgtgttgcagcgagtcggatgtccaggggatcatctgtttctcctgaatcatatcttgcgatgtcccgctggcgtttcaaagtgggccgtgccattcatccagattaaagtgcttcataatccgagcggcgtgtttcacttcatgcagagcctggcgcttcttatgtccccagtgaaaaatagggcagaatttatgtgtcatatgaaaccgagtgagcgtaaaccctcctcgagtggtcccggttcaggcacctggactctggtggatgaagggggtgaagaggacgaggaccctgagacttcttggatccttctgaacgaagacgacttggtgacgatcctggcccagttcccttttcacgagctgtttcagcacttgctgggattcaaagccaagggggattacttgcccgaaaccaccagacctcaggagatgatgaaaatatttgcctttgccaattctctcgtcgaattgctggctgtgggattggagacatttaaccgcgcacggtacagacaatttgtcaagcgcatcggctacatgatccgtatgaccctcggctatgtgtccgatcactgggcccaatatgtctcccacaatcaagggtctgggcttgctcaacagccctattctatggagaaacttcaggttgagttcgatgaattgttcttgcgtgctgtgctccacgtgttaaaagctaagcgtctcggaatctggttgttcatgagtgagatgccattcgggacactttcggtgcagatgttgtggaagctcttctatctcatgcatcaagtcgaatccgaaaatctccagcagctctcctccagtctgcagcctgcacagtgtaagcagcagcttcaggatccagaacactttactaattttgagaagtgcctctcatctatgaactcttcagaggagatttgcttgcttacgacatttgcacagatggcacaggccagacgaacaaatgttgatgaagatttcatcaagatcattgtgctggagatttatgaagtcagctacgtgaccttgagcacacgggaaacatttagcaaagtggggagggaactactcggtaccattacggctgtccatcctgaaatcatctccgttctactggacagggtgcaggagactattgatcaggtcggcatggtctccctttacctattcaaagagcttcccctttacctctggcaaccaagtgcctcagaaatagcagtgattcgtgattggttactgaactacaacctgactgttgtgaagaataaacttgcatgtgtgatactggagggactgaactggggtttcgcaaagcaggccacgcttcacctggatcaggcggtccacgccgaagtggctttgatggtccttgaagcctaccagaagtacttggcgcagaagccctatgccggaatcctcagtgaaagcatgaaacaggtgtcgtacttagcatcgattgtgcgttacggtgaaacccctgagacctcattcaatcagtgggcgtggaatttgatactgagattaaaactccacaagaacgattacggtatccaacccaactgccctgccgtgccattctctgtgacagttccggacatgactgagtcacctaccttccaccctctccttaaagccgtgaaggcaggaatgcccattgggtgttatttggctctttccatgacagccgtaggccactccattgaaaagttctgtgctgaagggattcctctgctagggattcttgtgcaatcgagacacttgcgtacagtcgttcacgtccttgacaagattctcccactgttctacccctgccagtactatctcctcaagaatgagcagttcctgtctcacctcctcctttttctgcatcttgactccggcgtcccccagggagtgacccagcaggtcacccacaaagtcgcgcagcacctcacaggggcaagccatggggacaacgttaagctgttaaattcaatgatccaagcccatatcagcgtctcaacacaaccgaacgaggtcggtccggtcgccgttctcgagttctgggttcaagctctgatctctcagcacctttggtatcgcgagcagcccatcctgttcctgatggaccatctgtgcaaagccgctttccagttgatgcaagaagattgcatccagaagctgctatatcaacaacataagaatgccctgggctaccactgtgaccggtctctactgagttctctggtgagttggattgtcgccggaaacattactcctagtttcgtggagggattggctaccccaacacaagtgtggtttgcctggaccgtgttgaacatggaaagtattttcgaagaggattctcaactgagacgggtgatcgagggagaactggtaatcaattctgccttcacccctgatcaggctctgaagaaagcccagactcagttaaagctgccaatcgtgccctcattgcagaggctcctcatttaccgctgggcccatcaggccctcgtcactcctagcgaccaccccctcctgcccctgatatggcaaaaattttttctactgtacctgcacagacctggtccacagtacgggctgcccatcgacggctgtatcgggaggcggttctttcagagccccgcacacatcaatcttctgaaggaaatgaagcggagactcactgaagtcgctgactttcaccacgctgccagcaaagcactcagagtcccagctgagggctccgaagggttacccgaaagtcactcaggcacacccggatacttgaccagccccgagctgcacaaggagcttgttcgacttttcaacgtgtatatcctttggttagaagacgagaactttcagaagggagatacttatataccaagcttgcccaagcattacgatattcaccgactcgcaaaggtgatgcaaaatcaacaagacctgtggatggaatatctcaatatggaacggatctatcatgagttccaggagaccgtgggactctggacacaggccaagctggagtctcactccacaccctgctccctgagtgtgcagcttgacttcactgacccactgctcgccaaggagagagtccttagcaacctgcgaaaacacgaggcaccacagcctcccttagccttacatcctacgaagccccctgtgcctgtaatatccagcgcagtactgttatcccaaaaagacgccacccaactcgtttgcactgatctaaacctgcttcagcaacaggcccgtaccgctgcactccgcgaatctcaacaggtcgcgctggacggtgaactcctggatacgatgcccaaacagtacgtgaacagagaggagcagactaccctgcacctggagtgtaggggttccagcggaaaaaagtgccagggcgctgccgtcgtgacggtgcagttcgaaggaatgcacaagaacgaagccatctcccaacagctgcacgtgttacgcaaggaggttaagcaactgcaagccgaggccgctaaaccgccttccctgaatattgttgaagccgctgttcacgcggagaacctcatcacggccctcgtgaacgcctacaagcttcagcctacgccaggcatccagaaagtgggtatttccttattctttacgatcgtggattacgtgtcagatgaaacccaaagacacccacctactaggcagttttttacttcctgtatcgagatcctgggccaggtctttatcagcggcattaagtccgagtgtaggaaggtgctggaaacaatcctgaagaatagtaggctgtgttccttactttcccctttctttaccccgaacgccgcacctgccgagttcattcaactttatgaacaggtggtcaaattccttagcgaggataactcagacatgatcttcatgctgttgacaaaattcgatctgaagcagtggttgagcgcgacaaaaccccctctttctgaccgtacccgcctgctggaatccattcatttggctctaaccgcttggggccttgagcccgacgaggatattctgatgccatttaatctcttctgcaagcattggacttatctactactgtaccaattcccagatcagtacagtgacattcttaggttactgatgcaatcttctgccgagcagcttctctctcctgagtgctggaaagccacactccgtgccctgggctgttgtgccccatcctgccagcagggagcagcatccacagagggtgcagtgctgccatcttcatccgatgcactgctttccgacaagcaggtaatggagaccatccagtggctcagcgatttcttttacaagctgaggcttagtaagatggacttcaagtcttttggtctgttctctaaatggagcccttacatggcggacgtaaagactttcctcggctacctggttaaacggttaatcgacctggagatgacctgcttagcacaggaccccactgccagtagaaaaactgttctgaagtctttgcattcggtgattattcaactgttcaaaccttggattctggtgcttgaggataatgagtccagtcaacaacggcactatccatggctggagtctgatacagttgtggcctccagcattgtccagctgttcacagactgcatagacagcttgcatgaaagcttcaaggacaaactgctgcctggcgatgcgggtgccctgtggctacacctgatgcattactgtgaagcttgcacagcgccaaaaatgcccgaatttatcctctacgcattccacagtacatatcggaagttgccatggaaggatcttcacccagaccaaatgctcatggaggccttctttaaagtcgagcggggttccccaaaatcgtgtttcctctttctgggcagtgtcctatgtgaagtgaactgggttagcgttctgtccgatgcttggaacagctcaccacaccctgagacgaggtccatgatcgtgtgtctgttatttatgatgatcctgttggccaaagaagtccagcttgtcgatcagactgactcgccgctcctctctctgctgggacagacttcctccctgtcctggcacttggtagatatagtgagctatcagagtgtcctctcttacttcagctcacactacccgcctagcatcatattagcgaaagagtcctacgccgaattaatcatgaaactgttgaaagtaagcgctggtctcagcatacccactgactcccagaagcacctcgacgctgtgcccaagtgtcaagcctttacgcaccagatggtgcagtttctgagcacactggaacagaatgggaaaattaccctagcggtgctggaacaggaaatgtccaagctgcttgatgatattatagtgtttaaccccccagatatggatagtcaaactcgccacatggccctctccagtctgtttatggaggtgcttatgatgatgaataatgcaaccatccccactgccgaatttcttagaggctcaattagaacgtggatcgggcaaaaaatgcacgggcttgttgtcttgcctctgcttaccgcggcatgtcagagcctggcatccgtccggcatatggctgagacaacggaagcttgtattactgcttattttaaggaatcaccgctgaatcagaactccggctggggacccatcctagtgtctctgcaagttccagaacttacaatggaggagttcttacaggagtgcctgacactgggatcgtatctgacactttacgtgtacctgttacagtgtttaaattctgaacagacactgaggaacgagatgaaggttctccttatcctgtcaaaatggcttgaacaggtgtatccttccagcgtcgaggaggaagccaagcttttcctctggtggcatcaagttctccagctctccctcatacagactgagcaaaatgactctgtgctgacagaatccgtcataaggatcttgcttttggtgcagagccgccagaatctggttgcggaagaacggttgagttcgggaatcctgggtgctatcgggtttggtagaaaatctccgctgagcaatagattccgggtagtggctcgatccatggccgctttcctttctgtgcaggtgcctatggaggaccagataagacttcggccaggatctgagttgcacctcacccccaaggctcagcaagccctgaacgccctcgagtctatggcatctagcaagcagtacgtagagtatcaggaccaaatactgcaggcaacccaatttattcgacaccccggtcattgtcttcaggacggaaagtcttttttagcactactggttaattgtctgtaccctgaggtccactacctggaccacattcggtac

SEQ ID NO: 206749 - DNA, 4071 bp, Artificial Sequence
  derived and/or modified sequence
atgatacaggcacacatctccgtttccacccagccaaacgaggtggggcctgtagccgtgctcgagttttgggtgcaagccctcatttcacagcatctctggtacagagagcagcccattctctttctaatggaccatctgtgcaaagctgccttccagctgatgcaggaggactgcatccagaaactgctgtatcagcagcacaagaatgccctgggctatcattgcgatcggagtctgctgtcctccctggtgagttggatcgtagccggtaatatcacgccttctttcgtggaaggactggccaccccaactcaggtctggttcgcatggaccgtacttaacatggaaagcattttcgaggaagattcgcagctccgcagagtgattgaaggtgaactggtgattaactccgcttttacccctgatcaagccctcaagaaggctcagactcagctgaagttgccgattgtccccagcctacaacggcttctgatttacagatgggcccatcaggctctggtaaccccatctgatcacccacttctgcctctaatctggcagaagtttttcctcctttaccttcacagacccggaccacaatacggtttgcccatcgacggctgtataggacgtcggttcttccaaagtccagcccacattaatctgcttaaggagatgaagcggagactcaccgaagtggccgattttcatcacgccgctagcaaagctttgcgggtgcccgcagaaggctctgaaggtctccctgagtcccacagcggaacaccagggtatttgactagccccgaactgcataaggaacttgtcaggcttttcaacgtttatatcctctggctggaggatgagaatttccagaaaggagacacttatataccctctctccctaagcactacgacattcacagactcgccaaggtgatgcagaatcagcaggacctgtggatggaatatttgaacatggagcgtatttaccacgagttccaagagactgttggcttgtggacccaggcgaaactcgaatcccattccaccccctgcagcctcagcgtccagttggacttcactgaccccctgctcgcaaaggaacgcgttctctccaatctgaggaaacacgaagctccccaacccccactcgccctgcatccaactaaaccacctgtgccagtgatctcctcagcggtcctgctgagtcaaaaggatgccactcagttggtgtgtaccgatctgaacctgctccagcaacaggcgcgaaccgcggcattgcgcgagagtcaacaggtcgccctggacggagaactgctggataccatgccaaagcaatacgtgaacagggaggagcagaccacgctgcatctggaatgtagaggcagcagcgggaagaagtgccagggcgctgccgtggttaccgtccagtttgagggcatgcataagaacgaagcaattagtcagcagttgcacgtgctacgcaaagaggtgaagcagttgcaggctgaagctgctaaacccccttccctcaacatcgtggaagctgcagttcatgccgaaaacctgataacagcccttgttaacgcatacaagttacagccaaccccgggaattcaaaaagttgggatctctctgttctttacgatcgttgactatgtttcggacgagacccaacggcatcctccaactagacagttcttcacatcgtgtatagaaattctgggccaagtgtttataagcgggatcaaatccgaatgccgaaaagttctggagaccatcctcaagaactcacgactatgctctctgctcagccccttttttaccccgaacgctgccccagcagagtttatccagctctacgagcaggtggtcaagttcctttccgaagacaattctgatatgattttcatgttgctcactaagtttgatctgaaacagtggctttccgctacgaagcctcctttgagcgatcgaacaaggctgttggagtcaatccatttggctctgactgcttggggacttgaacctgacgaggacattctcatgcctttcaacctgttctgcaaacactggacctacttgctactttaccagtttcccgatcagtattcagatattcttcgactgctcatgcaatcgtctgcagagcagttgctgtcaccagaatgctggaaggctacactgcgggcactcggctgctgcgcaccaagctgtcagcaaggggcagcatctaccgagggcgctgtgctgcccagctctagtgacgccctgcttagtgataaacaggttatggaaactatccagtggctttctgattttttttataaattacggttgtccaagatggactttaaaagctttgggctgttttccaaatggtccccttacatggctgacgtcaaaaccttcctggggtatctggttaagcgcctgatcgatctggagatgacatgcctggcccaggatcccaccgccagcaggaagaccgtgctgaagagcctgcattccgtcataattcagttattcaaaccttggatactcgttctcgaggataatgaatcaagtcagcagcgtcactatccttggctggagagcgatactgttgtggctagctccattgtccaattatttactgattgtattgacagcttgcacgagtccttcaaggataaattgctacccggagacgcgggagctctgtggctccacctcatgcattattgtgaggcttgcacagcaccgaagatgcccgagttcattctctatgcttttcactcaacttatagaaaattgccatggaaggatctgcatcctgatcagatgctgatggaggctttctttaaggttgaaagaggaagcccaaaatcatgcttcctgtttctggggagcgtcctgtgcgaagtgaactgggtctccgtcctgtctgatgcttggaatagcagtccccatccggaaacacggtctatgattgtctgtctcctgttcatgatgatactactggctaaagaagtacagttggtcgaccagacagattccccattgctgtctctcctgggtcagacaagttctctgtcatggcacctcgtagacattgtctcttaccagtctgttttgagttacttttctagtcattatcccccaagcatcatcctagccaaagaaagctatgccgaacttattatgaagctgctcaaagtgagcgcgggactctctattcccacagactcccaaaagcacctggatgcagtgccgaaatgccaagccttcacccaccagatggtacagtttttgtctactctggagcagaacggaaagattactctcgcagtgctggagcaagagatgtccaagttgctggatgatataatagtgttcaacccccctgatatggattctcagaccagacacatggcgctaagctctctcttcatggaagtcctgatgatgatgaacaatgcaactatccccacagcagagttccttcggggatctatccggacgtggattgggcagaaaatgcatgggctggttgttctgccccttctgacagcagcctgccagtccttggctagtgtgaggcatatggcagagaccacagaagcctgcatcactgcctacttcaaggagagcccccttaatcagaacagcggttggggcccaatacttgtctccctccaggttcccgaactcactatggaagagttcttacaggagtgcctcacactgggaagctacctcactctctacgtttaccttctgcagtgtctgaattccgaacaaacactacggaacgagatgaaggtgttgctgatcctgtccaagtggctggaacaggtgtacccatcttccgtggaagaggaggcaaagctcttcctgtggtggcaccaggtgttacaacttagcctgattcagacagaacagaacgacagcgtgctgacagagtcggttatcagaattctgctccttgtgcagtctcggcaaaatctggtggccgaggagagactttctagtggaattctgggtgctatcggcttcgggagaaagagcccactgagcaacagatag

SEQ ID NO: 206750 - DNA, 1524 bp, Artificial Sequence
  derived and/or modified sequence
acaacacccgtggagcgcggaagtccaaaatcgtgctttctcttcctcgggagtgtgctgtgtgaagtgaactgggttagcgtattgtctgatgcttggaattccagcccccatcccgagacgcgatccatgatcgtttgcttattattcatgatgattctccttgcgaaagaggtgcagctggtagaccagactgatagcccactcctcagtctgctcggacagacaagtagcctatcttggcacttggtggatatcgtgagttaccagagcgtcctgtcctatttctccagtcattaccccccatcgatcatcttggcaaaggagagctatgccgaactcatcatgaagctcctgaaggtgagcgcaggcctgagcattcccaccgattctcagaagcatttggatgccgtgcccaagtgtcaagctttcacgcaccagatggtgcagtttctcagcacactggaacaaaacggaaaaatcactctcgccgttctagagcaagaaatgtctaagctgctagacgatataattgttttcaatcctcccgacatggattcccaaactcgacatatggccctctcctccctttttatggaggtgctgatgatgatgaacaatgctactatcccaacagccgaatttctccgtggcagcatcaggacatggatcggccagaagatgcacggactggtggttcttccactactgaccgccgcatgccagtcgttggcctcagtgagacatatggctgagactaccgaggcctgcattacagcctactttaaagaaagcccactcaatcagaactctggctgggggccaattttggtgtccctgcaggtgcccgagctcacaatggaggaattcctgcaagagtgcctgacgctgggttcgtacctgaccttgtatgtctacctgctgcagtgcctgaacagcgaacagaccctgcgtaatgagatgaaggttctgctgatactgagcaagtggctggagcaggtctacccatcctcggttgaggaggaggccaaactatttctatggtggcatcaggtgctccaactatcgctgatacaaacagagcagaatgactcagtcttgactgagagtgtgataagaatcctcctcctcgtccaatcacgacagaatctcgtggccgaggaacggctgtcctctgggatattaggagccattggctttgggagaaagtcaccactgtctaatagattcagagttgtggctagatccatggccgcattcctatcagttcaagtgccgatggaagaccagattcgtctgcgtccgggatccgagcttcacctgaccccaaaggcacagcaggctcttaatgcactggagtcaatggcttccagcaaacaatatgtcgaatatcaggatcagattttgcaggctacacagttcatccgacatcccggacactgcctccaagatgggaaatccttcctcgctctgctggtgaactgcctgtacccggaggtgcactatctggaccatataaggtag

SEQ ID NO: 206751 - protein, 579 aa, Artificial Sequence
  derived and/or modified sequence
MNTAPSRPSPTRRDPYGFGDSRDSRRDRSPIRGSPRREPRDGRNGRDARDSRDIRDPRDLRDHRHSRDLRDHRDSRSVRDVRDVRDLRDFRDLRDSRDFRDQRDPMYDRYRDMRDSRDPMYRREGSYDRYLRMDDYCRRKDDSYFDRYRDSFDGRGPPGPESQSRAKERLKREERRREELYRQYFEEIQRRFDAERPVDCSVIVVNKQTKDYAESVGRKVRDLGMVVDLIFLNTEVSLSQALEDVSRGGSPFAIVITQQHQIHRSCTVNIMFGTPQEHRNMPQADAMVLVARNYERYKNECREKEREEIARQAAKMADEAILQERERGGPEEGVRGGHPPAIQSLINLLADNRYLTAEETDKIINYLRERKERLMRSSTDSLPGPISRQPLGATSGASLKTQPSSQPLQSGQVLPSATPTPSAPPTSQQELQAKILSLFNSGTVTANSSSASPSVAAGNTPNQNFSTAANSQPQQRSQASGNQPPSILGQGGSAQNMGPRPGAPSQGLFGQPSSRLAPASNMTSQRPVSSTGINFDNPSVQKALDTLIQSGPALSHLVSQTTAQMGQPQAPMGSYQRHY

SEQ ID NO: 206752 - protein, 1309 aa, Artificial Sequence
  derived and/or modified sequence
MAQVPGEVDNMEGLPAPNNNPAARWESPDRGWEREQPAASTAAASLFECSRIKALADEREAVQKKTFTKWVNSHLARVGCHIGDLYVDLRDGFVLTRLLEVLSGEQLPRPTRGRMRIHSLENVDKALQFLKEQRVHLENVGSHDIVDGNHRLTLGLVWTIILRFQIQVIKIETEDNRETRSAKDALLLWCQMKTAGYPEVNIQNFTTSWRDGLAFNALIHRHRPDLVDFSKLTKSNANYNLQRAFRTAEQHLGLARLLDPEDVNMEAPDEKSIITYVVSFYHYFSKMKALAVEGKRIGKVLDQVLEVGKIIERYEELAAELLAWIHRTVGLISNQKFANSLSGVQQQLQAFTAYCTLEKPVKFQEKGNLEVLLFSIQSKLRACNRRLFVPREGCGIWDIDKAWGELEKAEHEREAALRAELIRQEKLELLAQRFDHKVAMRESWLNENQRLVSQDNFGYELPAVEAAMKKHEAIEADIAAYEERVQGVAELAQALAAEGYYDIRRVAAQRDSVLRQWALLTGLVGARRTRLEQNLALQKVFQEMVYMVDWMEEMQAQLLSRECGQHLVEADDLLQKHGLLEGDIAAQSERVEALNAAALRFSQLQGYQPCDPQVICNRVNHVHGCLAELQEQAARRRAELEASRSLWALLQELEEAESWARDKERLLEAAGGGGAAGAAGAAGTAGGAHDLSSTARLLAQHKILQGELGGRRALLQQALRCGEELVAAGGAVGPGADTVHLVGLAERAASARRRWQRLEEAAARRERRLQEARALHQFGADLDGLLDWLRDAYRLAAAGDFGHDEASSRRLARQHRALTGEVEAHRGPVSGLRRQLATLGGASGAGPLVVALQVRVVEAEQLFAEVTEVAALRRQWLRDALAVYRMFGEVHACELWIGEKEQWLLSMRVPDSLDDVEVVQHRFESLDQEMNSLMGRVLDVNHTVQELVEGGHPSSDEVRSCQDHLNSRWNRIVELVEQRKEEMSAVLLVENHVLEVAEVRAQVREKRRAVESAPRAGGALQWRLSGLEAALQALEPRQAALLEEAALLAERFPAQAARLHQGAEELGAEWGALASAAQACGEAVAAAGRLQRFLHDLDAFLDWLVRAQEAAGGSEGPLPNSLEEADALLARHAALKEEVDQREEDYARIVAASEALLAADGAELGPGLALDEWLPHLELGWHKLLGLWEARREALVQAHIYQLFLRDLRQALVVLRNQEMALSGAELPGTVESVEEALKQHRDFLTTMELSQQKMQVAVQAAEGLLRQGNIYGEQAQEAVTRLLEKCLIIHPALLHPPWEPPDLPRSSS

SEQ ID NO: 206753 - protein, 2564 aa, Artificial Sequence
  derived and/or modified sequence
MAQVPGEVDNMEGLPAPNNNPAARWESPDRGWEREQPAASTAAASLFECSRIKALADEREAVQKKTFTKWVNSHLARVGCHIGDLYVDLRDGFVLTRLLEVLSGEQLPRPTRGRMRIHSLENVDKALQFLKEQRVHLENVGSHDIVDGNHRLTLGLVWTIILRFQIQVIKIETEDNRETRSAKDALLLWCQMKTAGYPEVNIQNFTTSWRDGLAFNALIHRHRPDLVDFSKLTKSNANYNLQRAFRTAEQHLGLARLLDPEDVNMEAPDEKSIITYVVSFYHYFSKMKALAVEGKRIGKVLDQVLEVGKIIERYEELAAELLAWIHRTVGLISNQKFANSLSGVQQQLQAFTAYCTLEKPVKFQEKGNLEVLLFSIQSKLRACNRRLFVPREGCGIWDIDKAWGELEKAEHEREAALRAELIRQEKLELLAQRFDHKVAMRESWLNENQRLVSQDNFGYELPAVEAAMKKHEAIEADIAAYEERVQGVAELAQALAAEGYYDIRRVAAQRDSVLRQWALLTGLVGARRTRLEQNLALQKVFQEMVYMVDWMEEMQAQLLSRECGQHLVEADDLLQKHGLLEGDIAAQSERVEALNAAALRFSQLQGYQPCDPQVICNRVNHVHGCLAELQEQAARRRAELEASRSLWALLQELEEAESWARDKERLLEAAGGGGAAGAAGAAGTAGGAHDLSSTARLLAQHKILQGELGGRRALLQQALRCGEELVAAGGAVGPGADTVHLVGLAERAASARRRWQRLEEAAARRERRLQEARALHQFGADLDGLLDWLRDAYRLAAAGDFGHDEASSRRLARQHRALTGEVEAHRGPVSGLRRQLATLGGASGAGPLVVALQVRVVEAEQLFAEVTEVAALRRQWLRDALAVYRMFGEVHACELWIGEKEQWLLSMRVPDSLDDVEVVQHRFESLDQEMNSLMGRVLDVNHTVQELVEGGHPSSDEVRSCQDHLNSRWNRIVELVEQRKEEMSAVLLVENHVLEVAEVRAQVREKRRAVESAPRAGGALQWRLSGLEAALQALEPRQAALLEEAALLAERFPAQAARLHQGAEELGAEWGALASAAQACGEAVAAAGRLQRFLHDLDAFLDWLVRAQEAAGGSEGPLPNSLEEADALLARHAALKEEVDQREEDYARIVAASEALLAADGAELGPGLALDEWLPHLELGWHKLLGLWEARREALVQAHIYQLFLRDLRQALVVLRNQEMALSGAELPGTVESVEEALKQHRDFLTTMELSQQKMQVAVQAAEGLLRQGNIYGEQAQEAVTRLLEKNQENQLRAQQWMQKLHDQLELQHFLRDCHELDGWIHEKMLMARDGTREDNHKLHKRWLRHQAFMAELAQNKEWLEKIEREGQQLMQEKPELAASVRKKLGEIRQCWAELESTTQAKARQLFEASKADQLVQSFAELDKKLLHMESQLQDVDPGGDLATVNSQLKKLQSMESQVEEWYREVGELQAQTAALPLEPASKELVGERQNAVGERLVRLLEPLQERRRLLLASKELHQVAHDLDDELAWVQERLPLAMQTERGNGLQAVQQHIKKNQGLRREIQAHGPRLEEVLERAGALASLRSPEAEAVRRGLEQLQSAWAGLREAAERRQQVLDAAFQVEQYYFDVAEVEAWLGEQELLMMSEDKGKDEQSTLQLLKKHLQLEQGVENYEESIAQLSRQCRALLEMGHPDSEQISRRQSQVDRLYVALKELGEERRVALEQQYWLYQLSRQVSELEHWIAEKEVVAGSPELGQDFEHVSVLQEKFSEFASETGMAGRERLAAVNQMVDELIECGHTAAATMAEWKDGLNEAWAELLELMGTRAQLLAASRELHKFFSDARELQGQIEEKRRRLPRLTTPPEPRPSASSMQRTLRAFEHDLQLLVSQVRQLQEGAAQLRTVYAGEHAEAIASREQEVLQGWKELLSACEDARLHVSSTADALRFHSQVRDLLSWMDGIASQIGAADKPRDVSSVEVLMNYHQGLKTELEARVPELTTCQELGRSLLLNKSAMADEIQAQLDKLGTRKEEVSEKWDRHWEWLQQMLEVHQFAQEAVVADAWLTAQEPLLQSRELGSSVDEVEQLIRRHEAFRKAAAAWEERFSSLRRLTTIEKIKAEQSKQPPTPLLGRKFFGDPTELAAKAAPLLRPGGYERGLEPLARRASDTLSAEVRTRVGYVRQELKPERLQPRIDRLPEIPGRVEPAALPAAPEDAAETPATPAAAEQVRPRPERQESADRAEELPRRRRPERQESVDQSEEAARRRRPERQESAEHEAAHSLTLGRYEQMERRRERRERRLERQESSEQEMPIRGDLVKGKATLADIVEQLQEKEAGPGLPAGPSLPQPRELPPGRLPNGLELPERTPRPDRPRARDRPKPRRRPRPREGGEGGGSRRSRSAPAQGGSAPAPPPPPTHTVQHEGFLLRKRELDANRKSSNRSWVSLYCVLSKGELGFYKDSKGPASGSTHGGEPLLSLHKATSEVASDYKKKKHVFKLQTQDGSEFLLQAKDEEEMNGWLEAVASSVAEHAEIARWGQTLPTTSSTDEGNPKREGGDRRASGRRK

SEQ ID NO: 206754 - protein, 1307 aa, Artificial Sequence
  derived and/or modified sequence
MPHYPSCSSAPSLGTPRPPQIQQLEARHRNQENQLRAQQWMQKLHDQLELQHFLRDCHELDGWIHEKMLMARDGTREDNHKLHKRWLRHQAFMAELAQNKEWLEKIEREGQQLMQEKPELAASVRKKLGEIRQCWAELESTTQAKARQLFEASKADQLVQSFAELDKKLLHMESQLQDVDPGGDLATVNSQLKKLQSMESQVEEWYREVGELQAQTAALPLEPASKELVGERQNAVGERLVRLLEPLQERRRLLLASKELHQVAHDLDDELAWVQERLPLAMQTERGNGLQAVQQHIKKNQGLRREIQAHGPRLEEVLERAGALASLRSPEAEAVRRGLEQLQSAWAGLREAAERRQQVLDAAFQVEQYYFDVAEVEAWLGEQELLMMSEDKGKDEQSTLQLLKKHLQLEQGVENYEESIAQLSRQCRALLEMGHPDSEQISRRQSQVDRLYVALKELGEERRVALEQQYWLYQLSRQVSELEHWIAEKEVVAGSPELGQDFEHVSVLQEKFSEFASETGMAGRERLAAVNQMVDELIECGHTAAATMAEWKDGLNEAWAELLELMGTRAQLLAASRELHKFFSDARELQGQIEEKRRRLPRLTTPPEPRPSASSMQRTLRAFEHDLQLLVSQVRQLQEGAAQLRTVYAGEHAEAIASREQEVLQGWKELLSACEDARLHVSSTADALRFHSQVRDLLSWMDGIASQIGAADKPRDVSSVEVLMNYHQGLKTELEARVPELTTCQELGRSLLLNKSAMADEIQAQLDKLGTRKEEVSEKWDRHWEWLQQMLEVHQFAQEAVVADAWLTAQEPLLQSRELGSSVDEVEQLIRRHEAFRKAAAAWEERFSSLRRLTTIEKIKAEQSKQPPTPLLGRKFFGDPTELAAKAAPLLRPGGYERGLEPLARRASDTLSAEVRTRVGYVRQELKPERLQPRIDRLPEIPGRVEPAALPAAPEDAAETPATPAAAEQVRPRPERQESADRAEELPRRRRPERQESVDQSEEAARRRRPERQESAEHEAAHSLTLGRYEQMERRRERRERRLERQESSEQEMPIRGDLVKGKATLADIVEQLQEKEAGPGLPAGPSLPQPRELPPGRLPNGLELPERTPRPDRPRARDRPKPRRRPRPREGGEGGGSRRSRSAPAQGGSAPAPPPPPTHTVQHEGFLLRKRELDANRKSSNRSWVSLYCVLSKGELGFYKDSKGPASGSTHGGEPLLSLHKATSEVASDYKKKKHVFKLQTQDGSEFLLQAKDEEEMNGWLEAVASSVAEHAEIARWGQTLPTTSSTDEGNPKREGGDRRASGRRK

SEQ ID NO: 206755 - protein, 2564 aa, Artificial Sequence
  derived and/or modified sequence
MAQVPGEVDNMEGLPAPNNNPAARWESPDRGWEREQPAASTAAASLFECSRIKALADEREAVQKKTFTKWVNSHLARVGCHIGDLYVDLRDGFVLTRLLEVLSGEQLPRPTRGRMRIHSLENVDKALQFLKEQRVHLENVGSHDIVDGNHRLTLGLVWTIILRFQIQVIKIETEDNRETRSAKDALLLWCQMKTAGYPEVNIQNFTTSWRDGLAFNALIHRHRPDLVDFSKLTKSNANYNLQRAFRTAEQHLGLARLLDPEDVNMEAPDEKSIITYVVSFYHYFSKMKALAVEGKRIGKVLDQVLEVGKIIERYEELAAELLAWIHRTVGLISNQKFANSLSGVQQQLQAFTAYCTLEKPVKFQEKGNLEVLLFSIQSKLRACNRRLFVPREGCGIWDIDKAWGELEKAEHEREAALRAELIRQEKLELLAQRFDHKVAMRESWLNENQRLVSQDNFGYELPAVEAAMKKHEAIEADIAAYEERVQGVAELAQALAAEGYYDIRRVAAQRDSVLRQWALLTGLVGARRTRLEQNLALQKVFQEMVYMVDWMEEMQAQLLSRECGQHLVEADDLLQKHGLLEGDIAAQSERVEALNAAALRFSQLQGYQPCDPQVICNRVNHVHGCLAELQEQAARRRAELEASRSLWALLQELEEAESWARDKERLLEAAGGGGAAGAAGAAGTAGGAHDLSSTARLLAQHKILQGELGGRRALLQQALRCGEELVAAGGAVGPGADTVHLVGLAERAASARRRWQRLEEAAARRERRLQEARALHQFGADLDGLLDWLRDAYRLAAAGDFGHDEASSRRLARQHRALTGEVEAHRGPVSGLRRQLATLGGASGAGPLVVALQVRVVEAEQLFAEVTEVAALRRQWLRDALAVYRMFGEVHACELWIGEKEQWLLSMRVPDSLDDVEVVQHRFESLDQEMNSLMGRVLDVNHTVQELVEGGHPSSDEVRSCQDHLNSRWNRIVELVEQRKEEMSAVLLVENHVLEVAEVRAQVREKRRAVESAPRAGGALQWRLSGLEAALQALEPRQAALLEEAALLAERFPAQAARLHQGAEELGAEWGALASAAQACGEAVAAAGRLQRFLHDLDAFLDWLVRAQEAAGGSEGPLPNSLEEADALLARHAALKEEVDQREEDYARIVAASEALLAADGAELGPGLALDEWLPHLELGWHKLLGLWEARREALVQAHIYQLFLRDLRQALVVLRNQEMALSGAELPGTVESVEEALKQHRDFLTTMELSQQKMQVAVQAAEGLLRQGNIYGEQAQEAVTRLLEKNQENQLRAQQWMQKLHDQLELQHFLRDCHELDGWIHEKMLMARDGTREDNHKLHKRWLRHQAFMAELAQNKEWLEKIEREGQQLMQEKPELAASVRKKLGEIRQCWAELESTTQAKARQLFEASKADQLVQSFAELDKKLLHMESQLQDVDPGGDLATVNSQLKKLQSMESQVEEWYREVGELQAQTAALPLEPASKELVGERQNAVGERLVRLLEPLQERRRLLLASKELHQVAHDWTTSWAWVQERLPLAMQTERGNGLQAVQQHIKKNQGLRREIQAHGPRLEEVLERAGALASLRSPEAEAVRRGLEQLQSAWAGLREAAERRQQVLDAAFQVEQYYFDVAEVEAWLGEQELLMMSEDKGKDEQSTLQLLKKHLQLEQGVENYEESIAQLSRQCRALLEMGHPDSEQISRRQSQVDRLYVALKELGEERRVALEQQYWLYQLSRQVSELEHWIAEKEVVAGSPELGQDFEHVSVLQEKFSEFASETGMAGRERLAAVNQMVDELIECGHTAAATMAEWKDGLNEAWAELLELMGTRAQLLAASRELHKFFSDARELQGQIEEKRRRLPRLTTPPEPRPSASSMQRTLRAFEHDLQLLVSQVRQLQEGAAQLRTVYAGEHAEAIASREQEVLQGWKELLSACEDARLHVSSTADALRFHSQVRDLLSWMDGIASQIGAADKPRDVSSVEVLMNYHQGLKTELEARVPELTTCQELGRSLLLNKSAMADEIQAQLDKLGTRKEEVSEKWDRHWEWLQQMLEVHQFAQEAVVADAWLTAQEPLLQSRELGSSVDEVEQLIRRHEAFRKAAAAWEERFSSLRRLTTIEKIKAEQSKQPPTPLLGRKFFGDPTELAAKAAPLLRPGGYERGLEPLARRASDTLSAEVRTRVGYVRQELKPERLQPRIDRLPEIPGRVEPAALPAAPEDAAETPATPAAAEQVRPRPERQESADRAEELPRRRRPERQESVDQSEEAARRRRPERQESAEHEAAHSLTLGRYEQMERRRERRERRLERQESSEQEMPIRGDLVKGKATLADIVEQLQEKEAGPGLPAGPSLPQPRELPPGRLPNGLELPERTPRPDRPRARDRPKPRRRPRPREGGEGGGSRRSRSAPAQGGSAPAPPPPPTHTVQHEGFLLRKRELDANRKSSNRSWVSLYCVLSKGELGFYKDSKGPASGSTHGGEPLLSLHKATSEVASDYKKKKHVFKLQTQDGSEFLLQAKDEEEMNGWLEAVASSVAEHAEIARWGQTLPTTSSTDEGNPKREGGDRRASGRRK

SEQ ID NO: 206756 - DNA, 6465 bp, Artificial Sequence
  derived and/or modified sequence
atggcccaggtgcccggcgaggtggacaacatggagggcctgcccgcccccaacaacaaccccgccgccagatgggagagccccgacagaggctgggagagagagcagcccgccgccagcaccgccgccgccagcctgttcgagtgcagcagaatcaaggccctggccgacgagagagaggccgtgcagaagaagaccttcaccaagtgggtgaacagccacctggccagagtgggctgccacatcggcgacctgtacgtggacctgagagacggcttcgtgctgaccagactgctggaggtgctgagcggcgagcagctgcccagacccaccagaggcagaatgagaatccacagcctggagaacgtggacaaggccctgcagttcctgaaggagcagagagtgcacctggagaacgtgggcagccacgacatcgtggacggcaaccacagactgaccctgggcctggtgtggaccatcatcctgagattccagatccaggtgatcaagatcgagaccgaggacaacagagagaccagaagcgccaaggacgccctgctgctgtggtgccagatgaagaccgccggctaccccgaggtgaacatccagaacttcaccaccagctggagagacggcctggccttcaacgccctgatccacagacacagacccgacctggtggacttcagcaagctgaccaagagcaacgccaactacaacctgcagagagccttcagaaccgccgagcagcacctgggcctggccagactgctggaccccgaggacgtgaacatggaggcccccgacgagaagagcatcatcacctacgtggtgagcttctaccactacttcagcaagatgaaggccctggccgtggagggcaagagaatcggcaaggtgctggaccaggtgctggaggtgggcaagatcatcgagagatacgaggagctggccgccgagctgctggcctggatccacagaaccgtgggcctgatcagcaaccagaagttcgccaacagcctgagcggcgtgcagcagcagctgcaggccttcaccgcctactgcaccctggagaagcccgtgaagttccaggagaagggcaacctggaggtgctgctgttcagcatccagagcaagctgagagcctgcaacagaagactgttcgtgcccagagagggctgcggcatctgggacatcgacaaggcctggggcgagctggagaaggccgagcacgagagagaggccgccctgagagccgagctgatcagacaggagaagctggagctgctggcccagagattcgaccacaaggtggccatgagagagagctggctgaacgagaaccagagactggtgagccaggacaacttcggctacgagctgcccgccgtggaggccgccatgaagaagcacgaggccatcgaggccgacatcgccgcctacgaggagagagtgcagggcgtggccgagctggcccaggccctggccgccgagggctactacgacatcagaagagtggccgcccagagagacagcgtgctgagacagtgggccctgctgaccggcctggtgggcgccagaagaaccagactggagcagaacctggccctgcagaaggtgttccaggagatggtgtacatggtggactggatggaggagatgcaggcccagctgctgagcagagagtgcggccagcacctggtggaggccgacgacctgctgcagaagcacggcctgctggagggcgacatcgccgcccagagcgagagagtggaggccctgaacgccgccgccctgagattcagccagctgcagggctaccagccctgcgacccccaggtgatctgcaacagagtgaaccacgtgcacggctgcctggccgagctgcaggagcaggccgccagaagaagagccgagctggaggccagcagaagcctgtgggccctgctgcaggagctggaggaggccgagagctgggccagagacaaggagagactgctggaggccgccggcggcggcggcgccgccggcgccgccggcgccgccggcaccgccggcggcgcccacgacctgagcagcaccgccagactgctggcccagcacaagatcctgcagggcgagctgggcggcagaagagccctgctgcagcaggccctgagatgcggcgaggagctggtggccgccggcggcgccgtgggccccggcgccgacaccgtgcacctggtgggcctggccgagagagccgccagcgccagaagaagatggcagagactggaggaggccgccgccagaagagagagaagactgcaggaggccagagccctgcaccagttcggcgccgacctggacggcctgctggactggctgagagacgcctacagactggccgccgccggcgacttcggccacgacgaggccagcagcagaagactggccagacagcacagagccctgaccggcgaggtggaggcccacagaggccccgtgagcggcctgagaagacagctggccaccctgggcggcgccagcggcgccggccccctggtggtggccctgcaggtgagagtggtggaggccgagcagctgttcgccgaggtgaccgaggtggccgccctgagaagacagtggctgagagacgccctggccgtgtacagaatgttcggcgaggtgcacgcctgcgagctgtggatcggcgagaaggagcagtggctgctgagcatgagagtgcccgacagcctggacgacgtggaggtggtgcagcacagattcgagagcctggaccaggagatgaacagcctgatgggcagagtgctggacgtgaaccacaccgtgcaggagctggtggagggcggccaccccagcagcgacgaggtgagaagctgccaggaccacctgaacagcagatggaacagaatcgtggagctggtggagcagagaaaggaggagatgagcgccgtgctgctggtggagaaccacgtgctggaggtggccgaggtgagagcccaggtgagagagaagagaagagccgtggagagcgcccccagagccggcggcgccctgcagtggagactgagcggcctggaggccgccctgcaggccctggagcccagacaggccgccctgctggaggaggccgccctgctggccgagagattccccgcccaggccgccagactgcaccagggcgccgaggagctgggcgccgagtggggcgccctggccagcgccgcccaggcctgcggcgaggccgtggccgccgccggcagactgcagagattcctgcacgacctggacgccttcctggactggctggtgagagcccaggaggccgccggcggcagcgagggccccctgcccaacagcctggaggaggccgacgccctgctggccagacacgccgccctgaaggaggaggtggaccagagagaggaggactacgccagaatcgtggccgccagcgaggccctgctggccgccgacggcgccgagctgggccccggcctggccctggacgagtggctgccccacctggagctgggctggcacaagctgctgggcctgtgggaggccagaagagaggccctggtgcaggcccacatctaccagctgttcctgagagacctgagacaggccctggtggtgctgagaaaccaggagatggccctgagcggcgccgagctgcccggcaccgtggagagcgtggaggaggccctgaagcagcacagagacttcctgaccaccatggagctgagccagcagaagatgcaggtggccgtgcaggccgccgagggcctgctgagacagggcaacatctacggcgagcaggcccaggaggccgtgaccagactgctggagaagaaccaggagaaccagctgagagcccagcagtggatgcagaagctgcacgaccagctggagctgcagcacttcctgagagactgccacgagctggacggctggatccacgagaagatgctgatggccagagacggcaccagagaggacaaccacaagctgcacaagagatggctgagacaccaggccttcatggccgagctggcccagaacaaggagtggctggagaagatcgagagagagggccagcagctgatgcaggagaagcccgagctggccgccagcgtgagaaagaagctgggcgagatcagacagtgctgggccgagctggagagcaccacccaggccaaggccagacagctgttcgaggccagcaaggccgaccagctggtgcagagcttcgccgagctggacaagaagctgctgcacatggagagccagctgcaggacgtggaccccggcggcgacctggccaccgtgaacagccagctgaagaagctgcagagcatggagagccaggtggaggagtggtacagagaggtgggcgagctgcaggcccagaccgccgccctgcccctggagcccgccagcaaggagctggtgggcgagagacagaacgccgtgggcgagagactggtgagactgctggagcccctgcaggagagaagaagactgctgctggccagcaaggagctgcaccaggtggcccacgacctggacgacgagctggcctgggtgcaggagagactgcccctggccatgcagaccgagagaggcaacggcctgcaggccgtgcagcagcacatcaagaagaaccagggcctgagaagagagatccaggcccacggccccagactggaggaggtgctggagagagccggcgccctggccagcctgagaagccccgaggccgaggccgtgagaagaggcctggagcagctgcagagcgcctgggccggcctgagagaggccgccgagagaagacagcaggtgctggacgccgccttccaggtggagcagtactacttcgacgtggccgaggtggaggcctggctgggcgagcaggagctgctgatgatgagcgaggacaagggcaaggacgagcagagcaccctgcagctgctgaagaagcacctgcagctggagcagggcgtggagaactacgaggagagcatcgcccagctgagcagacagtgcagagccctgctggagatgggccaccccgacagcgagcagatcagcagaagacagagccaggtggacagactgtacgtggccctgaaggagctgggcgaggagagaagagtggccctggagcagcagtactggctgtaccagctgagcagacaggtgagcgagctggagcactggatcgccgagaaggaggtggtggccggcagccccgagctgggccaggacttcgagcacgtgagcgtgctgcaggagaagttcagcgagttcgccagcgagaccggcatggccggcagagagagactggccgccgtgaaccagatggtggacgagctgatcgagtgcggccacaccgccgccgccaccatggccgagtggaaggacggcctgaacgaggcctgggccgagctgctggagctgatgggcaccagagcccagctgctggccgccagcagagagctgcacaagttcttcagcgacgccagagagctgcagggccagatcgaggagaagagaagaagactgcccagactgaccaccccccccgagcccagacccagcgccagcagcatgcagagaaccctgagagccttcgagcacgacctgcagctgctggtgagccaggtgagacagctgcaggagggcgccgcccagctgagaaccgtgtacgccggcgagcacgccgaggccatcgccagcagagagcaggaggtgctgcagggctggaaggagctgctgagcgcctgcgaggacgccagactgcacgtgagcagcaccgccgacgccctgagattccacagccaggtgagagacctgctgagctggatggacggcatcgccagccagatcggcgccgccgacaagcccagagacgtgagcagcgtggaggtgctgatgaactaccaccagggcctgaagaccgagctggaggccagagtgcccgagctgaccacctgccaggagctgggcagaagcctgctgctgaacaagagcgccatggccgacgagatccaggcccagctggacaagctgggcaccagaaaggaggaggtgagcgagaagtgggacagacactgggagtggctgcagcagatgctggaggtgcaccagttcgcccaggaggccgtggtggccgacgcctggctgaccgcccaggagcccctgctgcagagcagagagctgggcagcagcgtggacgaggtggagcagctgatcagaagacacgaggccttcagaaaggccgccgccgcctgggaggagagattcagcagcctgagaagactgaccacccccagaagagaggaccacctgaaccccggcgtgcaggaccagccctggcagcacaccgagaagcccagcctgcccaagcccaaggccaacaaggagaagaccgccagaagagacggcacctgcctgtag

SEQ ID NO: 206757 - DNA, 3930 bp, Artificial Sequence
  derived and/or modified sequence
atggcccaggtgcccggcgaggtggacaacatggagggcctgcccgcccccaacaacaaccccgccgccagatgggagagccccgacagaggctgggagagagagcagcccgccgccagcaccgccgccgccagcctgttcgagtgcagcagaatcaaggccctggccgacgagagagaggccgtgcagaagaagaccttcaccaagtgggtgaacagccacctggccagagtgggctgccacatcggcgacctgtacgtggacctgagagacggcttcgtgctgaccagactgctggaggtgctgagcggcgagcagctgcccagacccaccagaggcagaatgagaatccacagcctggagaacgtggacaaggccctgcagttcctgaaggagcagagagtgcacctggagaacgtgggcagccacgacatcgtggacggcaaccacagactgaccctgggcctggtgtggaccatcatcctgagattccagatccaggtgatcaagatcgagaccgaggacaacagagagaccagaagcgccaaggacgccctgctgctgtggtgccagatgaagaccgccggctaccccgaggtgaacatccagaacttcaccaccagctggagagacggcctggccttcaacgccctgatccacagacacagacccgacctggtggacttcagcaagctgaccaagagcaacgccaactacaacctgcagagagccttcagaaccgccgagcagcacctgggcctggccagactgctggaccccgaggacgtgaacatggaggcccccgacgagaagagcatcatcacctacgtggtgagcttctaccactacttcagcaagatgaaggccctggccgtggagggcaagagaatcggcaaggtgctggaccaggtgctggaggtgggcaagatcatcgagagatacgaggagctggccgccgagctgctggcctggatccacagaaccgtgggcctgatcagcaaccagaagttcgccaacagcctgagcggcgtgcagcagcagctgcaggccttcaccgcctactgcaccctggagaagcccgtgaagttccaggagaagggcaacctggaggtgctgctgttcagcatccagagcaagctgagagcctgcaacagaagactgttcgtgcccagagagggctgcggcatctgggacatcgacaaggcctggggcgagctggagaaggccgagcacgagagagaggccgccctgagagccgagctgatcagacaggagaagctggagctgctggcccagagattcgaccacaaggtggccatgagagagagctggctgaacgagaaccagagactggtgagccaggacaacttcggctacgagctgcccgccgtggaggccgccatgaagaagcacgaggccatcgaggccgacatcgccgcctacgaggagagagtgcagggcgtggccgagctggcccaggccctggccgccgagggctactacgacatcagaagagtggccgcccagagagacagcgtgctgagacagtgggccctgctgaccggcctggtgggcgccagaagaaccagactggagcagaacctggccctgcagaaggtgttccaggagatggtgtacatggtggactggatggaggagatgcaggcccagctgctgagcagagagtgcggccagcacctggtggaggccgacgacctgctgcagaagcacggcctgctggagggcgacatcgccgcccagagcgagagagtggaggccctgaacgccgccgccctgagattcagccagctgcagggctaccagccctgcgacccccaggtgatctgcaacagagtgaaccacgtgcacggctgcctggccgagctgcaggagcaggccgccagaagaagagccgagctggaggccagcagaagcctgtgggccctgctgcaggagctggaggaggccgagagctgggccagagacaaggagagactgctggaggccgccggcggcggcggcgccgccggcgccgccggcgccgccggcaccgccggcggcgcccacgacctgagcagcaccgccagactgctggcccagcacaagatcctgcagggcgagctgggcggcagaagagccctgctgcagcaggccctgagatgcggcgaggagctggtggccgccggcggcgccgtgggccccggcgccgacaccgtgcacctggtgggcctggccgagagagccgccagcgccagaagaagatggcagagactggaggaggccgccgccagaagagagagaagactgcaggaggccagagccctgcaccagttcggcgccgacctggacggcctgctggactggctgagagacgcctacagactggccgccgccggcgacttcggccacgacgaggccagcagcagaagactggccagacagcacagagccctgaccggcgaggtggaggcccacagaggccccgtgagcggcctgagaagacagctggccaccctgggcggcgccagcggcgccggccccctggtggtggccctgcaggtgagagtggtggaggccgagcagctgttcgccgaggtgaccgaggtggccgccctgagaagacagtggctgagagacgccctggccgtgtacagaatgttcggcgaggtgcacgcctgcgagctgtggatcggcgagaaggagcagtggctgctgagcatgagagtgcccgacagcctggacgacgtggaggtggtgcagcacagattcgagagcctggaccaggagatgaacagcctgatgggcagagtgctggacgtgaaccacaccgtgcaggagctggtggagggcggccaccccagcagcgacgaggtgagaagctgccaggaccacctgaacagcagatggaacagaatcgtggagctggtggagcagagaaaggaggagatgagcgccgtgctgctggtggagaaccacgtgctggaggtggccgaggtgagagcccaggtgagagagaagagaagagccgtggagagcgcccccagagccggcggcgccctgcagtggagactgagcggcctggaggccgccctgcaggccctggagcccagacaggccgccctgctggaggaggccgccctgctggccgagagattccccgcccaggccgccagactgcaccagggcgccgaggagctgggcgccgagtggggcgccctggccagcgccgcccaggcctgcggcgaggccgtggccgccgccggcagactgcagagattcctgcacgacctggacgccttcctggactggctggtgagagcccaggaggccgccggcggcagcgagggccccctgcccaacagcctggaggaggccgacgccctgctggccagacacgccgccctgaaggaggaggtggaccagagagaggaggactacgccagaatcgtggccgccagcgaggccctgctggccgccgacggcgccgagctgggccccggcctggccctggacgagtggctgccccacctggagctgggctggcacaagctgctgggcctgtgggaggccagaagagaggccctggtgcaggcccacatctaccagctgttcctgagagacctgagacaggccctggtggtgctgagaaaccaggagatggccctgagcggcgccgagctgcccggcaccgtggagagcgtggaggaggccctgaagcagcacagagacttcctgaccaccatggagctgagccagcagaagatgcaggtggccgtgcaggccgccgagggcctgctgagacagggcaacatctacggcgagcaggcccaggaggccgtgaccagactgctggagaagtgcctgatcatccaccccgccctgctgcaccccccctgggagccccccgacctgcccagaagcagcagctag

SEQ ID NO: 206758 - DNA, 7695 bp, Artificial Sequence
  derived and/or modified sequence
atggcccaggtgcccggcgaggtggacaacatggagggcctgcccgcccccaacaacaaccccgccgccagatgggagagccccgacagaggctgggagagagagcagcccgccgccagcaccgccgccgccagcctgttcgagtgcagcagaatcaaggccctggccgacgagagagaggccgtgcagaagaagaccttcaccaagtgggtgaacagccacctggccagagtgggctgccacatcggcgacctgtacgtggacctgagagacggcttcgtgctgaccagactgctggaggtgctgagcggcgagcagctgcccagacccaccagaggcagaatgagaatccacagcctggagaacgtggacaaggccctgcagttcctgaaggagcagagagtgcacctggagaacgtgggcagccacgacatcgtggacggcaaccacagactgaccctgggcctggtgtggaccatcatcctgagattccagatccaggtgatcaagatcgagaccgaggacaacagagagaccagaagcgccaaggacgccctgctgctgtggtgccagatgaagaccgccggctaccccgaggtgaacatccagaacttcaccaccagctggagagacggcctggccttcaacgccctgatccacagacacagacccgacctggtggacttcagcaagctgaccaagagcaacgccaactacaacctgcagagagccttcagaaccgccgagcagcacctgggcctggccagactgctggaccccgaggacgtgaacatggaggcccccgacgagaagagcatcatcacctacgtggtgagcttctaccactacttcagcaagatgaaggccctggccgtggagggcaagagaatcggcaaggtgctggaccaggtgctggaggtgggcaagatcatcgagagatacgaggagctggccgccgagctgctggcctggatccacagaaccgtgggcctgatcagcaaccagaagttcgccaacagcctgagcggcgtgcagcagcagctgcaggccttcaccgcctactgcaccctggagaagcccgtgaagttccaggagaagggcaacctggaggtgctgctgttcagcatccagagcaagctgagagcctgcaacagaagactgttcgtgcccagagagggctgcggcatctgggacatcgacaaggcctggggcgagctggagaaggccgagcacgagagagaggccgccctgagagccgagctgatcagacaggagaagctggagctgctggcccagagattcgaccacaaggtggccatgagagagagctggctgaacgagaaccagagactggtgagccaggacaacttcggctacgagctgcccgccgtggaggccgccatgaagaagcacgaggccatcgaggccgacatcgccgcctacgaggagagagtgcagggcgtggccgagctggcccaggccctggccgccgagggctactacgacatcagaagagtggccgcccagagagacagcgtgctgagacagtgggccctgctgaccggcctggtgggcgccagaagaaccagactggagcagaacctggccctgcagaaggtgttccaggagatggtgtacatggtggactggatggaggagatgcaggcccagctgctgagcagagagtgcggccagcacctggtggaggccgacgacctgctgcagaagcacggcctgctggagggcgacatcgccgcccagagcgagagagtggaggccctgaacgccgccgccctgagattcagccagctgcagggctaccagccctgcgacccccaggtgatctgcaacagagtgaaccacgtgcacggctgcctggccgagctgcaggagcaggccgccagaagaagagccgagctggaggccagcagaagcctgtgggccctgctgcaggagctggaggaggccgagagctgggccagagacaaggagagactgctggaggccgccggcggcggcggcgccgccggcgccgccggcgccgccggcaccgccggcggcgcccacgacctgagcagcaccgccagactgctggcccagcacaagatcctgcagggcgagctgggcggcagaagagccctgctgcagcaggccctgagatgcggcgaggagctggtggccgccggcggcgccgtgggccccggcgccgacaccgtgcacctggtgggcctggccgagagagccgccagcgccagaagaagatggcagagactggaggaggccgccgccagaagagagagaagactgcaggaggccagagccctgcaccagttcggcgccgacctggacggcctgctggactggctgagagacgcctacagactggccgccgccggcgacttcggccacgacgaggccagcagcagaagactggccagacagcacagagccctgaccggcgaggtggaggcccacagaggccccgtgagcggcctgagaagacagctggccaccctgggcggcgccagcggcgccggccccctggtggtggccctgcaggtgagagtggtggaggccgagcagctgttcgccgaggtgaccgaggtggccgccctgagaagacagtggctgagagacgccctggccgtgtacagaatgttcggcgaggtgcacgcctgcgagctgtggatcggcgagaaggagcagtggctgctgagcatgagagtgcccgacagcctggacgacgtggaggtggtgcagcacagattcgagagcctggaccaggagatgaacagcctgatgggcagagtgctggacgtgaaccacaccgtgcaggagctggtggagggcggccaccccagcagcgacgaggtgagaagctgccaggaccacctgaacagcagatggaacagaatcgtggagctggtggagcagagaaaggaggagatgagcgccgtgctgctggtggagaaccacgtgctggaggtggccgaggtgagagcccaggtgagagagaagagaagagccgtggagagcgcccccagagccggcggcgccctgcagtggagactgagcggcctggaggccgccctgcaggccctggagcccagacaggccgccctgctggaggaggccgccctgctggccgagagattccccgcccaggccgccagactgcaccagggcgccgaggagctgggcgccgagtggggcgccctggccagcgccgcccaggcctgcggcgaggccgtggccgccgccggcagactgcagagattcctgcacgacctggacgccttcctggactggctggtgagagcccaggaggccgccggcggcagcgagggccccctgcccaacagcctggaggaggccgacgccctgctggccagacacgccgccctgaaggaggaggtggaccagagagaggaggactacgccagaatcgtggccgccagcgaggccctgctggccgccgacggcgccgagctgggccccggcctggccctggacgagtggctgccccacctggagctgggctggcacaagctgctgggcctgtgggaggccagaagagaggccctggtgcaggcccacatctaccagctgttcctgagagacctgagacaggccctggtggtgctgagaaaccaggagatggccctgagcggcgccgagctgcccggcaccgtggagagcgtggaggaggccctgaagcagcacagagacttcctgaccaccatggagctgagccagcagaagatgcaggtggccgtgcaggccgccgagggcctgctgagacagggcaacatctacggcgagcaggcccaggaggccgtgaccagactgctggagaagaaccaggagaaccagctgagagcccagcagtggatgcagaagctgcacgaccagctggagctgcagcacttcctgagagactgccacgagctggacggctggatccacgagaagatgctgatggccagagacggcaccagagaggacaaccacaagctgcacaagagatggctgagacaccaggccttcatggccgagctggcccagaacaaggagtggctggagaagatcgagagagagggccagcagctgatgcaggagaagcccgagctggccgccagcgtgagaaagaagctgggcgagatcagacagtgctgggccgagctggagagcaccacccaggccaaggccagacagctgttcgaggccagcaaggccgaccagctggtgcagagcttcgccgagctggacaagaagctgctgcacatggagagccagctgcaggacgtggaccccggcggcgacctggccaccgtgaacagccagctgaagaagctgcagagcatggagagccaggtggaggagtggtacagagaggtgggcgagctgcaggcccagaccgccgccctgcccctggagcccgccagcaaggagctggtgggcgagagacagaacgccgtgggcgagagactggtgagactgctggagcccctgcaggagagaagaagactgctgctggccagcaaggagctgcaccaggtggcccacgacctggacgacgagctggcctgggtgcaggagagactgcccctggccatgcagaccgagagaggcaacggcctgcaggccgtgcagcagcacatcaagaagaaccagggcctgagaagagagatccaggcccacggccccagactggaggaggtgctggagagagccggcgccctggccagcctgagaagccccgaggccgaggccgtgagaagaggcctggagcagctgcagagcgcctgggccggcctgagagaggccgccgagagaagacagcaggtgctggacgccgccttccaggtggagcagtactacttcgacgtggccgaggtggaggcctggctgggcgagcaggagctgctgatgatgagcgaggacaagggcaaggacgagcagagcaccctgcagctgctgaagaagcacctgcagctggagcagggcgtggagaactacgaggagagcatcgcccagctgagcagacagtgcagagccctgctggagatgggccaccccgacagcgagcagatcagcagaagacagagccaggtggacagactgtacgtggccctgaaggagctgggcgaggagagaagagtggccctggagcagcagtactggctgtaccagctgagcagacaggtgagcgagctggagcactggatcgccgagaaggaggtggtggccggcagccccgagctgggccaggacttcgagcacgtgagcgtgctgcaggagaagttcagcgagttcgccagcgagaccggcatggccggcagagagagactggccgccgtgaaccagatggtggacgagctgatcgagtgcggccacaccgccgccgccaccatggccgagtggaaggacggcctgaacgaggcctgggccgagctgctggagctgatgggcaccagagcccagctgctggccgccagcagagagctgcacaagttcttcagcgacgccagagagctgcagggccagatcgaggagaagagaagaagactgcccagactgaccaccccccccgagcccagacccagcgccagcagcatgcagagaaccctgagagccttcgagcacgacctgcagctgctggtgagccaggtgagacagctgcaggagggcgccgcccagctgagaaccgtgtacgccggcgagcacgccgaggccatcgccagcagagagcaggaggtgctgcagggctggaaggagctgctgagcgcctgcgaggacgccagactgcacgtgagcagcaccgccgacgccctgagattccacagccaggtgagagacctgctgagctggatggacggcatcgccagccagatcggcgccgccgacaagcccagagacgtgagcagcgtggaggtgctgatgaactaccaccagggcctgaagaccgagctggaggccagagtgcccgagctgaccacctgccaggagctgggcagaagcctgctgctgaacaagagcgccatggccgacgagatccaggcccagctggacaagctgggcaccagaaaggaggaggtgagcgagaagtgggacagacactgggagtggctgcagcagatgctggaggtgcaccagttcgcccaggaggccgtggtggccgacgcctggctgaccgcccaggagcccctgctgcagagcagagagctgggcagcagcgtggacgaggtggagcagctgatcagaagacacgaggccttcagaaaggccgccgccgcctgggaggagagattcagcagcctgagaagactgaccaccatcgagaagatcaaggccgagcagagcaagcagccccccacccccctgctgggcagaaagttcttcggcgaccccaccgagctggccgccaaggccgcccccctgctgagacccggcggctacgagagaggcctggagcccctggccagaagagccagcgacaccctgagcgccgaggtgagaaccagagtgggctacgtgagacaggagctgaagcccgagagactgcagcccagaatcgacagactgcccgagatccccggcagagtggagcccgccgccctgcccgccgcccccgaggacgccgccgagacccccgccacccccgccgccgccgagcaggtgagacccagacccgagagacaggagagcgccgacagagccgaggagctgcccagaagaagaagacccgagagacaggagagcgtggaccagagcgaggaggccgccagaagaagaagacccgagagacaggagagcgccgagcacgaggccgcccacagcctgaccctgggcagatacgagcagatggagagaagaagagagagaagagagagaagactggagagacaggagagcagcgagcaggagatgcccatcagaggcgacctggtgaagggcaaggccaccctggccgacatcgtggagcagctgcaggagaaggaggccggccccggcctgcccgccggccccagcctgccccagcccagagagctgccccccggcagactgcccaacggcctggagctgcccgagagaacccccagacccgacagacccagagccagagacagacccaagcccagaagaagacccagacccagagagggcggcgagggcggcggcagcagaagaagcagaagcgcccccgcccagggcggcagcgcccccgcccccccccccccccccacccacaccgtgcagcacgagggcttcctgctgagaaagagagagctggacgccaacagaaagagcagcaacagaagctgggtgagcctgtactgcgtgctgagcaagggcgagctgggcttctacaaggacagcaagggccccgccagcggcagcacccacggcggcgagcccctgctgagcctgcacaaggccaccagcgaggtggccagcgactacaagaagaagaagcacgtgttcaagctgcagacccaggacggcagcgagttcctgctgcaggccaaggacgaggaggagatgaacggctggctggaggccgtggccagcagcgtggccgagcacgccgagatcgccagatggggccagaccctgcccaccaccagcagcaccgacgagggcaaccccaagagagagggcggcgacagaagagccagcggcagaagaaagtag

SEQ ID NO: 206759 - DNA, 3924 bp, Artificial Sequence
  derived and/or modified sequence
atgccccactaccccagctgcagcagcgcccccagcctgggcacccccagacccccccagatccagcagctggaggccagacacagaaaccaggagaaccagctgagagcccagcagtggatgcagaagctgcacgaccagctggagctgcagcacttcctgagagactgccacgagctggacggctggatccacgagaagatgctgatggccagagacggcaccagagaggacaaccacaagctgcacaagagatggctgagacaccaggccttcatggccgagctggcccagaacaaggagtggctggagaagatcgagagagagggccagcagctgatgcaggagaagcccgagctggccgccagcgtgagaaagaagctgggcgagatcagacagtgctgggccgagctggagagcaccacccaggccaaggccagacagctgttcgaggccagcaaggccgaccagctggtgcagagcttcgccgagctggacaagaagctgctgcacatggagagccagctgcaggacgtggaccccggcggcgacctggccaccgtgaacagccagctgaagaagctgcagagcatggagagccaggtggaggagtggtacagagaggtgggcgagctgcaggcccagaccgccgccctgcccctggagcccgccagcaaggagctggtgggcgagagacagaacgccgtgggcgagagactggtgagactgctggagcccctgcaggagagaagaagactgctgctggccagcaaggagctgcaccaggtggcccacgacctggacgacgagctggcctgggtgcaggagagactgcccctggccatgcagaccgagagaggcaacggcctgcaggccgtgcagcagcacatcaagaagaaccagggcctgagaagagagatccaggcccacggccccagactggaggaggtgctggagagagccggcgccctggccagcctgagaagccccgaggccgaggccgtgagaagaggcctggagcagctgcagagcgcctgggccggcctgagagaggccgccgagagaagacagcaggtgctggacgccgccttccaggtggagcagtactacttcgacgtggccgaggtggaggcctggctgggcgagcaggagctgctgatgatgagcgaggacaagggcaaggacgagcagagcaccctgcagctgctgaagaagcacctgcagctggagcagggcgtggagaactacgaggagagcatcgcccagctgagcagacagtgcagagccctgctggagatgggccaccccgacagcgagcagatcagcagaagacagagccaggtggacagactgtacgtggccctgaaggagctgggcgaggagagaagagtggccctggagcagcagtactggctgtaccagctgagcagacaggtgagcgagctggagcactggatcgccgagaaggaggtggtggccggcagccccgagctgggccaggacttcgagcacgtgagcgtgctgcaggagaagttcagcgagttcgccagcgagaccggcatggccggcagagagagactggccgccgtgaaccagatggtggacgagctgatcgagtgcggccacaccgccgccgccaccatggccgagtggaaggacggcctgaacgaggcctgggccgagctgctggagctgatgggcaccagagcccagctgctggccgccagcagagagctgcacaagttcttcagcgacgccagagagctgcagggccagatcgaggagaagagaagaagactgcccagactgaccaccccccccgagcccagacccagcgccagcagcatgcagagaaccctgagagccttcgagcacgacctgcagctgctggtgagccaggtgagacagctgcaggagggcgccgcccagctgagaaccgtgtacgccggcgagcacgccgaggccatcgccagcagagagcaggaggtgctgcagggctggaaggagctgctgagcgcctgcgaggacgccagactgcacgtgagcagcaccgccgacgccctgagattccacagccaggtgagagacctgctgagctggatggacggcatcgccagccagatcggcgccgccgacaagcccagagacgtgagcagcgtggaggtgctgatgaactaccaccagggcctgaagaccgagctggaggccagagtgcccgagctgaccacctgccaggagctgggcagaagcctgctgctgaacaagagcgccatggccgacgagatccaggcccagctggacaagctgggcaccagaaaggaggaggtgagcgagaagtgggacagacactgggagtggctgcagcagatgctggaggtgcaccagttcgcccaggaggccgtggtggccgacgcctggctgaccgcccaggagcccctgctgcagagcagagagctgggcagcagcgtggacgaggtggagcagctgatcagaagacacgaggccttcagaaaggccgccgccgcctgggaggagagattcagcagcctgagaagactgaccaccatcgagaagatcaaggccgagcagagcaagcagccccccacccccctgctgggcagaaagttcttcggcgaccccaccgagctggccgccaaggccgcccccctgctgagacccggcggctacgagagaggcctggagcccctggccagaagagccagcgacaccctgagcgccgaggtgagaaccagagtgggctacgtgagacaggagctgaagcccgagagactgcagcccagaatcgacagactgcccgagatccccggcagagtggagcccgccgccctgcccgccgcccccgaggacgccgccgagacccccgccacccccgccgccgccgagcaggtgagacccagacccgagagacaggagagcgccgacagagccgaggagctgcccagaagaagaagacccgagagacaggagagcgtggaccagagcgaggaggccgccagaagaagaagacccgagagacaggagagcgccgagcacgaggccgcccacagcctgaccctgggcagatacgagcagatggagagaagaagagagagaagagagagaagactggagagacaggagagcagcgagcaggagatgcccatcagaggcgacctggtgaagggcaaggccaccctggccgacatcgtggagcagctgcaggagaaggaggccggccccggcctgcccgccggccccagcctgccccagcccagagagctgccccccggcagactgcccaacggcctggagctgcccgagagaacccccagacccgacagacccagagccagagacagacccaagcccagaagaagacccagacccagagagggcggcgagggcggcggcagcagaagaagcagaagcgcccccgcccagggcggcagcgcccccgcccccccccccccccccacccacaccgtgcagcacgagggcttcctgctgagaaagagagagctggacgccaacagaaagagcagcaacagaagctgggtgagcctgtactgcgtgctgagcaagggcgagctgggcttctacaaggacagcaagggccccgccagcggcagcacccacggcggcgagcccctgctgagcctgcacaaggccaccagcgaggtggccagcgactacaagaagaagaagcacgtgttcaagctgcagacccaggacggcagcgagttcctgctgcaggccaaggacgaggaggagatgaacggctggctggaggccgtggccagcagcgtggccgagcacgccgagatcgccagatggggccagaccctgcccaccaccagcagcaccgacgagggcaaccccaagagagagggcggcgacagaagagccagcggcagaagaaagtag

SEQ ID NO: 206760 - DNA, 7695 bp, Artificial Sequence
  derived and/or modified sequence
atggcccaggtgcccggcgaggtggacaacatggagggcctgcccgcccccaacaacaaccccgccgccagatgggagagccccgacagaggctgggagagagagcagcccgccgccagcaccgccgccgccagcctgttcgagtgcagcagaatcaaggccctggccgacgagagagaggccgtgcagaagaagaccttcaccaagtgggtgaacagccacctggccagagtgggctgccacatcggcgacctgtacgtggacctgagagacggcttcgtgctgaccagactgctggaggtgctgagcggcgagcagctgcccagacccaccagaggcagaatgagaatccacagcctggagaacgtggacaaggccctgcagttcctgaaggagcagagagtgcacctggagaacgtgggcagccacgacatcgtggacggcaaccacagactgaccctgggcctggtgtggaccatcatcctgagattccagatccaggtgatcaagatcgagaccgaggacaacagagagaccagaagcgccaaggacgccctgctgctgtggtgccagatgaagaccgccggctaccccgaggtgaacatccagaacttcaccaccagctggagagacggcctggccttcaacgccctgatccacagacacagacccgacctggtggacttcagcaagctgaccaagagcaacgccaactacaacctgcagagagccttcagaaccgccgagcagcacctgggcctggccagactgctggaccccgaggacgtgaacatggaggcccccgacgagaagagcatcatcacctacgtggtgagcttctaccactacttcagcaagatgaaggccctggccgtggagggcaagagaatcggcaaggtgctggaccaggtgctggaggtgggcaagatcatcgagagatacgaggagctggccgccgagctgctggcctggatccacagaaccgtgggcctgatcagcaaccagaagttcgccaacagcctgagcggcgtgcagcagcagctgcaggccttcaccgcctactgcaccctggagaagcccgtgaagttccaggagaagggcaacctggaggtgctgctgttcagcatccagagcaagctgagagcctgcaacagaagactgttcgtgcccagagagggctgcggcatctgggacatcgacaaggcctggggcgagctggagaaggccgagcacgagagagaggccgccctgagagccgagctgatcagacaggagaagctggagctgctggcccagagattcgaccacaaggtggccatgagagagagctggctgaacgagaaccagagactggtgagccaggacaacttcggctacgagctgcccgccgtggaggccgccatgaagaagcacgaggccatcgaggccgacatcgccgcctacgaggagagagtgcagggcgtggccgagctggcccaggccctggccgccgagggctactacgacatcagaagagtggccgcccagagagacagcgtgctgagacagtgggccctgctgaccggcctggtgggcgccagaagaaccagactggagcagaacctggccctgcagaaggtgttccaggagatggtgtacatggtggactggatggaggagatgcaggcccagctgctgagcagagagtgcggccagcacctggtggaggccgacgacctgctgcagaagcacggcctgctggagggcgacatcgccgcccagagcgagagagtggaggccctgaacgccgccgccctgagattcagccagctgcagggctaccagccctgcgacccccaggtgatctgcaacagagtgaaccacgtgcacggctgcctggccgagctgcaggagcaggccgccagaagaagagccgagctggaggccagcagaagcctgtgggccctgctgcaggagctggaggaggccgagagctgggccagagacaaggagagactgctggaggccgccggcggcggcggcgccgccggcgccgccggcgccgccggcaccgccggcggcgcccacgacctgagcagcaccgccagactgctggcccagcacaagatcctgcagggcgagctgggcggcagaagagccctgctgcagcaggccctgagatgcggcgaggagctggtggccgccggcggcgccgtgggccccggcgccgacaccgtgcacctggtgggcctggccgagagagccgccagcgccagaagaagatggcagagactggaggaggccgccgccagaagagagagaagactgcaggaggccagagccctgcaccagttcggcgccgacctggacggcctgctggactggctgagagacgcctacagactggccgccgccggcgacttcggccacgacgaggccagcagcagaagactggccagacagcacagagccctgaccggcgaggtggaggcccacagaggccccgtgagcggcctgagaagacagctggccaccctgggcggcgccagcggcgccggccccctggtggtggccctgcaggtgagagtggtggaggccgagcagctgttcgccgaggtgaccgaggtggccgccctgagaagacagtggctgagagacgccctggccgtgtacagaatgttcggcgaggtgcacgcctgcgagctgtggatcggcgagaaggagcagtggctgctgagcatgagagtgcccgacagcctggacgacgtggaggtggtgcagcacagattcgagagcctggaccaggagatgaacagcctgatgggcagagtgctggacgtgaaccacaccgtgcaggagctggtggagggcggccaccccagcagcgacgaggtgagaagctgccaggaccacctgaacagcagatggaacagaatcgtggagctggtggagcagagaaaggaggagatgagcgccgtgctgctggtggagaaccacgtgctggaggtggccgaggtgagagcccaggtgagagagaagagaagagccgtggagagcgcccccagagccggcggcgccctgcagtggagactgagcggcctggaggccgccctgcaggccctggagcccagacaggccgccctgctggaggaggccgccctgctggccgagagattccccgcccaggccgccagactgcaccagggcgccgaggagctgggcgccgagtggggcgccctggccagcgccgcccaggcctgcggcgaggccgtggccgccgccggcagactgcagagattcctgcacgacctggacgccttcctggactggctggtgagagcccaggaggccgccggcggcagcgagggccccctgcccaacagcctggaggaggccgacgccctgctggccagacacgccgccctgaaggaggaggtggaccagagagaggaggactacgccagaatcgtggccgccagcgaggccctgctggccgccgacggcgccgagctgggccccggcctggccctggacgagtggctgccccacctggagctgggctggcacaagctgctgggcctgtgggaggccagaagagaggccctggtgcaggcccacatctaccagctgttcctgagagacctgagacaggccctggtggtgctgagaaaccaggagatggccctgagcggcgccgagctgcccggcaccgtggagagcgtggaggaggccctgaagcagcacagagacttcctgaccaccatggagctgagccagcagaagatgcaggtggccgtgcaggccgccgagggcctgctgagacagggcaacatctacggcgagcaggcccaggaggccgtgaccagactgctggagaagaaccaggagaaccagctgagagcccagcagtggatgcagaagctgcacgaccagctggagctgcagcacttcctgagagactgccacgagctggacggctggatccacgagaagatgctgatggccagagacggcaccagagaggacaaccacaagctgcacaagagatggctgagacaccaggccttcatggccgagctggcccagaacaaggagtggctggagaagatcgagagagagggccagcagctgatgcaggagaagcccgagctggccgccagcgtgagaaagaagctgggcgagatcagacagtgctgggccgagctggagagcaccacccaggccaaggccagacagctgttcgaggccagcaaggccgaccagctggtgcagagcttcgccgagctggacaagaagctgctgcacatggagagccagctgcaggacgtggaccccggcggcgacctggccaccgtgaacagccagctgaagaagctgcagagcatggagagccaggtggaggagtggtacagagaggtgggcgagctgcaggcccagaccgccgccctgcccctggagcccgccagcaaggagctggtgggcgagagacagaacgccgtgggcgagagactggtgagactgctggagcccctgcaggagagaagaagactgctgctggccagcaaggagctgcaccaggtggcccacgactggaccaccagctgggcctgggtgcaggagagactgcccctggccatgcagaccgagagaggcaacggcctgcaggccgtgcagcagcacatcaagaagaaccagggcctgagaagagagatccaggcccacggccccagactggaggaggtgctggagagagccggcgccctggccagcctgagaagccccgaggccgaggccgtgagaagaggcctggagcagctgcagagcgcctgggccggcctgagagaggccgccgagagaagacagcaggtgctggacgccgccttccaggtggagcagtactacttcgacgtggccgaggtggaggcctggctgggcgagcaggagctgctgatgatgagcgaggacaagggcaaggacgagcagagcaccctgcagctgctgaagaagcacctgcagctggagcagggcgtggagaactacgaggagagcatcgcccagctgagcagacagtgcagagccctgctggagatgggccaccccgacagcgagcagatcagcagaagacagagccaggtggacagactgtacgtggccctgaaggagctgggcgaggagagaagagtggccctggagcagcagtactggctgtaccagctgagcagacaggtgagcgagctggagcactggatcgccgagaaggaggtggtggccggcagccccgagctgggccaggacttcgagcacgtgagcgtgctgcaggagaagttcagcgagttcgccagcgagaccggcatggccggcagagagagactggccgccgtgaaccagatggtggacgagctgatcgagtgcggccacaccgccgccgccaccatggccgagtggaaggacggcctgaacgaggcctgggccgagctgctggagctgatgggcaccagagcccagctgctggccgccagcagagagctgcacaagttcttcagcgacgccagagagctgcagggccagatcgaggagaagagaagaagactgcccagactgaccaccccccccgagcccagacccagcgccagcagcatgcagagaaccctgagagccttcgagcacgacctgcagctgctggtgagccaggtgagacagctgcaggagggcgccgcccagctgagaaccgtgtacgccggcgagcacgccgaggccatcgccagcagagagcaggaggtgctgcagggctggaaggagctgctgagcgcctgcgaggacgccagactgcacgtgagcagcaccgccgacgccctgagattccacagccaggtgagagacctgctgagctggatggacggcatcgccagccagatcggcgccgccgacaagcccagagacgtgagcagcgtggaggtgctgatgaactaccaccagggcctgaagaccgagctggaggccagagtgcccgagctgaccacctgccaggagctgggcagaagcctgctgctgaacaagagcgccatggccgacgagatccaggcccagctggacaagctgggcaccagaaaggaggaggtgagcgagaagtgggacagacactgggagtggctgcagcagatgctggaggtgcaccagttcgcccaggaggccgtggtggccgacgcctggctgaccgcccaggagcccctgctgcagagcagagagctgggcagcagcgtggacgaggtggagcagctgatcagaagacacgaggccttcagaaaggccgccgccgcctgggaggagagattcagcagcctgagaagactgaccaccatcgagaagatcaaggccgagcagagcaagcagccccccacccccctgctgggcagaaagttcttcggcgaccccaccgagctggccgccaaggccgcccccctgctgagacccggcggctacgagagaggcctggagcccctggccagaagagccagcgacaccctgagcgccgaggtgagaaccagagtgggctacgtgagacaggagctgaagcccgagagactgcagcccagaatcgacagactgcccgagatccccggcagagtggagcccgccgccctgcccgccgcccccgaggacgccgccgagacccccgccacccccgccgccgccgagcaggtgagacccagacccgagagacaggagagcgccgacagagccgaggagctgcccagaagaagaagacccgagagacaggagagcgtggaccagagcgaggaggccgccagaagaagaagacccgagagacaggagagcgccgagcacgaggccgcccacagcctgaccctgggcagatacgagcagatggagagaagaagagagagaagagagagaagactggagagacaggagagcagcgagcaggagatgcccatcagaggcgacctggtgaagggcaaggccaccctggccgacatcgtggagcagctgcaggagaaggaggccggccccggcctgcccgccggccccagcctgccccagcccagagagctgccccccggcagactgcccaacggcctggagctgcccgagagaacccccagacccgacagacccagagccagagacagacccaagcccagaagaagacccagacccagagagggcggcgagggcggcggcagcagaagaagcagaagcgcccccgcccagggcggcagcgcccccgcccccccccccccccccacccacaccgtgcagcacgagggcttcctgctgagaaagagagagctggacgccaacagaaagagcagcaacagaagctgggtgagcctgtactgcgtgctgagcaagggcgagctgggcttctacaaggacagcaagggccccgccagcggcagcacccacggcggcgagcccctgctgagcctgcacaaggccaccagcgaggtggccagcgactacaagaagaagaagcacgtgttcaagctgcagacccaggacggcagcgagttcctgctgcaggccaaggacgaggaggagatgaacggctggctggaggccgtggccagcagcgtggccgagcacgccgagatcgccagatggggccagaccctgcccaccaccagcagcaccgacgagggcaaccccaagagagagggcggcgacagaagagccagcggcagaagaaagtag

SEQ ID NO: 206761 - DNA, 6465 bp, Artificial Sequence
  derived and/or modified sequence
atggcacaagttccaggcgaagtggacaacatggaaggcctgcctgcgcctaacaataacccggccgcacgttgggaatcgcccgatagagggtgggagcgagagcagcctgccgcctcgacagccgcagcctctttatttgagtgttcccgtattaaggcgctcgccgatgagagagaggccgtacagaaaaaaaccttcactaaatgggtcaacagccacctggcccgtgtcggatgccatataggcgacctgtacgtggatctgcgggacggtttcgtcctcacacggcttctggaagtgctatcaggtgaacagctaccccgacctacaaggggccggatgagaattcatagcctggagaatgtcgacaaagcgttgcagttcctgaaagaacagagggttcacctagagaacgtagggagtcatgacatcgtggatggtaaccacaggttgaccctgggccttgtctggacgatcattctgaggttccagatccaagtgatcaaaatcgagactgaagataatcgagaaacccggtccgctaaagacgccctcttgctctggtgccagatgaaaacagccgggtatcccgaagtgaacatccagaactttaccacttcatggcgggacggtctcgctttcaacgccctaatccatcgccaccggccggacctggtagatttctctaaactcactaagtccaacgctaactataatctgcagcgggccttccgaactgctgagcaacacttggggctggctcgactgctagatcctgaagatgtcaacatggaggccccggacgaaaagtcaatcatcacctacgtggttagtttctatcattatttcagcaagatgaaagctctcgctgtggagggtaaacgcattggaaaggttctggatcaggtattagaagtcggaaaaatcattgaaaggtatgaagagctggcggcagagctgctggcctggatccaccgtacggtaggactgatcagcaatcagaagttcgctaactccctttctggagtgcaacagcagctgcaagccttcactgcctactgtacccttgagaagcctgtcaaatttcaggagaagggcaacctggaggtgctgctgttctctattcagtcaaagttaagggcatgtaaccgcagactgtttgttccgagggagggatgtgggatctgggatattgacaaagcctggggagagctagaaaaagccgagcacgagcgggaagccgctctgagagctgagctcattaggcaagagaaactggaactcctggctcaaagatttgaccacaaagtggcaatgcgggagagctggctgaacgagaaccaaagactcgtcagccaggacaacttcgggtacgagttgcccgcagtcgaggcagctatgaagaaacacgaagcaatcgaagccgatatcgcagcttacgaggaacgcgtccagggtgtggcggagctggcccaagctttagctgcggaggggtactacgacatcaggcgggtggcagcacagagagattccgtcctccggcagtgggctctgcttactggcctggttggcgcaaggcgaactcgcctagaacagaatcttgcactccagaaggtgttccaagaaatggtgtacatggtggattggatggaggaaatgcaggctcaacttttgtcgagggagtgcggtcagcacctagtggaggctgacgacctcctgcagaagcacggactactcgaaggcgacatcgcggctcagtcggaaagggtggaagccctgaatgcggccgcgcttagattcagccaactacaggggtaccagccctgtgaccctcaagtcatatgtaatcgtgtcaaccatgtgcacggatgcctggccgaattgcaagaacaggcagctaggcggcgcgcagaactggaagccagcagaagcctgtgggctctactgcaggaacttgaagaggcagaatcttgggcccgggacaaggaaaggttgctggaggccgcgggcggaggcggtgcggccggcgccgctggagctgccggcacggctggcggagcacacgatctctctagtaccgcaaggctgctcgcccagcacaagatcctgcagggtgagctcggaggcaggcgggcgcttctccagcaagccctccgttgtggagaagagctggttgcagcgggtggagccgttggtcctggtgcggacaccgtccatcttgtagggctagcggagagagccgcatccgccagacgccggtggcagcgattagaggaggccgcggcccgtcgggagcgtcgcctgcaggaggcccgtgcccttcaccagtttggcgccgacctcgatgggcttcttgactggttgcgagacgcataccgtttagccgctgcaggcgatttcgggcacgacgaggcctcttcccggagactcgcaaggcagcatagggcactcacgggggaggtggaggcccaccggggcccggttagcggtctccgtcgacagctagccaccctgggcggagcttcgggagccggccctctggttgtagctctccaggtaagggtggtggaggccgagcagttgttcgcagaagtgaccgaagtcgccgcacttcgccgtcagtggctgcgggacgctttggctgtctatcggatgtttggtgaggtgcacgcctgcgaactgtggatcggtgaaaaggagcagtggctgttgagtatgcgcgtacccgacagcctcgatgatgtggaggttgtgcagcatagattcgagagcttagatcaagagatgaacagcttaatgggacgggtgctggacgtcaatcacaccgtgcaggagctggtggaaggcggacacccaagttccgatgaggttcgaagttgccaagatcacctgaactctcgctggaatcgaattgtagaactcgtggagcaaagaaaagaggagatgagtgcggtgctcctagtggaaaaccacgtattggaagtggctgaggtccgggcgcaggttcgggagaaacgacgtgctgtggagtccgcacctcgcgctgggggagcattgcagtggcgcctgagcggactggaagcagccttacaagctctggagcctcggcaggcagctttgctggaggaagcagccctgctggcagaaaggttccccgcccaggctgcgagactgcaccagggggccgaggagctgggcgcggagtggggagccctggccagcgccgcacaagcttgcggcgaggccgtggccgctgccggtagattgcagaggttcctgcacgacctggacgcgttcctcgattggctggtgagagctcaagaggcagccgggggctccgagggacctctgcctaacagcctggaggaagcggatgctttactggcccgccacgctgccctaaaggaggaagtggatcaaagggaagaggactacgcccgaatagtggctgcctctgaagccctgttggctgcagacggcgccgaactcggccccggactagcactggatgagtggcttccacacctcgagttaggctggcataagctgctgggcttatgggaggcacgtagggaagcattagtgcaggcccacatctaccaattgttcctgagagacctccgccaggctctggtcgttttacgtaatcaggagatggctctatccggagcggagctgcctggcactgtggaaagcgtggaagaggccttgaaacaacatcgcgattttctgacaacaatggaactgtctcagcagaaaatgcaagtcgcagtccaggcagctgaggggcttcttcggcagggcaacatctatggggaacaagcccaggaggctgtgaccagacttctcgaaaagaaccaagagaaccagctacgggcccagcagtggatgcagaaactccacgatcagttagaactccagcattttcttcgagattgtcatgaattggacgggtggatacatgaaaaaatgttaatggccagagatgggacccgcgaggacaatcacaagctccacaagcgctggcttaggcatcaggccttcatggccgagttggctcagaataaggagtggcttgaaaaaattgaacgagagggacagcaactgatgcaggaaaagcccgagctggcagctagcgtcagaaagaaactgggggagattcgccagtgttgggcagagctggagtccactacacaggccaaggcaagacaactgtttgaggcatctaaggccgaccagctagtgcaaagcttcgctgaactggataaaaagctgctccacatggagagccagctgcaggacgttgaccccgggggcgatctggcgacagttaatagccagctgaagaagctccagagcatggagtcccaggtcgaagagtggtatagggaggtgggtgaactacaggcccaaacagccgcactgcctttggaaccagcctcaaaggagctcgtgggtgagaggcagaatgccgtaggcgagcgcctggtccgtttattagaacctctgcaggagcgccggcgcctactcttagcctccaaagagttgcatcaggtggcccacgacctcgacgatgagctcgcatgggtgcaggagaggctgccactcgccatgcagactgagagagggaatggactgcaggctgtccagcaacatattaagaagaatcagggactgcggcgtgagatccaagcccacgggccgaggttagaggaagttctagaacgggcaggagctctggcatctctgaggtccccagaggccgaagccgtgagacgggggctggagcagctccagtcggcatgggctggactacgagaagcggcagagcgtagacagcaggtgctagacgctgcatttcaggtggaacagtattactttgacgttgccgaagtggaggcctggttaggggaacaggagctgctgatgatgtcagaagacaagggaaaggatgaacaaagcacgctacagcttttaaagaagcatcttcaattagagcagggcgtggagaattacgaggagtctattgcccaactatcgcgccaatgccgcgcactactcgaaatggggcaccctgacagtgaacagatcagtcggcgacagagccaggtggatagactctatgttgcactcaaagagctgggagaagagcggcgcgtagctcttgagcaacagtattggctatatcaactgtcccgtcaggtgtcagagctggagcattggatcgcagaaaaggaagtagtggccggctcccctgagttggggcaggactttgaacacgttagtgtgcttcaggaaaagttcagcgaattcgcgtcggagactggcatggcagggcgcgaaaggctcgccgccgtgaatcagatggtagacgagctgatcgagtgtgggcacaccgctgctgctaccatggcagagtggaaagacggtctgaatgaagcctgggccgaattactggaactgatgggcacaagagcccaactcctggcggcaagcagggagctgcacaagttcttctctgatgccagggaacttcagggccagatcgaggagaagcggagacggttgccaaggctgaccactccccctgagccacggccatctgcctcttccatgcagcggaccctccgagccttcgagcacgatctccaactgctggtgtcccaagtgagacagctacaggagggagccgcccagcttcggaccgtgtatgccggcgagcatgcagaagcaatcgcctcccgcgaacaagaggtgttgcaagggtggaaggagctgctgtcagcctgtgaggatgctcgcttgcacgtctctagcacggctgacgctctccgattccattcacaggttagggatctactatcgtggatggacgggatcgcatcacagattggagcggccgataagccccgggatgtgtcttccgtcgaggtcctcatgaattaccatcagggcttaaagacagaactcgaggccagagtgccggagctcacgacctgtcaagagctcggccgatccctgctcctgaataagagcgccatggcagatgaaatccaagcacaacttgataaactagggacaagaaaagaggaggtgagcgaaaagtgggacagacactgggaatggcttcagcagatgctcgaggttcaccagttcgcccaggaagctgttgttgcggacgcatggctcactgcccaggagccactgttacagagcagagaacttggctcttccgtcgacgaggtggagcaacttattcggcggcatgaagccttcaggaaagccgctgcagcatgggaggagcggttctcaagtcttcggaggttaacgacccccagaagggaggatcacctcaatcctggggtgcaggatcaaccatggcagcacaccgagaaaccatcattacctaaaccaaaagcaaacaaggagaaaactgcacgccgcgacggcacttgcctttag

SEQ ID NO: 206762 - DNA, 3930 bp, Artificial Sequence
  derived and/or modified sequence
atggcgcaagtacccggggaagtcgacaacatggaaggtctgcccgctcctaataacaatcccgcggcaagatgggaatctcccgacagaggctgggagcgtgagcagcctgccgctagcacagcagctgcttccctgttcgagtgctctcgcatcaaggccttggctgacgagcgtgaggccgttcagaagaagacattcaccaagtgggtgaattctcaccttgcccgggtgggctgtcatattggcgatctttatgtggaccttcgcgacggcttcgtgcttaccagactccttgaggtcctgtcgggagagcagctgcctcgtcccaccagggggcgaatgagaatacactccctcgagaacgtggataaggccctgcagtttctaaaggagcagcgagtccatcttgaaaatgtcgggtcgcacgacattgtggacggaaatcacagacttaccctgggactggtctggacaattattctgaggttccagatccaagtgatcaagatcgagaccgaagacaatagagagacccgtagcgccaaggatgctctcctgctctggtgccaaatgaagactgcagggtaccccgaagttaatatccagaatttcacgacatcctggcgagatgggttagcgtttaacgcactgatacacagacacaggcccgatcttgttgacttcagtaaattgactaagtccaatgcaaactataatctccaacgcgcgtttagaaccgccgagcagcacctcggcctggcccggcttctagatccggaggacgttaatatggaggctccagacgagaaaagtataatcacatacgtggtatcattctaccactatttctccaaaatgaaggctctagctgtagaaggcaaacgaataggcaaagtgctggaccaggtgctcgaggtgggcaaaatcatcgagcgctatgaagaactggcagccgagctgttagcctggatccatcgcaccgtaggcctgatttccaaccagaagtttgccaattctctgtcaggggtgcaacagcaattacaagcatttaccgcttactgtacgttagaaaaaccagtcaagtttcaagaaaagggcaacttggaagtgctgttgtttagtattcagagcaagctacgggcctgtaatcggaggctgtttgtacccagggagggctgtggcatctgggacatcgacaaagcttggggcgagctggagaaggctgaacacgaaagggaggccgcgcttcgtgcagaattaatccgccaggaaaagttggagctgctcgcccagcggtttgaccataaggtcgctatgcgggagtcctggcttaatgagaaccagagactcgtgtctcaggataattttgggtacgagctccctgccgtggaagcggcgatgaaaaaacatgaggcaattgaagctgatatcgccgcctatgaggaacgtgtccagggtgtagccgagttggcgcaggccttggccgctgaggggtattacgatatccggcgagtcgcagcacagagggattccgtgctgagacagtgggccctcctgacaggattggtcggggctagacgaacaaggcttgaacagaatctggcgcttcagaaggtgtttcaggagatggtctacatggttgattggatggaagagatgcaagcccagctcctgtcccgggaatgcggccaacacctggtagaggctgacgacctgctgcaaaaacacggcctgttggaaggagacatcgcagctcagtcagaacgtgtggaagctcttaacgccgccgctctgcgctttagccaattgcaaggctatcagccttgtgaccctcaggtaatctgcaaccgagttaatcacgtgcatggctgcttagcggagctgcaagagcaggccgcaagacggagggccgagctagaggcaagccgctccctttgggcgctgctgcaggagttagaagaggctgagtcctgggccagagacaaggagcggctgttggaagctgcaggtggtggaggagctgccggggcagctggggcagccggaaccgctggcggagcccacgaccttagctccacggcgcgactactcgcccagcataaaatcctccagggcgaactcggtggacggagggccttgcttcagcaggccctgcgatgcggcgaagagttagtcgcggccggcggcgcagtcggcccaggcgctgatactgtgcacctggttggtctggcagaaagggccgcctctgcaaggcgaaggtggcaaagactggaagaggccgcagctcgtagagaacggaggttgcaagaagctagggctctgcaccagttcggagccgacttggatggactcctggactggctgcgagatgcatacagattagccgccgccggcgatttcgggcacgatgaggcatcttcccggcgccttgcaagacagcaccgagcactaacgggggaagtggaggcccatagggggcccgtttctggcttaaggagacagttggccacactggggggggcctcaggggctggcccactggttgtggctctgcaggtccgcgtcgtcgaggctgagcagctctttgccgaggtgacagaagtagcggcactcaggcggcagtggctgcgagatgccctcgccgtgtatcggatgtttggtgaggtgcatgcatgcgagctatggattggagaaaaggagcagtggttgctgagtatgcgagtccctgactctctggatgacgtggaagtcgtacagcacagattcgagagtctagatcaagagatgaattctctcatgggccgggtgctggacgttaaccatacagttcaggaactggtagagggtggacatccgagtagcgacgaagtaaggagctgccaggaccatctaaactctagatggaatcggatagttgagctcgtcgagcagcggaaagaggagatgtccgctgtactgcttgtggagaatcacgttcttgaggtcgctgaagtgcgggcacaggttcgggaaaaaagaagggcggtagagagcgcgccccgggctggcggcgccctgcagtggcgcctctccggattggaggccgccctccaggccttggagcctagacaggccgccctgctggaggaggccgctcttctggccgaacgcttccccgcacaggcggctcgcctccaccaaggagccgaggagttaggcgccgagtggggcgctttggcttcagccgcccaggcttgcggagaggcagtggctgccgccggacgcctgcaacgcttcctgcacgacctcgatgctttcctggattggctcgtgcgcgctcaagaggccgcaggtggaagtgagggccctctgcccaatagcctggaggaagccgatgccttgctagcaagacatgccgctcttaaggaggaagtggatcagagagaagaagattatgccaggattgtggctgccagcgaagccctcctggcagccgacggcgccgagctgggacctggcttggcattggatgaatggctccctcatctggaactgggatggcacaagctgctgggtctttgggaggcccgtcgcgaggccctggtacaggcgcacatataccagctgtttctccgcgacctgcgtcaagctttggtagtcttgaggaatcaggagatggctctgtctggggccgaacttcccggtactgtagaatccgtcgaggaagctctgaagcagcatagggattttctcaccaccatggagttgagtcagcagaaaatgcaagtagctgttcaggccgccgagggtcttctgcggcagggcaatatttatggagagcaggctcaggaggcagttaccagactcctcgagaaatgcctgattattcatccagccctgctgcaccccccatgggaacccccagaccttccacgaagctcaagctag

SEQ ID NO: 206763 - DNA, 7695 bp, Artificial Sequence
  derived and/or modified sequence
atggcccaggttcctggcgaggtggataatatggagggactgcccgcccctaacaataacccagccgcccgctgggaatctcctgacaggggttgggagagagagcagcccgctgcttctaccgctgccgcctccctctttgaatgcagcaggatcaaagccctggcagatgaaagagaggccgtgcagaagaagaccttcacgaaatgggtaaattcccatcttgcgagagtagggtgtcacattggagacttgtacgtagatttgagggacggattcgtgctgacccgactgttggaggttctctctggggaacagctcccccggccaaccaggggccgcatgaggattcattctctcgaaaatgttgataaggctttacaatttctcaaggagcagagggtgcacttggaaaatgtcggatctcacgacatcgtggacggcaatcatcggctaacactgggactcgtgtggaccattatccttaggtttcaaattcaagtgattaaaatcgagacagaagacaaccgagaaaccaggtccgcaaaggacgccttgctgctatggtgccagatgaagaccgccggctatccggaagtgaatatccagaattttacaacctcctggagggacggcctggccttcaatgctctgattcacaggcatcgaccggatttagtggatttcagtaaactgacaaagtcaaatgctaactataacctccagagagcctttaggactgccgagcagcacctgggactggcacgactacttgaccccgaagatgtgaacatggaggccccagatgaaaagtctattatcacatatgtcgtaagcttctatcactacttcagcaaaatgaaagccctggcagtggaaggaaagaggatcggaaaagttcttgaccaggtgctggaggtgggaaagattatagaacggtatgaagaattggcagcagagctcctagcgtggatccaccgtaccgtgggcctcatctctaatcagaagtttgccaattccctgtctggggtgcagcagcagttgcaggccttcacagcctactgtaccctagagaagcccgtgaaattccaagaaaagggcaatttagaagttctgctgttcagcattcagtccaaacttagggcgtgcaaccgccgactcttcgttcctagggaggggtgtgggatttgggatatagacaaagcttggggtgagctcgagaaggcagaacacgagagagaagctgccctgagggccgagctcatcaggcaggagaaacttgaattactggcccagcgatttgaccacaaagtcgcaatgcgagagtcttggctgaacgaaaaccagagactggtgtcgcaggacaattttgggtacgaacttcccgcagtcgaagctgctatgaagaaacacgaggcgatagaggctgatatcgccgcctacgaagaacgggtgcagggggtggccgaactggcccaggccctcgccgcagaagggtactacgatatccgcagggttgccgctcagcgcgactccgtgctacgccaatgggcattactgaccggccttgtcggcgcccgcagaacacgacttgaacaaaatctggcgctacagaaggtgtttcaggagatggtctacatggtcgactggatggaggaaatgcaggcgcagctgctctccagagaatgtggccagcacctggtggaggccgatgatttactgcaaaaacacggactgctagagggagatattgccgcacagtccgaaagagtggaggctcttaacgccgccgccctaaggttttctcagctccagggctatcaaccatgtgacccacaggtgatctgcaatagggtgaatcacgtacatggttgtcttgctgaactccaggagcaagccgcccggcgcagggcagaactcgaggctagcaggtctctgtgggctctgctccaggaacttgaggaggccgaaagctgggcacgagataaagaacgcctgctggaggctgcaggaggcggcggtgccgccggggccgcaggcgccgctgggacagcaggaggggcccatgacctgtccagtaccgcacgcctgctggcacagcacaagatacttcaaggtgagttgggcggaaggagggcactcctccagcaggccctgcgatgcggcgaagagctggtggccgcaggtggcgcagttggcccgggcgccgataccgtgcacctcgtgggcctggctgaaagagcggcgtctgctcgccggcgttggcagcggctcgaagaggcagccgcaagacgcgagcggcgccttcaggaggcgcgtgctctgcaccagttcggggccgatctggacggtttgctcgactggctacgggacgcgtacaggttggctgctgccggcgatttcgggcacgatgaagcgtcaagtaggcgccttgcacgtcagcaccgcgccctgacaggtgaggtggaagcccatagaggccccgtgtccggccttaggcgacaactggccaccctgggcggagcatctggcgccggaccgttagttgtcgcattgcaggtgcgcgtcgtagaggccgaacagttgttcgctgaagttaccgaggtggccgccctcagacgccaatggctgagagatgcactggcggtctatcgaatgttcggcgaggtgcacgcatgtgaactgtggatcggagaaaaggaacagtggctgctatctatgcgcgttccagacagcctagacgatgtcgaagttgtgcaacaccggttcgaaagtctcgaccaggaaatgaattccttgatgggcagggtgctggacgtgaaccacacagtccaggagctcgtggaaggagggcacccaagttccgacgaggttcggagctgccaggaccatttgaactctcgatggaacaggatcgtggagctggtcgagcagcgtaaggaagagatgagcgccgtgctgctggtggagaatcatgtcctcgaggtggctgaggtacgagcccaagtgcgggagaaaagaagggccgtggagtcagcgccgagggccggtggcgcacttcagtggagactcagcggcctggaggcggcgctgcaagccttggaacctcggcaggccgcactgttagaggaagccgccctcctggcggagcgctttcccgcccaggctgcacgcctgcaccagggcgccgaggagctcggcgcagagtggggtgccctggccagtgctgctcaggcttgcggcgaggccgtcgcagcagctggaaggctgcagaggttcttacatgacctggatgcattcctagactggctggtgcgggcacaggaggccgccgggggttccgagggacccttgcccaactctctcgaagaggcagatgcgctccttgctcgccacgccgctctcaaggaggaagtggatcagagagaggaggactatgcaagaatagttgccgccagtgaggctctgcttgcggcagacggagcggagctaggcccaggcctggccctggatgagtggttgccccatcttgagctaggctggcacaaattgctggggctgtgggaagccaggcgagaggcacttgtgcaagcacatatataccagctctttttgagggacctaagacaggctcttgtggtcctcagaaaccaggagatggctctgtctggcgccgaactgcctgggactgtggagtccgtggaggaggctttaaagcaacaccgcgatttcctgaccactatggaactcagtcagcagaaaatgcaggtagctgtgcaggccgctgagggcctactgaggcagggcaatatttacggagaacaagctcaggaggcggtaacccgcttgctagagaagaatcaggaaaatcagctacgggcgcaacaatggatgcagaagttgcatgatcagttggaactccagcatttcctccgagattgccatgaactcgacggatggatacacgaaaagatgctgatggcccgagatggcacacgcgaggataatcacaagcttcataaacgctggctcagacaccaggcctttatggctgagctcgcacaaaacaaggaatggctcgagaagatcgagcgagaagggcagcagctcatgcaggaaaagcccgagcttgctgcctccgtccgtaaaaagctgggggaaatcagacaatgttgggctgagcttgaaagtacaacccaggcaaaagcccggcagctttttgaagctagtaaggctgatcagcttgttcagagcttcgctgaactggataaaaaattactccatatggagtcacagcttcaggatgtcgatccaggaggcgatttggccacagtaaactcccagttaaaaaagcttcaatcaatggagagccaggtcgaggagtggtacagagaggttggtgagctccaagcccaaactgctgctcttcctcttgagcctgcgagcaaagagctagtgggggaacgccaaaacgccgtaggagaaaggcttgtcaggctgctggagcccctacaggaacgacggcggctgctcctcgccagcaaagaactgcatcaggtggcccatgacttagatgacgagttggcttgggtgcaggagaggctcccgctggcaatgcaaacggagagaggtaacggcctccaggccgtgcagcagcatattaagaagaaccaaggtctgcggagggaaatccaggcacacggcccacggcttgaagaggtgctggaaagggccggcgccctggctagtctgcggtccccggaggcagaggcagtgaggagaggcctggaacagctgcagagtgcctgggccgggctcagggaggcagctgagaggcggcagcaggtgctggatgctgccttccaggttgagcagtattactttgacgtcgccgaggtcgaagcctggttgggcgaacaggaactactgatgatgagtgaggataaagggaaggatgaacagagcacactgcaactacttaaaaaacatctccagctcgaacagggggtggaaaattacgaagagagcatagcccaattaagtcggcaatgtagagccctgttggagatggggcaccctgatagcgaacagatctcccgacgacagtcgcaggtggatcgcctgtatgtagccctgaaagaactcggcgaagaacggcgggtggcccttgagcagcaatactggctctatcagctctctaggcaggtctccgaattggaacactggatcgccgagaaggaagtcgttgccggtagccccgagctgggacaggatttcgagcacgtgtcagtgctgcaagaaaaattttccgagttcgcttccgagaccggcatggctggacgcgagagattggccgctgtcaatcagatggtggatgagctgatcgagtgtggtcacaccgcggccgccactatggcagagtggaaagacgggctcaacgaagcctgggccgagctcctggagctcatggggaccagagcccagcttctggctgccagtcgtgaactccataagttcttcagcgacgctcgggagctccagggccagatcgaggagaagcggagaagactgccccgacttacaactccaccagagcctcgcccatcagcatcctctatgcaaaggaccttgagggcgtttgaacatgacctgcagttactcgtctctcaggttaggcagcttcaggagggcgctgcacagttgcgaaccgtgtacgccggcgagcacgctgaggccatagcaagccgggaacaagaggtcctgcaaggttggaaggaactcctgtccgcatgcgaggatgcccgtctgcacgtttcatcgacagcggacgccctccggtttcattcgcaggtgcgagacctgctcagctggatggacggaatcgcatcgcaaataggcgccgcagacaaacccagagatgtgagtagcgtggaagtgctgatgaactaccaccagggactgaaaacagagcttgaagcccgggttcctgaactgaccacctgccaggagctggggagaagccttttgctgaacaagtctgccatggccgacgagatacaggcccagcttgacaaacttggaaccaggaaggaggaagtatccgaaaaatgggatagacattgggagtggctccaacagatgcttgaagtgcatcagttcgcacaagaggccgttgtggccgacgcttggctgactgcccaggagcccctgctgcagagcagggagctgggatcctctgtggatgaggtggaacaactgatacgccgacacgaagcatttcggaaagccgcagcagcttgggaggaaaggttttcatcactgagaaggctaaccaccattgagaaaataaaggcggagcagtcaaagcagccgccaacccctctcctggggagaaagttctttggagaccccacagaactagccgctaaggctgcacctctgctgagacccggcggatacgagcgtggcctggagcccctcgcccgaagagctagcgatacgctgtcagctgaggtgagaaccagagttgggtacgtgcgccaggagctcaaaccagagcgcttgcagcccaggatcgaccggctgcccgagattcctggacgtgtagaaccagctgcactgcctgcagcacctgaggatgctgctgagacaccagcaacacccgctgcagcagagcaggtcagaccacggccggaaagacaggagagcgccgatcgggcggaagaactgccccgccggaggagaccagagagacaggagtctgttgaccagtccgaagaagccgctagacgcagaaggccagaaagacaagagagtgcagaacatgaggccgcacattcactcaccttgggtcggtatgaacagatggaacgccggcgggaaagacgggaacggcggcttgaaaggcaggagagctccgagcaagaaatgcccatcagaggcgatctggtaaagggcaaagccacgctggcagatatcgtggaacaacttcaagaaaaggaagccgggcctggcctgcccgccggcccctctttgccccagcccagagaactgcctccgggtaggctgccaaacggcctggaacttcccgaacggaccccccggcctgatcggcctcgggctcgggaccgtcccaagccccgaaggaggcccaggccacgagagggtggggagggaggtggaagtcgccgtagccgtagcgccccggctcagggggggagtgccccggcccctccaccaccaccaactcacaccgtgcagcacgaggggttcctgctccgaaaacgggaactggacgcgaaccgaaagtcatcaaaccgctcctgggtctctctctattgcgtgctgtcgaagggcgagctgggtttttataaggatagcaaggggccggcctcagggtccacgcatgggggggagcccctgctctcactgcataaggccacaagcgaggtggcctcagactacaaaaagaagaagcatgtctttaagctacaaactcaggacggctctgagttcctcctgcaggcaaaggacgaggaggaaatgaatggctggttggaggccgtggcttcaagtgttgctgagcacgccgagatcgcccggtgggggcaaacgctgcctacgactagctctacagacgagggcaatcccaagcgagagggcggggacagacgcgccagcggtagacggaagtag

SEQ ID NO: 206764 - DNA, 3924 bp, Artificial Sequence
  derived and/or modified sequence
atgccccactatccctcctgtagtagcgcgccatccctggggactccgagaccgccccagattcagcagctggaagcccgccatcgcaatcaggagaatcaactgcgtgcgcaacagtggatgcaaaaactgcacgaccagctggagcttcagcattttctccgtgactgccatgaattggacggctggattcatgaaaagatgcttatggcgagagacggcacccgagaagacaatcataagcttcacaagcgctggctgagacaccaagctttcatggccgagctcgcacagaataaagagtggttggaaaaaattgaacgggagggtcagcagttgatgcaggagaaaccagaactggccgcatccgtaagaaaaaagctgggagagattaggcagtgttgggcggagctcgaaagcactacccaggcaaaagcaaggcaattattcgaagcctcaaaggccgaccagctggtgcagtcattcgcggaattggataaaaagcttttacacatggaatctcagctccaggatgttgacccaggcggcgatctggccacagttaattctcaactcaagaagctccagtctatggagtcgcaggtagaagaatggtatagggaggtgggggagctacaggcccagactgccgctttgcccctggagccagcgtccaaggaactcgtgggggaaaggcaaaacgccgtaggggagcggttggtccgcctcctcgagccactgcaggagaggaggcggcttctgttggcctctaaagagctacatcaagtggcacacgatctcgacgatgaactggcctgggtccaggaacgtttaccactggctatgcaaaccgaaagggggaacggattacaggccgtgcagcagcacatcaagaagaaccagggcttaaggagggaaatccaagctcacggaccacggcttgaggaagtgctcgaaagagccggtgcactcgcaagcctgaggagccctgaagccgaggccgtcagaagggggttggagcagctgcaatccgcatgggccggactcagagaggctgcggaaagacgacagcaagtgctagatgcagccttccaggtggagcagtactactttgatgtcgccgaagtggaggcctggcttggagaacaggaattgctgatgatgtccgaagacaaaggaaaggatgaacagtcaactctacagttgctgaaaaagcatctgcagctcgaacaaggcgtagaaaactatgaagagtctattgcccaactgagtaggcaatgccgcgctctgctggaaatggggcatcccgactccgaacagatttctcgtaggcagagtcaagtggatcggctatacgtggccctgaaggaattaggggaggaacgacgagtggctctcgaacagcagtactggctgtatcaactgagcagacaggtgtccgagttggaacattggatagctgagaaagaagtggtggcgggaagccccgaactcggacaagattttgaacacgtttcagtgctgcaggaaaaattctctgagtttgcgtccgagacaggaatggctgggcgtgagcggctcgccgccgtcaaccaaatggtagatgagctcatagagtgtggccatactgcagccgctaccatggctgagtggaaagatgggttaaacgaagcttgggcagagctgctagaattgatgggtacccgcgcccagctcttagcagcttctagggaacttcacaaatttttttcagatgcccgagagcttcagggtcagattgaagagaaaaggcggcggctgccacgactgacgacccccccagaaccacgcccatcagccagctccatgcaaagaacactcagagcctttgaacacgacctccagctcctcgtgagccaagtgcgacagctgcaagagggtgcagcccaattgcggactgtgtacgccggggaacacgcagaagctatagcaagtcgcgagcaggaagtcttgcagggctggaaagaactcttatccgcctgcgaggatgcaaggctgcacgtgtcctccaccgccgacgcgctccgattccacagccaagtcagagaccttttgtcatggatggacggcattgctagtcagataggggccgcggacaagccacgggatgtgagctcagtggaggtgctgatgaactaccatcagggactcaaaaccgagctggaggcccgcgtgcccgaactcacgacctgtcaggaattgggccggagcttgttgttgaacaaaagtgccatggcggacgaaatccaggcccagctggataaactcggaactcggaaggaggaagtgtcagagaagtgggatcgacactgggagtggctgcaacagatgctcgaagtgcatcagttcgcccaggaggcagtagtcgctgacgcttggctcacggcccaagagcccctgttgcaatcaagagaattgggatcgtctgttgacgaggttgaacaacttattcgacgccacgaagccttccggaaggcagctgccgcctgggaagagaggttctcctcccttagacggctgaccaccatagagaagatcaaggccgagcagtccaagcagcctcccactcccctgctcgggaggaaatttttcggtgatccgacagaactcgccgcaaaggctgcacctctgctacgtccaggtgggtacgagagggggttagagccactggcccgccgtgcttctgacactttatctgccgaagtcagaacacgggttggttacgtccgacaagaactaaagcccgagcggctgcagcctagaatcgatcgcctgcctgagattcccggaagggtagaacccgcagcgcttcctgctgcacccgaggatgcagcggagactccggcgaccccagctgcagcagaacaggttcgcccccgaccagagaggcaggagtccgctgatcgggcggaagagctgcctagacgtcggaggccagaacggcaggagagcgtcgatcagagcgaggaagcagctcgcaggcgacgcccagagcgtcaggagtctgccgagcacgaggcggcacacagccttaccctcggtaggtacgaacagatggaacggcgcagagagcggagagagaggcggttagagcggcaggaatcatcagaacaggaaatgccaatccgcggagacttagttaagggcaaggcaactttggcggatatcgttgagcagctgcaggagaaagaagcaggaccaggactgcccgcaggaccttctctgcctcagccaagggagctccccccgggccggctgcctaatggtctggagctgcccgagcgtacaccacgaccagatcgtcctagagccagggatcgacctaagcctagaagaagaccccggccaagagaaggtggagaggggggtggcagtaggcgcagccggtcagcgccagcacagggaggcagcgctccagccccgccccctccaccgacacatacagttcagcacgaaggatttttgctaagaaagagagagcttgacgcaaaccggaaaagcagcaaccggtcttgggtgagtctctattgcgtgctgtcgaagggggagttgggtttttacaaagactcaaaaggtcctgcgagcggctctactcatgggggcgaaccgctgctcagcctccacaaggccacaagcgaggtcgctagcgattataaaaagaagaagcatgtgtttaaattacagacacaggacgggtccgaattcctccttcaggctaaggatgaggaggagatgaatgggtggttggaagcagttgctagctccgtggctgagcacgctgagatcgctagatggggtcagaccctgcccaccactagtagcacagacgagggaaatccaaaaagggaaggaggggataggcgggctagcggcaggcggaagtag

SEQ ID NO: 206765 - DNA, 7695 bp, Artificial Sequence
  derived and/or modified sequence
atggcccaggttcccggagaggtggacaacatggagggcctgcccgccccaaacaataatcccgctgctagatgggaaagccccgaccggggttgggagagagagcagcccgccgccagtacagccgctgcatctctcttcgaatgttcccgaataaaagccctggctgacgagagagaggctgtgcaaaaaaagacttttacgaagtgggtcaattcccacctggctcgcgtcgggtgccacataggggatctttatgtggatctgagagacgggttcgtgcttactaggctcctggaagttctgagcggtgaacaactaccacggccaacgagagggaggatgcggatccactccctggaaaatgtcgacaaagctctgcagtttctgaaagaacagcgggtacatttggaaaatgtcggatcccacgacatcgtggacggcaaccataggttgacactcggacttgtctggacaattatcctgcggtttcagattcaagtcataaagatcgaaaccgaagataaccgggagacacggtcagcgaaggatgcgttattgctatggtgtcagatgaaaactgccggatatcctgaggttaatatccaaaactttaccaccagctggcgagatggtctggcttttaatgccttgatccacaggcataggcctgatctcgtggacttcagcaaattaacaaagtcaaatgcaaactacaaccttcagcgggccttccggactgccgagcagcatctaggattggctcgcctgttggacccagaagatgtgaacatggaggcacccgatgagaaatccatcataacttacgtggtgagtttttatcactacttcagtaaaatgaaggccctcgcggttgagggcaagcgaattgggaaggtgttggaccaggtgctcgaggtgggcaagattattgaacgctatgaggaattagcagccgagcttctcgcttggattcatcgaacggtgggactgatctccaaccagaagttcgccaactcgctctccggggttcagcagcaactgcaagcttttaccgcctactgcacactcgaaaagcccgtaaagtttcaggaaaaagggaacctggaggttctcctcttcagcatccagtccaagctgagagcttgcaacaggaggctgttcgtaccgcgagagggttgcggaatatgggacatcgacaaagcctggggggaactcgagaaggctgagcacgaacgcgaggctgctctgcgcgccgagcttatccgacaggaaaagctggagctgctggcccagcgattcgatcataaggtagcgatgagggaatcttggcttaatgaaaaccagaggcttgttagtcaagataatttcggctatgagcttcctgctgtggaggccgccatgaaaaagcatgaggcaatcgaggccgatatcgccgcgtatgaagaacgggtccagggggtggccgagctggcgcaggccctggccgccgagggatactatgatatccgccgtgtggccgcgcagagagactcagtgctgcgccaatgggctttgctgaccggtctcgttggagctagaagaactcgcctagagcagaacctggcactccaaaaagtgtttcaagagatggtgtatatggtggactggatggaggagatgcaggctcagctgctatccagagagtgtggccagcacctggtggaggccgatgacttgctgcagaaacatggcttgctggaaggagatatcgctgcgcaatccgaacgtgtcgaggcattgaacgccgcagctctgaggttttcccagctccaaggctaccaaccttgtgatccacaggtgatttgcaaccgagtgaaccatgttcacggttgtctcgccgagctgcaggaacaggctgccagacgtagggctgaactcgaggcttccaggagtttgtgggcactcctgcaggagcttgaggaggctgagagttgggccagggataaggaaagactgctggaggccgccggaggcggaggcgccgctggtgccgcgggtgcagcggggacagcagggggagctcacgacttgtccagcaccgcacgactgctggcccagcacaaaattcttcagggcgaactgggagggcgcagggctcttttacaacaagcgctcagatgcggggaggagctggtcgccgcaggaggcgccgtgggtcctggggctgacaccgtgcacctggttggcctggccgagcgggcagccagcgcacgacgtagatggcaacgccttgaagaagcagcggcccggagggagaggaggctccaggaagcccgggccttgcaccagtttggtgcagacttggacggactccttgactggctgagagacgcctatagactcgccgctgcaggtgacttcggacacgacgaagcaagttctaggcgactcgctcgccagcaccgggcgctcaccggtgaggtggaggcccacaggggaccagtctcaggcttgcgccggcagcttgcaactctcggaggggccagcggcgccggtcccctggtcgtggcattgcaggtgcgcgtagtggaagctgagcagctctttgccgaggttacggaggtggccgctctcaggagacagtggcttagagacgcactggccgtgtacagaatgttcggagaggttcacgcttgcgaactgtggatcggggaaaaggaacagtggctattgagtatgcgagtgccggactctctggacgatgtagaggtggtgcaacaccggtttgagtccctggaccaggaaatgaactctctaatgggcagggtgctggatgttaatcacaccgtccaggaattggtggaaggggggcacccctcttccgatgaagtccgcagttgtcaggaccatttaaacagcagatggaaccgaattgtggaactggtagagcagcgaaaagaagagatgtccgcagtgttgctcgtcgaaaaccatgtactggaggtggccgaggtccgtgctcaagtccgcgagaagaggcgcgccgtggagtctgctccacgcgccggtggggcgttgcaatggcgcctgagcgggctggaggcagcgctccaggccctggagcctcgtcaggccgccctgctagaagaagctgctctgttggccgaacgtttcccagcccaggcagccaggctgcaccagggggccgaagagctgggagctgaatggggggccctggcaagcgctgcccaggcctgcggagaagcggtcgcagccgctggtagattgcagagatttctgcatgatctggacgcatttcttgactggcttgtaagggctcaggaagccgccgggggctctgagggtcccctgccaaattcgctggaggaggcagatgccctcttggcacggcacgcagcactcaaagaggaggtcgatcaacgcgaggaggattatgctcggatagtggctgccagcgaagcacttctggccgccgatggcgccgagctggggccaggactcgccttggatgagtggctgccccatctggaactcggatggcacaagctattggggctgtgggaagctcggagggaggccctcgtgcaggcccatatctaccaactcttcttgagggaccttcggcaagctttagtggtcttgagaaaccaggaaatggcactgtccggagccgagcttcctgggacagtagagagtgtggaagaggccctcaaacagcaccgggacttcctaaccaccatggagttgagccagcagaagatgcaggtggccgtgcaggccgcggagggcctcttacgtcaaggaaatatctatggcgagcaggcccaggaggctgttacccggctgttggagaagaatcaggaaaatcagttacgggcccagcaatggatgcaaaagctccatgaccagctggaactgcaacactttctgagagactgtcatgagcttgatggttggattcacgaaaagatgttaatggcacgcgatggtactagagaagataaccacaaactacacaaaagatggttgaggcaccaagcattcatggctgaactcgcccagaataaggaatggcttgagaaaatcgaacgggagggacagcaactgatgcaggagaaaccggaacttgctgcctcagtaaggaaaaagctgggagaaatcagacagtgttgggccgagctcgaatccaccacacaggctaaagcccgccagttgttcgaggcctctaaggctgaccagcttgtgcagtccttcgcagagctagataaaaagctgctgcacatggaatcccagcttcaggacgtagatcccggtggcgacctcgcaactgtgaatagtcagcttaagaagcttcagtcaatggaatcacaggtggaagaatggtatagagaggttggcgaactccaagcccagacagccgctctgcctctggagcctgcatcaaaagaattggtaggggaaaggcagaacgcagtgggagagagattggtacggttactggaacccctgcaagaacgacggagactgttacttgcgtcaaaggagctgcaccaggtggctcacgattggactacgagctgggcctgggtgcaagagaggctccccttagctatgcaaacagagcgaggtaacgggctgcaagctgtccagcagcacatcaagaagaaccagggtctgagacgagaaatccaggctcacggacctcgtttggaagaggtcctggagagggccggagcactggctagcctgaggagccccgaagcagaggccgtacgtagaggactggagcagctccagagcgcctgggctggactcagagaggcagcggagaggaggcagcaagtcttagacgccgcattccaggtggagcagtactatttcgacgtagccgaagtagaagcatggctcggggagcaagagttgctcatgatgtccgaagataaaggcaaggatgagcaatccaccttgcaactcctgaagaagcatcttcagctggaacagggtgtcgagaattacgaggagtcaatcgcacagctgagcaggcaatgtcgcgcccttttggaaatgggacacccggatagcgaacagatcagtaggagacagagtcaggtggataggctttatgtcgctttaaaagagcttggagaggaacgccgcgttgcgctcgagcaacagtactggctgtaccagttaagccgccaagtttcggaactcgagcactggatcgccgaaaaggaggtagtcgcaggcagcccagagctgggccaggatttcgaacatgttagtgtactgcaggagaagtttagcgaattcgccagcgagaccggcatggcaggccgggaaaggcttgctgccgttaatcagatggtcgatgaattaattgaatgtggacataccgcagccgctactatggctgaatggaaagacgggctgaacgaggcatgggccgaactcctcgagctgatgggcacgcgagctcagttgctcgctgctagcagagagctgcataaattttttagtgacgctagagaacttcagggacaaattgaggagaagcgaaggagactaccaaggctaacgacccccccagaaccccgccctagcgctagctctatgcagaggacacttcgagcgtttgagcacgacctccagctccttgtcagtcaagtgcgtcagttgcaggagggggccgcgcagctgagaactgtttacgctggcgaacacgcagaggccatcgcttcaagagagcaggaagtactgcagggatggaaagaactgttatccgcctgtgaggacgcccgactgcatgtgtcaagcacagcagacgctctgagattccatagccaggtgagagacctgctttcgtggatggatggcatagcgtctcagataggagccgccgacaaacctcgagatgtcagctctgtggaagtgctgatgaactaccatcaaggacttaaaaccgaactggaagctcgggtgcctgagctcaccacttgtcaggaactgggcaggagcctgctgctgaacaagtccgcaatggctgatgaaattcaggcccagttggataagctggggaccagaaaggaggaagtctctgaaaagtgggaccgccactgggaatggcttcagcaaatgctagaggtacaccaatttgctcaggaggcagtggtagctgacgcatggctcactgcgcaggagccactgctccaaagtcgcgagcttgggtcttcagtggacgaagtcgaacaactcattagaaggcatgaggcctttcgcaaagctgctgctgcttgggaagaacgtttttcgagcttgagacggctgacaacgatcgaaaagatcaaagcagaacaatcaaagcagccacccacacccctccttggtcggaaatttttcggggacccgaccgagctcgctgcaaaggccgcccccctcctgcggccagggggatatgaaagaggtctggaacccctggctcgacgcgcgtccgatactctcagcgctgaggtccgaaccagagttgggtacgttcgccaggagctaaagccagagaggctgcaacctaggatagacagactcccagagattcctgggcgagtcgaacctgcagcactgcctgccgccccagaagatgctgcagaaaccccagcaacccccgctgctgccgagcaggtgcgcccacgccccgaaagacaggagagcgccgaccgcgcagaagagcttcctagacgcagaaggccagagcgtcaggagtccgttgaccagtcagaagaggccgcacgccgacggagacctgagcgtcaggagagtgctgagcatgaagctgcgcatagcctgacactagggcggtacgagcagatggagaggcgcagggagcgccgggagagaaggctggagcggcaggaatctagtgaacaggaaatgccaatccgtggggacctcgtcaaggggaaggctacccttgcagacatcgttgagcaacttcaggagaaggaggccggccctggccttccagctggaccctcgttaccacagccaagagaactgcctcctggcagactgcctaacggcctagagttgcctgaacggactcctagaccagatagaccaagagccagggatcgtccaaagcctcgacgacgaccacgtccccgggagggaggcgaaggtggtgggagtaggcgcagtcgaagcgcccctgcccaggggggcagtgctcccgcccctcctcccccacctacgcacaccgttcagcatgaaggcttcctgttacggaaacgcgagctggacgctaaccggaaaagctctaaccgctcttgggtgtcgctgtactgcgtcctgtccaagggcgaactgggattctacaaagactctaaaggccccgcctctggtagtacgcatgggggcgagcctctgctgtcgcttcacaaagccaccagcgaagtcgcttcagactataaaaaaaaaaagcacgtctttaagctccaaacccaggacggctccgagttcctcctccaggccaaggatgaggaggagatgaatgggtggctcgaggcggtggcatcatctgtcgcagaacatgccgagatcgccaggtggggacaaaccctgccgaccacctctagcaccgatgaagggaatcctaaaagagaggggggggacagaagggccagcggacgacgaaaatag

SEQ ID NO: 206766 - DNA, 6465 bp, Artificial Sequence
  derived and/or modified sequence
atggcccaggtgcctggagaggtggacaacatggagggcctgcctgcccccaacaacaacccagctgcccgctgggagagcccagaccggggctgggagcgggagcagcctgctgccagcacagctgctgccagcctgtttgagtgcagccgcatcaaggccctggctgatgagcgggaggccgtgcagaagaagaccttcaccaagtgggtgaacagccacctggcccgggtgggctgccacatcggggacctgtatgtggacctgagagatggctttgtgctgacccggctgctggaggtgctgtctggagagcagctgccccggcccacccggggccgcatgaggatccacagcctggagaatgtggacaaggccctgcagttcctgaaggagcagagggtgcacctggagaatgtgggcagccatgacatcgtggatggcaaccaccggctgaccctgggcctggtgtggaccatcatcctgcgcttccagatccaggtgatcaagattgaaacagaggacaaccgggagaccaggtctgccaaggatgccctgctgctgtggtgccagatgaagacagctggctacccagaggtgaacatccagaacttcaccacctcctggagagatggcctggccttcaatgccctgatccaccgccacaggccagacctggtggacttcagcaagctgaccaagagcaatgccaactacaacctgcagagggccttcagaacagctgagcagcacctgggcctggcccggctgctggaccctgaagatgtgaacatggaggccccagatgagaagagcatcatcacctacgtggtgtccttctaccactacttcagcaagatgaaggccctggccgtggagggcaagagaattggcaaggtgctggaccaggtgctggaggtgggcaagatcatcgagagatatgaggagctggccgctgagctgctggcctggatccacaggacagtgggcctcatcagcaaccagaagtttgccaacagcctgagcggcgtgcagcagcagctgcaggccttcaccgcctactgcaccctggagaagcctgtgaagttccaggagaagggcaacctggaggtgctgctcttcagcatccagagcaagctgcgggcctgcaacagaagactctttgtgccccgggagggctgcggcatctgggacatcgacaaggcctggggcgagctggagaaggccgagcacgagcgggaggccgccctgcgggcagagctgatccggcaggagaagctggagctgctggcccagagatttgaccacaaggtggccatgagggagagctggctgaatgaaaaccagaggctggtgtcccaggacaactttggctatgagctgcctgctgtggaggccgccatgaagaagcatgaggccatcgaggccgacattgctgcctatgaggagcgggtgcagggcgtggccgagctggcccaggccctggccgctgagggctactatgacatccggcgggtggccgcccagagggacagcgtgctgcggcagtgggccctgctgaccggcctggtgggcgcccggaggacccggctggagcagaacctggccctgcagaaggtgttccaggagatggtgtacatggtggactggatggaggagatgcaggcccagctgctgagccgggagtgtggccagcacctggtggaggctgatgacctgctgcagaagcacggcctgctggagggggacattgctgcccagagcgagcgggtggaggccctgaatgctgctgccctgcgcttcagccagctgcagggctaccagccctgtgacccccaggtgatctgcaacagagtgaaccacgtgcacggctgcctggccgagctgcaggagcaggccgcccggcggcgggcagagctggaggccagccgcagcctgtgggccctgctgcaggagctggaggaggccgagagctgggcccgggacaaggagcggctgctggaggccgccggcggcggcggggccgccggggctgctggagctgctggaacagctggaggagcccatgacctgagcagcacagcccggctgctggcccagcacaagatcctgcagggcgagctgggcggcagaagagccctgctgcagcaggccctgcgctgtggggaggagctggtggccgccggcggcgctgtgggccctggagctgacacagtgcacctggtgggcctggccgagcgggccgccagcgcccggcggcgctggcagaggctggaggaggccgccgcccggcgggagcggcggctgcaggaggcccgggccctgcaccagtttggagctgacctggatggcctgctggactggctgagagatgcctaccgcctggccgccgccggggactttggacatgatgaggccagcagccggcggctggcccggcagcaccgggccctgactggagaggtggaggcccaccggggccctgtgtctggcctgcggcggcagctggccaccctgggcggggccagcggggccggccccctggtggtggccctgcaggtgcgggtggtggaggccgagcagctgtttgctgaggtgacagaggtggccgccctgcggcggcagtggctgagagatgccctggccgtgtacaggatgtttggagaggtgcacgcctgtgagctgtggattggagagaaggagcagtggctgctgtccatgagggtgcctgacagcctggatgatgtggaggtggtgcagcacagatttgagagcctggaccaggagatgaacagcctgatgggccgggtgctggatgtgaaccacacagtgcaggagctggtggagggcggccaccccagcagtgatgaggtgcgcagctgccaggaccacctgaacagccgctggaaccgcatcgtggagctggtggagcagaggaaggaggagatgtctgctgtgctgctggtggagaaccacgtgctggaggtggccgaggtgcgggcccaggtgcgggagaagagaagagctgtggagagcgccccccgggccggcggggccctgcagtggaggctgagcggcctggaggccgccctgcaggccctggagccccggcaggccgccctgctggaggaggccgccctgctggccgagcgcttccctgcccaggccgcccggctgcaccagggcgctgaggagctgggcgctgagtggggcgccctggccagcgctgcccaggcctgtggggaggccgtggccgctgctggccgcctgcagcgcttcctgcatgacctggatgccttcctggactggctggtgcgggcccaggaggccgccggcggcagcgagggccccctgcccaacagcctggaggaggctgatgccctgctggcccggcatgctgccctgaaggaggaggtggaccagcgggaggaggactatgccagaattgtggccgccagcgaggccctgctggccgcagatggagctgagctgggccctggcctggccctggatgagtggctgccccacctggagctgggctggcacaagctgctgggcctgtgggaggcccggcgggaggccctggtgcaggcccacatctaccagctgttcctgcgggacctgcggcaggccctggtggtgctgaggaaccaggagatggccctgtctggagctgagctgcccggcaccgtggagagcgtggaggaggccctgaagcagcaccgggacttcctgaccaccatggagctgagccagcagaagatgcaggtggccgtgcaggccgctgagggcctgctgcggcagggcaacatctacggggagcaggcccaggaggccgtgacccggctgctggagaagaaccaggagaaccagctgcgggcccagcagtggatgcagaagctgcatgaccagctggagctgcagcacttcctgcgggactgccacgagctggatggctggatccacgagaagatgctgatggccagagatggcacccgggaggacaaccacaagctgcacaagcgctggctgcggcaccaggccttcatggccgagctggcccagaacaaggagtggctggagaagattgagcgggagggccagcagctgatgcaggagaagccagagctggccgcctctgtgaggaagaagctgggggagatccggcagtgctgggccgagctggagagcaccacccaggccaaggcccggcagctgtttgaggccagcaaggctgaccagctggtgcagagctttgctgagctggacaagaagctgctgcacatggagagccagctgcaggatgtggaccccggcggggacctggccaccgtgaacagccagctgaagaagctgcagagcatggagagccaggtggaggagtggtaccgggaggtgggggagctgcaggcccagacagctgccctgcccctggagcccgccagcaaggagctggtgggggagcggcagaatgctgtgggggagcggctggtgcggctgctggagcccctgcaggagcggcggcggctgctgctggccagcaaggagctgcaccaggtggcccatgacctggatgatgagctggcctgggtgcaggagcggctgcccctggccatgcagacagaaagaggaaatggcctgcaggccgtgcagcagcacatcaagaagaaccagggcctgcggcgggagatccaggcccacggcccccggctggaggaggtgctggagcgggccggggccctggccagcctgcggagccctgaggccgaggccgtgagaagaggcctggagcagctgcagagcgcctgggccggcctgcgggaggccgctgagcggcggcagcaggtgctggatgctgccttccaggtggagcagtactactttgatgtggccgaggtggaggcctggctgggggagcaggagctgctgatgatgtctgaagataaaggcaaggatgagcagagcaccctgcagctgctgaagaagcacctgcagctggagcagggcgtggagaactatgaggagagcatcgcccagctgagccggcagtgccgggccctgctggagatgggccacccagattctgagcagatcagccggcggcagagccaggtggaccggctgtatgtggccctgaaggagctgggggaggagaggagagtggccctggagcagcagtactggctgtaccagctgagccggcaggtgtctgagctggagcactggattgctgagaaggaggtggtggccggcagccctgagctgggccaggactttgaacatgtgtctgtgctgcaggagaagttcagcgagtttgccagcgagaccggcatggccggccgggagcggctggccgctgtgaaccagatggtggatgagctgattgaatgtggccacacagctgctgccaccatggccgagtggaaggatggcctgaatgaggcctgggccgagctgctggagctgatgggcacccgggcccagctgctggccgccagccgggagctgcacaagttcttcagtgatgcccgggagctgcagggccagatcgaggagaagagaagaaggctgccccggctgaccaccccacctgagccccggcccagcgccagctccatgcagaggaccctgcgggcctttgaacatgacctgcagctgctggtgtcccaggtgcggcagctgcaggagggcgccgcccagctgaggacagtgtatgctggggagcacgccgaggccatcgccagccgggagcaggaggtgctgcagggctggaaggagctgctgagcgcctgtgaagatgcccggctgcacgtgagcagcacagcagatgccctgcgcttccacagccaggtgcgggacctgctgtcctggatggatggcatcgccagccagattggagctgctgacaagcccagagatgtgtcctctgtggaggtgctgatgaactaccaccagggcctgaagacagagctggaggcccgggtgcctgagctgaccacctgccaggagctgggccgcagcctgctgctgaacaagagcgccatggctgatgagatccaggcccagctggacaagctgggcaccaggaaggaggaggtgtctgagaagtgggacagacactgggagtggctgcagcagatgctggaggtgcaccagtttgcccaggaggccgtggtggctgatgcctggctgacagcccaggagcccctgctgcagagccgggagctgggcagctctgtggatgaggtggagcagctgatcagaagacatgaggccttcaggaaggctgctgctgcctgggaggagcgcttcagcagcctgcggcggctgaccaccccccggcgggaggaccacctgaaccctggggtgcaggaccagccctggcagcacacagagaagcccagcctgcccaagcccaaggccaacaaggagaagacagccaggagagatggcacctgcctgtag

SEQ ID NO: 206767 - DNA, 3930 bp, Artificial Sequence
  derived and/or modified sequence
atggcccaggtgcctggagaggtggacaacatggagggcctgcctgcccccaacaacaacccagctgcccgctgggagagcccagaccggggctgggagcgggagcagcctgctgccagcacagctgctgccagcctgtttgagtgcagccgcatcaaggccctggctgatgagcgggaggccgtgcagaagaagaccttcaccaagtgggtgaacagccacctggcccgggtgggctgccacatcggggacctgtatgtggacctgagagatggctttgtgctgacccggctgctggaggtgctgtctggagagcagctgccccggcccacccggggccgcatgaggatccacagcctggagaatgtggacaaggccctgcagttcctgaaggagcagagggtgcacctggagaatgtgggcagccatgacatcgtggatggcaaccaccggctgaccctgggcctggtgtggaccatcatcctgcgcttccagatccaggtgatcaagattgaaacagaggacaaccgggagaccaggtctgccaaggatgccctgctgctgtggtgccagatgaagacagctggctacccagaggtgaacatccagaacttcaccacctcctggagagatggcctggccttcaatgccctgatccaccgccacaggccagacctggtggacttcagcaagctgaccaagagcaatgccaactacaacctgcagagggccttcagaacagctgagcagcacctgggcctggcccggctgctggaccctgaagatgtgaacatggaggccccagatgagaagagcatcatcacctacgtggtgtccttctaccactacttcagcaagatgaaggccctggccgtggagggcaagagaattggcaaggtgctggaccaggtgctggaggtgggcaagatcatcgagagatatgaggagctggccgctgagctgctggcctggatccacaggacagtgggcctcatcagcaaccagaagtttgccaacagcctgagcggcgtgcagcagcagctgcaggccttcaccgcctactgcaccctggagaagcctgtgaagttccaggagaagggcaacctggaggtgctgctcttcagcatccagagcaagctgcgggcctgcaacagaagactctttgtgccccgggagggctgcggcatctgggacatcgacaaggcctggggcgagctggagaaggccgagcacgagcgggaggccgccctgcgggcagagctgatccggcaggagaagctggagctgctggcccagagatttgaccacaaggtggccatgagggagagctggctgaatgaaaaccagaggctggtgtcccaggacaactttggctatgagctgcctgctgtggaggccgccatgaagaagcatgaggccatcgaggccgacattgctgcctatgaggagcgggtgcagggcgtggccgagctggcccaggccctggccgctgagggctactatgacatccggcgggtggccgcccagagggacagcgtgctgcggcagtgggccctgctgaccggcctggtgggcgcccggaggacccggctggagcagaacctggccctgcagaaggtgttccaggagatggtgtacatggtggactggatggaggagatgcaggcccagctgctgagccgggagtgtggccagcacctggtggaggctgatgacctgctgcagaagcacggcctgctggagggggacattgctgcccagagcgagcgggtggaggccctgaatgctgctgccctgcgcttcagccagctgcagggctaccagccctgtgacccccaggtgatctgcaacagagtgaaccacgtgcacggctgcctggccgagctgcaggagcaggccgcccggcggcgggcagagctggaggccagccgcagcctgtgggccctgctgcaggagctggaggaggccgagagctgggcccgggacaaggagcggctgctggaggccgccggcggcggcggggccgccggggctgctggagctgctggaacagctggaggagcccatgacctgagcagcacagcccggctgctggcccagcacaagatcctgcagggcgagctgggcggcagaagagccctgctgcagcaggccctgcgctgtggggaggagctggtggccgccggcggcgctgtgggccctggagctgacacagtgcacctggtgggcctggccgagcgggccgccagcgcccggcggcgctggcagaggctggaggaggccgccgcccggcgggagcggcggctgcaggaggcccgggccctgcaccagtttggagctgacctggatggcctgctggactggctgagagatgcctaccgcctggccgccgccggggactttggacatgatgaggccagcagccggcggctggcccggcagcaccgggccctgactggagaggtggaggcccaccggggccctgtgtctggcctgcggcggcagctggccaccctgggcggggccagcggggccggccccctggtggtggccctgcaggtgcgggtggtggaggccgagcagctgtttgctgaggtgacagaggtggccgccctgcggcggcagtggctgagagatgccctggccgtgtacaggatgtttggagaggtgcacgcctgtgagctgtggattggagagaaggagcagtggctgctgtccatgagggtgcctgacagcctggatgatgtggaggtggtgcagcacagatttgagagcctggaccaggagatgaacagcctgatgggccgggtgctggatgtgaaccacacagtgcaggagctggtggagggcggccaccccagcagtgatgaggtgcgcagctgccaggaccacctgaacagccgctggaaccgcatcgtggagctggtggagcagaggaaggaggagatgtctgctgtgctgctggtggagaaccacgtgctggaggtggccgaggtgcgggcccaggtgcgggagaagagaagagctgtggagagcgccccccgggccggcggggccctgcagtggaggctgagcggcctggaggccgccctgcaggccctggagccccggcaggccgccctgctggaggaggccgccctgctggccgagcgcttccctgcccaggccgcccggctgcaccagggcgctgaggagctgggcgctgagtggggcgccctggccagcgctgcccaggcctgtggggaggccgtggccgctgctggccgcctgcagcgcttcctgcatgacctggatgccttcctggactggctggtgcgggcccaggaggccgccggcggcagcgagggccccctgcccaacagcctggaggaggctgatgccctgctggcccggcatgctgccctgaaggaggaggtggaccagcgggaggaggactatgccagaattgtggccgccagcgaggccctgctggccgcagatggagctgagctgggccctggcctggccctggatgagtggctgccccacctggagctgggctggcacaagctgctgggcctgtgggaggcccggcgggaggccctggtgcaggcccacatctaccagctgttcctgcgggacctgcggcaggccctggtggtgctgaggaaccaggagatggccctgtctggagctgagctgcccggcaccgtggagagcgtggaggaggccctgaagcagcaccgggacttcctgaccaccatggagctgagccagcagaagatgcaggtggccgtgcaggccgctgagggcctgctgcggcagggcaacatctacggggagcaggcccaggaggccgtgacccggctgctggagaagtgcctgatcatccacccagccctgctgcaccccccctgggagcccccagacctgcccaggagcagcagctag

SEQ ID NO: 206768 - DNA, 7695 bp, Artificial Sequence
  derived and/or modified sequence
atggcccaggtgcctggagaggtggacaacatggagggcctgcctgcccccaacaacaacccagctgcccgctgggagagcccagaccggggctgggagcgggagcagcctgctgccagcacagctgctgccagcctgtttgagtgcagccgcatcaaggccctggctgatgagcgggaggccgtgcagaagaagaccttcaccaagtgggtgaacagccacctggcccgggtgggctgccacatcggggacctgtatgtggacctgagagatggctttgtgctgacccggctgctggaggtgctgtctggagagcagctgccccggcccacccggggccgcatgaggatccacagcctggagaatgtggacaaggccctgcagttcctgaaggagcagagggtgcacctggagaatgtgggcagccatgacatcgtggatggcaaccaccggctgaccctgggcctggtgtggaccatcatcctgcgcttccagatccaggtgatcaagattgaaacagaggacaaccgggagaccaggtctgccaaggatgccctgctgctgtggtgccagatgaagacagctggctacccagaggtgaacatccagaacttcaccacctcctggagagatggcctggccttcaatgccctgatccaccgccacaggccagacctggtggacttcagcaagctgaccaagagcaatgccaactacaacctgcagagggccttcagaacagctgagcagcacctgggcctggcccggctgctggaccctgaagatgtgaacatggaggccccagatgagaagagcatcatcacctacgtggtgtccttctaccactacttcagcaagatgaaggccctggccgtggagggcaagagaattggcaaggtgctggaccaggtgctggaggtgggcaagatcatcgagagatatgaggagctggccgctgagctgctggcctggatccacaggacagtgggcctcatcagcaaccagaagtttgccaacagcctgagcggcgtgcagcagcagctgcaggccttcaccgcctactgcaccctggagaagcctgtgaagttccaggagaagggcaacctggaggtgctgctcttcagcatccagagcaagctgcgggcctgcaacagaagactctttgtgccccgggagggctgcggcatctgggacatcgacaaggcctggggcgagctggagaaggccgagcacgagcgggaggccgccctgcgggcagagctgatccggcaggagaagctggagctgctggcccagagatttgaccacaaggtggccatgagggagagctggctgaatgaaaaccagaggctggtgtcccaggacaactttggctatgagctgcctgctgtggaggccgccatgaagaagcatgaggccatcgaggccgacattgctgcctatgaggagcgggtgcagggcgtggccgagctggcccaggccctggccgctgagggctactatgacatccggcgggtggccgcccagagggacagcgtgctgcggcagtgggccctgctgaccggcctggtgggcgcccggaggacccggctggagcagaacctggccctgcagaaggtgttccaggagatggtgtacatggtggactggatggaggagatgcaggcccagctgctgagccgggagtgtggccagcacctggtggaggctgatgacctgctgcagaagcacggcctgctggagggggacattgctgcccagagcgagcgggtggaggccctgaatgctgctgccctgcgcttcagccagctgcagggctaccagccctgtgacccccaggtgatctgcaacagagtgaaccacgtgcacggctgcctggccgagctgcaggagcaggccgcccggcggcgggcagagctggaggccagccgcagcctgtgggccctgctgcaggagctggaggaggccgagagctgggcccgggacaaggagcggctgctggaggccgccggcggcggcggggccgccggggctgctggagctgctggaacagctggaggagcccatgacctgagcagcacagcccggctgctggcccagcacaagatcctgcagggcgagctgggcggcagaagagccctgctgcagcaggccctgcgctgtggggaggagctggtggccgccggcggcgctgtgggccctggagctgacacagtgcacctggtgggcctggccgagcgggccgccagcgcccggcggcgctggcagaggctggaggaggccgccgcccggcgggagcggcggctgcaggaggcccgggccctgcaccagtttggagctgacctggatggcctgctggactggctgagagatgcctaccgcctggccgccgccggggactttggacatgatgaggccagcagccggcggctggcccggcagcaccgggccctgactggagaggtggaggcccaccggggccctgtgtctggcctgcggcggcagctggccaccctgggcggggccagcggggccggccccctggtggtggccctgcaggtgcgggtggtggaggccgagcagctgtttgctgaggtgacagaggtggccgccctgcggcggcagtggctgagagatgccctggccgtgtacaggatgtttggagaggtgcacgcctgtgagctgtggattggagagaaggagcagtggctgctgtccatgagggtgcctgacagcctggatgatgtggaggtggtgcagcacagatttgagagcctggaccaggagatgaacagcctgatgggccgggtgctggatgtgaaccacacagtgcaggagctggtggagggcggccaccccagcagtgatgaggtgcgcagctgccaggaccacctgaacagccgctggaaccgcatcgtggagctggtggagcagaggaaggaggagatgtctgctgtgctgctggtggagaaccacgtgctggaggtggccgaggtgcgggcccaggtgcgggagaagagaagagctgtggagagcgccccccgggccggcggggccctgcagtggaggctgagcggcctggaggccgccctgcaggccctggagccccggcaggccgccctgctggaggaggccgccctgctggccgagcgcttccctgcccaggccgcccggctgcaccagggcgctgaggagctgggcgctgagtggggcgccctggccagcgctgcccaggcctgtggggaggccgtggccgctgctggccgcctgcagcgcttcctgcatgacctggatgccttcctggactggctggtgcgggcccaggaggccgccggcggcagcgagggccccctgcccaacagcctggaggaggctgatgccctgctggcccggcatgctgccctgaaggaggaggtggaccagcgggaggaggactatgccagaattgtggccgccagcgaggccctgctggccgcagatggagctgagctgggccctggcctggccctggatgagtggctgccccacctggagctgggctggcacaagctgctgggcctgtgggaggcccggcgggaggccctggtgcaggcccacatctaccagctgttcctgcgggacctgcggcaggccctggtggtgctgaggaaccaggagatggccctgtctggagctgagctgcccggcaccgtggagagcgtggaggaggccctgaagcagcaccgggacttcctgaccaccatggagctgagccagcagaagatgcaggtggccgtgcaggccgctgagggcctgctgcggcagggcaacatctacggggagcaggcccaggaggccgtgacccggctgctggagaagaaccaggagaaccagctgcgggcccagcagtggatgcagaagctgcatgaccagctggagctgcagcacttcctgcgggactgccacgagctggatggctggatccacgagaagatgctgatggccagagatggcacccgggaggacaaccacaagctgcacaagcgctggctgcggcaccaggccttcatggccgagctggcccagaacaaggagtggctggagaagattgagcgggagggccagcagctgatgcaggagaagccagagctggccgcctctgtgaggaagaagctgggggagatccggcagtgctgggccgagctggagagcaccacccaggccaaggcccggcagctgtttgaggccagcaaggctgaccagctggtgcagagctttgctgagctggacaagaagctgctgcacatggagagccagctgcaggatgtggaccccggcggggacctggccaccgtgaacagccagctgaagaagctgcagagcatggagagccaggtggaggagtggtaccgggaggtgggggagctgcaggcccagacagctgccctgcccctggagcccgccagcaaggagctggtgggggagcggcagaatgctgtgggggagcggctggtgcggctgctggagcccctgcaggagcggcggcggctgctgctggccagcaaggagctgcaccaggtggcccatgacctggatgatgagctggcctgggtgcaggagcggctgcccctggccatgcagacagaaagaggaaatggcctgcaggccgtgcagcagcacatcaagaagaaccagggcctgcggcgggagatccaggcccacggcccccggctggaggaggtgctggagcgggccggggccctggccagcctgcggagccctgaggccgaggccgtgagaagaggcctggagcagctgcagagcgcctgggccggcctgcgggaggccgctgagcggcggcagcaggtgctggatgctgccttccaggtggagcagtactactttgatgtggccgaggtggaggcctggctgggggagcaggagctgctgatgatgtctgaagataaaggcaaggatgagcagagcaccctgcagctgctgaagaagcacctgcagctggagcagggcgtggagaactatgaggagagcatcgcccagctgagccggcagtgccgggccctgctggagatgggccacccagattctgagcagatcagccggcggcagagccaggtggaccggctgtatgtggccctgaaggagctgggggaggagaggagagtggccctggagcagcagtactggctgtaccagctgagccggcaggtgtctgagctggagcactggattgctgagaaggaggtggtggccggcagccctgagctgggccaggactttgaacatgtgtctgtgctgcaggagaagttcagcgagtttgccagcgagaccggcatggccggccgggagcggctggccgctgtgaaccagatggtggatgagctgattgaatgtggccacacagctgctgccaccatggccgagtggaaggatggcctgaatgaggcctgggccgagctgctggagctgatgggcacccgggcccagctgctggccgccagccgggagctgcacaagttcttcagtgatgcccgggagctgcagggccagatcgaggagaagagaagaaggctgccccggctgaccaccccacctgagccccggcccagcgccagctccatgcagaggaccctgcgggcctttgaacatgacctgcagctgctggtgtcccaggtgcggcagctgcaggagggcgccgcccagctgaggacagtgtatgctggggagcacgccgaggccatcgccagccgggagcaggaggtgctgcagggctggaaggagctgctgagcgcctgtgaagatgcccggctgcacgtgagcagcacagcagatgccctgcgcttccacagccaggtgcgggacctgctgtcctggatggatggcatcgccagccagattggagctgctgacaagcccagagatgtgtcctctgtggaggtgctgatgaactaccaccagggcctgaagacagagctggaggcccgggtgcctgagctgaccacctgccaggagctgggccgcagcctgctgctgaacaagagcgccatggctgatgagatccaggcccagctggacaagctgggcaccaggaaggaggaggtgtctgagaagtgggacagacactgggagtggctgcagcagatgctggaggtgcaccagtttgcccaggaggccgtggtggctgatgcctggctgacagcccaggagcccctgctgcagagccgggagctgggcagctctgtggatgaggtggagcagctgatcagaagacatgaggccttcaggaaggctgctgctgcctgggaggagcgcttcagcagcctgcggcggctgaccaccatcgagaagatcaaggccgagcagagcaagcagccccccacccccctgctgggcaggaagttcttcggggaccccacagagctggccgccaaggccgcccccctgctgcggcctgggggctatgagcggggcctggagcccctggcccggcgggccagtgacaccctgtctgctgaggtgaggaccagggtgggctacgtgcggcaggagctgaagccagagcggctgcagcccagaattgaccggctgcctgagatccctggccgggtggagcctgctgccctgcctgctgccccagaagatgctgctgagaccccagccaccccagctgctgctgagcaggtgcggcccaggcctgagcggcaggagagcgctgacagagctgaggagctgcccaggagaagaagacctgagcggcaggagagcgtggaccagagcgaggaggccgccaggagaagaagacctgagcggcaggagagcgctgagcatgaagctgcccacagcctgaccctgggccgctatgagcagatggagcggcggcgggagcggcgggagcggcggctggagcggcaggagagcagcgagcaggagatgcccatccggggggacctggtgaagggcaaggccaccctggccgacatcgtggagcagctgcaggagaaggaggccggccctggcctgcctgctggccccagcctgccccagccccgggagctgcccccaggccgcctgcccaacggcctggagctgcctgagaggacccccaggccagaccggccccgggcccgggaccggcccaagccccggcggcggccccggccccgggagggcggggagggcggcggcagccgccgcagccgcagcgccccagcccagggcggcagcgccccagcccctcctcctccacccacccacacagtgcagcacgagggcttcctgctgaggaagcgggagctggatgccaacaggaagagcagcaacagatcctgggtgtccctgtactgtgtgctgagcaaaggagagctgggcttctacaaggacagcaaaggacctgccagcggcagcacccatggaggagagcccctgctgagcctgcacaaggccaccagcgaggtggccagtgactacaagaagaagaagcacgtgttcaagctgcagacccaggacggcagcgagttcctgctgcaggccaaggatgaggaggagatgaatggctggctggaggccgtggccagctctgtggccgagcacgccgagatcgcccgctggggccagaccctgcccaccaccagcagcacagatgagggcaaccccaagcgggagggcggggacagaagagccagcggccgcaggaagtag

SEQ ID NO: 206769 - DNA, 3924 bp, Artificial Sequence
  derived and/or modified sequence
atgccccactaccccagctgcagcagcgcccccagcctgggcaccccccggcccccccagatccagcagctggaggcccggcacaggaaccaggagaaccagctgcgggcccagcagtggatgcagaagctgcatgaccagctggagctgcagcacttcctgcgggactgccacgagctggatggctggattcatgagaagatgctgatggccagagatggcacccgggaggacaaccacaagctgcacaagcgctggctgcggcaccaggccttcatggccgagctggcccagaacaaggagtggctggagaagattgaaagagagggccagcagctgatgcaggagaagccagagctggccgcctctgtgaggaagaagctgggggagatccggcagtgctgggccgagctggagagcaccacccaggccaaggcccggcagctgtttgaggccagcaaggctgaccagctggtgcagagctttgctgagctggacaagaagctgctgcacatggagagccagctgcaggatgtggaccctggaggagacctggccaccgtgaacagccagctgaagaagctgcagagcatggagagccaggtggaggagtggtaccgggaggtgggggagctgcaggcccagacagctgccctgcccctggagcccgccagcaaggagctggtgggggagcggcagaatgctgtgggggagcggctggtgcggctgctggagcccctgcaggagcggcggcggctgctgctggccagcaaggagctgcaccaggtggcccatgacctggatgatgagctggcctgggtgcaggagcggctgcccctggccatgcagacagaaagaggaaatggcctgcaggccgtgcagcagcacatcaagaagaaccagggcctgcggcgggagatccaggcccacggcccccggctggaggaggtgctggagagagctggggccctggccagcctgcggagccctgaggccgaggccgtgcggcggggcctggagcagctgcagagcgcctgggccggcctgcgggaggccgctgagcggcggcagcaggtgctggatgctgccttccaggtggagcagtactactttgatgtggccgaggtggaggcctggctgggggagcaggagctgctgatgatgtctgaggacaagggcaaggatgagcagagcaccctgcagctgctgaagaagcacctgcagctggagcagggcgtggagaactatgaggagagcatcgcccagctgagccggcagtgccgggccctgctggagatgggccacccagacagcgagcagatcagccggcggcagagccaggtggaccggctgtatgtggccctgaaggagctgggggaggagcggcgggtggccctggagcagcagtactggctgtaccagctgagccggcaggtgtctgagctggagcactggattgctgagaaggaggtggtggccggcagccctgagctgggccaggactttgagcacgtgtctgtgctgcaggagaagttcagcgagtttgccagcgagaccggcatggccggccgggagcggctggccgctgtgaaccagatggtggatgagctgattgaatgtggccacacagctgctgccaccatggccgagtggaaggatggcctgaatgaggcctgggccgagctgctggagctgatgggcacccgggcccagctgctggccgccagccgggagctgcacaagttcttcagtgatgcccgggagctgcagggccagatcgaggagaagagaagaaggctgccccggctgaccaccccacctgagccccggcccagcgccagctccatgcagaggaccctgcgggcctttgaacatgacctgcagctgctggtgtcccaggtgcggcagctgcaggagggcgccgcccagctgaggacagtgtatgctggggagcacgccgaggccatcgccagccgggagcaggaggtgctgcagggctggaaggagctgctgagcgcctgtgaagatgcccggctgcacgtgagcagcacagcagatgccctgcgcttccacagccaggtgcgggacctgctgtcctggatggatggcatcgccagccagatcggggctgctgacaagcccagagatgtgtcctctgtggaggtgctgatgaactaccaccagggcctgaagacagagctggaggcccgggtgcctgagctgaccacctgccaggagctgggccgcagcctgctgctgaacaagagcgccatggctgatgagatccaggcccagctggacaagctgggcaccaggaaggaggaggtgtctgagaagtgggacagacactgggagtggctgcagcagatgctggaggtgcaccagtttgcccaggaggccgtggtggctgatgcctggctgacagcccaggagcccctgctgcagagccgggagctgggcagctctgtggatgaggtggagcagctgatcagaagacatgaggccttcaggaaggctgctgctgcctgggaggagcgcttcagcagcctgcggcggctgaccaccatcgagaagatcaaggccgagcagagcaagcagccccccacccccctgctgggcaggaagttctttggagaccccacagagctggccgccaaggccgcccccctgctgcggcctgggggctatgaaagaggcctggagcccctggcccggcgggccagtgacaccctgtctgctgaggtgaggaccagggtgggctacgtgcggcaggagctgaagccagagcggctgcagcccagaattgaccggctgcctgagatccctggccgggtggagcctgctgccctgcctgctgccccagaagatgctgctgagaccccagccaccccagctgctgctgagcaggtgcggcccaggcctgagcggcaggagagcgctgacagagctgaggagctgcccaggagaagaagacctgagcggcaggagagcgtggaccagagcgaggaggccgccaggagaagaagacctgagcggcaggagagcgctgagcacgaggccgcccacagcctgaccctgggccgctatgagcagatggagaggagaagagagcggcgggagcggcggctggagcggcaggagagcagcgagcaggagatgcccatccggggggacctggtgaagggcaaggccaccctggccgacatcgtggagcagctgcaggagaaggaggccggccctggcctgcctgctggccccagcctgccccagccccgggagctgcccccaggccgcctgcccaacggcctggagctgcctgagaggacccccaggccagaccggccccgggcccgggaccggcccaagcccaggagaagaccccggccccgggagggcggggagggcggcggcagcagaagaagccgcagcgccccagcccagggcggcagcgccccagcccctcctcctccacccacccacacagtgcagcacgagggcttcctgctgaggaagcgggagctggatgccaacaggaagagcagcaacagatcctgggtgtccctgtactgtgtgctgagcaagggggagctgggcttctacaaggacagcaagggccctgccagcggcagcacccacggcggggagcccctgctgagcctgcacaaggccaccagcgaggtggccagtgactacaagaagaagaagcacgtgttcaagctgcagacccaggacggcagcgagttcctgctgcaggccaaggatgaggaggagatgaatggctggctggaggccgtggccagctctgtggccgagcacgccgagatcgcccgctggggccagaccctgcccaccaccagcagcacagatgagggcaaccccaagcgggagggcggggaccggcgggccagcggccgcaggaagtag

SEQ ID NO: 206770 - DNA, 7695 bp, Artificial Sequence
  derived and/or modified sequence
atggcccaggtgcctggagaggtggacaacatggagggcctgcctgcccccaacaacaacccagctgcccgctgggagagcccagaccggggctgggagcgggagcagcctgctgccagcacagctgctgccagcctgtttgagtgcagccgcatcaaggccctggctgatgagcgggaggccgtgcagaagaagaccttcaccaagtgggtgaacagccacctggcccgggtgggctgccacatcggggacctgtatgtggacctgagagatggctttgtgctgacccggctgctggaggtgctgtctggagagcagctgccccggcccacccggggccgcatgaggatccacagcctggagaatgtggacaaggccctgcagttcctgaaggagcagagggtgcacctggagaatgtgggcagccatgacatcgtggatggcaaccaccggctgaccctgggcctggtgtggaccatcatcctgcgcttccagatccaggtgatcaagattgaaacagaggacaaccgggagaccaggtctgccaaggatgccctgctgctgtggtgccagatgaagacagctggctacccagaggtgaacatccagaacttcaccacctcctggagagatggcctggccttcaatgccctgatccaccgccacaggccagacctggtggacttcagcaagctgaccaagagcaatgccaactacaacctgcagagggccttcagaacagctgagcagcacctgggcctggcccggctgctggaccctgaagatgtgaacatggaggccccagatgagaagagcatcatcacctacgtggtgtccttctaccactacttcagcaagatgaaggccctggccgtggagggcaagagaattggcaaggtgctggaccaggtgctggaggtgggcaagatcatcgagagatatgaggagctggccgctgagctgctggcctggatccacaggacagtgggcctcatcagcaaccagaagtttgccaacagcctgagcggcgtgcagcagcagctgcaggccttcaccgcctactgcaccctggagaagcctgtgaagttccaggagaagggcaacctggaggtgctgctcttcagcatccagagcaagctgcgggcctgcaacagaagactctttgtgccccgggagggctgcggcatctgggacatcgacaaggcctggggcgagctggagaaggccgagcacgagcgggaggccgccctgcgggcagagctgatccggcaggagaagctggagctgctggcccagagatttgaccacaaggtggccatgagggagagctggctgaatgaaaaccagaggctggtgtcccaggacaactttggctatgagctgcctgctgtggaggccgccatgaagaagcatgaggccatcgaggccgacattgctgcctatgaggagcgggtgcagggcgtggccgagctggcccaggccctggccgctgagggctactatgacatccggcgggtggccgcccagagggacagcgtgctgcggcagtgggccctgctgaccggcctggtgggcgcccggaggacccggctggagcagaacctggccctgcagaaggtgttccaggagatggtgtacatggtggactggatggaggagatgcaggcccagctgctgagccgggagtgtggccagcacctggtggaggctgatgacctgctgcagaagcacggcctgctggagggggacattgctgcccagagcgagcgggtggaggccctgaatgctgctgccctgcgcttcagccagctgcagggctaccagccctgtgacccccaggtgatctgcaacagagtgaaccacgtgcacggctgcctggccgagctgcaggagcaggccgcccggcggcgggcagagctggaggccagccgcagcctgtgggccctgctgcaggagctggaggaggccgagagctgggcccgggacaaggagcggctgctggaggccgccggcggcggcggggccgccggggctgctggagctgctggaacagctggaggagcccatgacctgagcagcacagcccggctgctggcccagcacaagatcctgcagggcgagctgggcggcagaagagccctgctgcagcaggccctgcgctgtggggaggagctggtggccgccggcggcgctgtgggccctggagctgacacagtgcacctggtgggcctggccgagcgggccgccagcgcccggcggcgctggcagaggctggaggaggccgccgcccggcgggagcggcggctgcaggaggcccgggccctgcaccagtttggagctgacctggatggcctgctggactggctgagagatgcctaccgcctggccgccgccggggactttggacatgatgaggccagcagccggcggctggcccggcagcaccgggccctgactggagaggtggaggcccaccggggccctgtgtctggcctgcggcggcagctggccaccctgggcggggccagcggggccggccccctggtggtggccctgcaggtgcgggtggtggaggccgagcagctgtttgctgaggtgacagaggtggccgccctgcggcggcagtggctgagagatgccctggccgtgtacaggatgtttggagaggtgcacgcctgtgagctgtggattggagagaaggagcagtggctgctgtccatgagggtgcctgacagcctggatgatgtggaggtggtgcagcacagatttgagagcctggaccaggagatgaacagcctgatgggccgggtgctggatgtgaaccacacagtgcaggagctggtggagggcggccaccccagcagtgatgaggtgcgcagctgccaggaccacctgaacagccgctggaaccgcatcgtggagctggtggagcagaggaaggaggagatgtctgctgtgctgctggtggagaaccacgtgctggaggtggccgaggtgcgggcccaggtgcgggagaagagaagagctgtggagagcgccccccgggccggcggggccctgcagtggaggctgagcggcctggaggccgccctgcaggccctggagccccggcaggccgccctgctggaggaggccgccctgctggccgagcgcttccctgcccaggccgcccggctgcaccagggcgctgaggagctgggcgctgagtggggcgccctggccagcgctgcccaggcctgtggggaggccgtggccgctgctggccgcctgcagcgcttcctgcatgacctggatgccttcctggactggctggtgcgggcccaggaggccgccggcggcagcgagggccccctgcccaacagcctggaggaggctgatgccctgctggcccggcatgctgccctgaaggaggaggtggaccagcgggaggaggactatgccagaattgtggccgccagcgaggccctgctggccgcagatggagctgagctgggccctggcctggccctggatgagtggctgccccacctggagctgggctggcacaagctgctgggcctgtgggaggcccggcgggaggccctggtgcaggcccacatctaccagctgttcctgcgggacctgcggcaggccctggtggtgctgaggaaccaggagatggccctgtctggagctgagctgcccggcaccgtggagagcgtggaggaggccctgaagcagcaccgggacttcctgaccaccatggagctgagccagcagaagatgcaggtggccgtgcaggccgctgagggcctgctgcggcagggcaacatctacggggagcaggcccaggaggccgtgacccggctgctggagaagaaccaggagaaccagctgcgggcccagcagtggatgcagaagctgcatgaccagctggagctgcagcacttcctgcgggactgccacgagctggatggctggatccacgagaagatgctgatggccagagatggcacccgggaggacaaccacaagctgcacaagcgctggctgcggcaccaggccttcatggccgagctggcccagaacaaggagtggctggagaagattgagcgggagggccagcagctgatgcaggagaagccagagctggccgcctctgtgaggaagaagctgggggagatccggcagtgctgggccgagctggagagcaccacccaggccaaggcccggcagctgtttgaggccagcaaggctgaccagctggtgcagagctttgctgagctggacaagaagctgctgcacatggagagccagctgcaggatgtggaccccggcggggacctggccaccgtgaacagccagctgaagaagctgcagagcatggagagccaggtggaggagtggtaccgggaggtgggggagctgcaggcccagacagctgccctgcccctggagcccgccagcaaggagctggtgggggagcggcagaatgctgtgggggagcggctggtgcggctgctggagcccctgcaggagcggcggcggctgctgctggccagcaaggagctgcaccaggtggcccatgactggaccacctcctgggcctgggtgcaggagcggctgcccctggccatgcagacagaaagaggaaatggcctgcaggccgtgcagcagcacatcaagaagaaccagggcctgcggcgggagatccaggcccacggcccccggctggaggaggtgctggagcgggccggggccctggccagcctgcggagccctgaggccgaggccgtgagaagaggcctggagcagctgcagagcgcctgggccggcctgcgggaggccgctgagcggcggcagcaggtgctggatgctgccttccaggtggagcagtactactttgatgtggccgaggtggaggcctggctgggggagcaggagctgctgatgatgtctgaagataaaggcaaggatgagcagagcaccctgcagctgctgaagaagcacctgcagctggagcagggcgtggagaactatgaggagagcatcgcccagctgagccggcagtgccgggccctgctggagatgggccacccagattctgagcagatcagccggcggcagagccaggtggaccggctgtatgtggccctgaaggagctgggggaggagaggagagtggccctggagcagcagtactggctgtaccagctgagccggcaggtgtctgagctggagcactggattgctgagaaggaggtggtggccggcagccctgagctgggccaggactttgaacatgtgtctgtgctgcaggagaagttcagcgagtttgccagcgagaccggcatggccggccgggagcggctggccgctgtgaaccagatggtggatgagctgattgaatgtggccacacagctgctgccaccatggccgagtggaaggatggcctgaatgaggcctgggccgagctgctggagctgatgggcacccgggcccagctgctggccgccagccgggagctgcacaagttcttcagtgatgcccgggagctgcagggccagatcgaggagaagagaagaaggctgccccggctgaccaccccacctgagccccggcccagcgccagctccatgcagaggaccctgcgggcctttgaacatgacctgcagctgctggtgtcccaggtgcggcagctgcaggagggcgccgcccagctgaggacagtgtatgctggggagcacgccgaggccatcgccagccgggagcaggaggtgctgcagggctggaaggagctgctgagcgcctgtgaagatgcccggctgcacgtgagcagcacagcagatgccctgcgcttccacagccaggtgcgggacctgctgtcctggatggatggcatcgccagccagattggagctgctgacaagcccagagatgtgtcctctgtggaggtgctgatgaactaccaccagggcctgaagacagagctggaggcccgggtgcctgagctgaccacctgccaggagctgggccgcagcctgctgctgaacaagagcgccatggctgatgagatccaggcccagctggacaagctgggcaccaggaaggaggaggtgtctgagaagtgggacagacactgggagtggctgcagcagatgctggaggtgcaccagtttgcccaggaggccgtggtggctgatgcctggctgacagcccaggagcccctgctgcagagccgggagctgggcagctctgtggatgaggtggagcagctgatcagaagacatgaggccttcaggaaggctgctgctgcctgggaggagcgcttcagcagcctgcggcggctgaccaccatcgagaagatcaaggccgagcagagcaagcagccccccacccccctgctgggcaggaagttcttcggggaccccacagagctggccgccaaggccgcccccctgctgcggcctgggggctatgagcggggcctggagcccctggcccggcgggccagtgacaccctgtctgctgaggtgaggaccagggtgggctacgtgcggcaggagctgaagccagagcggctgcagcccagaattgaccggctgcctgagatccctggccgggtggagcctgctgccctgcctgctgccccagaagatgctgctgagaccccagccaccccagctgctgctgagcaggtgcggcccaggcctgagcggcaggagagcgctgacagagctgaggagctgcccaggagaagaagacctgagcggcaggagagcgtggaccagagcgaggaggccgccaggagaagaagacctgagcggcaggagagcgctgagcatgaagctgcccacagcctgaccctgggccgctatgagcagatggagcggcggcgggagcggcgggagcggcggctggagcggcaggagagcagcgagcaggagatgcccatccggggggacctggtgaagggcaaggccaccctggccgacatcgtggagcagctgcaggagaaggaggccggccctggcctgcctgctggccccagcctgccccagccccgggagctgcccccaggccgcctgcccaacggcctggagctgcctgagaggacccccaggccagaccggccccgggcccgggaccggcccaagccccggcggcggccccggccccgggagggcggggagggcggcggcagccgccgcagccgcagcgccccagcccagggcggcagcgccccagcccctcctcctccacccacccacacagtgcagcacgagggcttcctgctgaggaagcgggagctggatgccaacaggaagagcagcaacagatcctgggtgtccctgtactgtgtgctgagcaaaggagagctgggcttctacaaggacagcaaaggacctgccagcggcagcacccatggaggagagcccctgctgagcctgcacaaggccaccagcgaggtggccagtgactacaagaagaagaagcacgtgttcaagctgcagacccaggacggcagcgagttcctgctgcaggccaaggatgaggaggagatgaatggctggctggaggccgtggccagctctgtggccgagcacgccgagatcgcccgctggggccagaccctgcccaccaccagcagcacagatgagggcaaccccaagcgggagggcggggacagaagagccagcggccgcaggaagtag

SEQ ID NO: 206771 - DNA, 6465 bp, Artificial Sequence
  derived and/or modified sequence
atggcccaggtgcccggcgaggtggacaacatggagggcctgcccgcccctaacaacaatcccgcagcacgttgggagagtcccgaccgaggttgggagagggagcagcctgccgcctcaactgccgccgcttctcttttcgaatgttcccggattaaggcgctggccgatgaaagggaggcggtacagaagaagaccttcacgaaatgggtgaattctcatctggcaagggtcggttgccacattggcgacctttacgtcgatttaagggatggatttgtgctcacacgactgcttgaagttctgagcggcgagcagcttcctagacccacgagaggtaggatgaggattcactcattggagaatgtggacaaagccctgcaatttctgaaagagcagagagtacacctcgagaacgtggggtctcacgacatcgtggacggcaatcaccgattaacattagggttggtgtggacaatcattctccgattccagatccaggtgatcaagatagaaacagaagacaaccgggagactcgtagcgctaaggacgccctgctcctctggtgtcagatgaagacagcaggctatccggaagtcaatatacagaattttaccacttcctggcgcgacgggctcgcatttaacgctttgatccataggcatcggcccgatctggtggacttttctaagctgactaaatcgaatgcgaattacaatttgcaaagggccttccgaaccgccgagcagcatttggggctggccagacttcttgaccctgaagatgtcaatatggaggctcctgacgagaaatccattatcacctacgtcgttagcttctatcattacttctctaaaatgaaggctttggccgttgagggaaaacgtatcgggaaagtcctggatcaggttttggaagttggaaagataatcgagagatacgaggagctggcagcagaactgctagcatggatccaccgcacagtcggtttaatttctaatcagaagtttgcaaatagcctgtctggtgttcagcaacaactgcaggcctttacagcgtactgcacccttgaaaagcccgtgaaatttcaagagaagggcaacctggaggtgttgttgtttagcatacagagtaaactgagagcctgcaatcgcagactcttcgtgcctagggagggatgtgggatttgggatattgacaaggcctggggcgagctggagaaggccgaacatgaaagagaagccgccctcagggctgaactgatccgacaagagaagttagaactgctggcccagagatttgaccataaggtcgccatgcgtgagagctggttgaacgaaaatcagcgtctggtgtctcaggacaatttcgggtatgagttgccggcggtggaggccgccatgaaaaaacatgaagcgatagaggcagatattgctgcctacgaagagcgggtccagggtgtggcagagctggcccaggcactagccgccgaagggtactacgatatcagacgcgtggcggcacagagggacagcgtccttcgccagtgggcactgctgaccggattggtcggggccaggcgaacgcgcctggagcagaatctagctttgcagaaagttttccaggaaatggtttacatggtcgattggatggaagagatgcaggcacaattgctgagtagagagtgtggccagcacttggtggaagccgatgacttacttcagaaacacgggctgcttgagggtgacatcgccgcacagagcgaacgggtcgaggccctgaatgccgccgccctcagattttcacaactgcagggataccagccctgcgatccacaggtcatttgtaaccgagtgaatcacgtgcatggttgccttgccgagctacaagaacaagcagctcgcagacgagccgaactggaggccagcagatccctctgggctctgttacaggaactggaagaagccgaatcgtgggcaagagacaaggagaggcttctggaagcggcaggaggaggcggggccgccggcgcagccggtgcagccgggaccgcagggggagcccatgatcttagctctaccgctagactcttagcgcagcacaagattctacagggagaattgggtgggagaagagcactacttcagcaggcgctgcgttgcggagaagagctggtcgcagccggaggtgcagtcggccccggagccgacacggtgcatctggtcggactcgccgagcgggctgcgtccgcccggcgccgatggcagaggttggaggaagcagctgccagacgagaacgtcggctgcaggaagcccgtgccctacatcaatttggcgctgatttggacggcctgctcgattggctgagggatgcttatcggcttgccgcagccggcgattttggccatgacgaggcctcttcaagacgcctcgccagacaacatcgggctctcactggggaggtggaggctcaccggggaccagtaagcgggctgcgccggcaactcgcaacgctgggcggcgcaagcggcgcgggcccgctcgtggtagctcttcaggtaagagttgtcgaagccgaacagctgtttgcggaagtaacggaggttgccgctttgcggcgtcaatggctgcgggatgccctggccgtgtacaggatgtttggggaagtccatgcatgcgaactctggatcggggaaaaggaacagtggctgctgtccatgcgagtaccagactctctggatgatgtcgaggtcgttcaacatcggtttgaaagcctggatcaagagatgaacagcttgatggggcgcgttctagatgtgaatcataccgtccaagaactcgtcgaaggcggccacccttcgagcgatgaagtacgctcatgtcaggaccatctgaattctagatggaaccgtatcgttgagttggttgaacagaggaaggaggagatgtctgccgtgctactagtggagaaccacgtccttgaggttgccgaggtgcgggcccaggtccgggaaaaacgacgcgctgttgaaagcgcacccagggctggcggtgcattgcaatggcgccttagcggcctggaagccgccctgcaggcgctcgagccacgccaggccgctctcttagaagaggccgcgctgctcgccgagcgctttcctgctcaggcggccagactccaccagggagccgaagagctcggggctgagtggggggcgctcgcctctgctgctcaagcctgcggtgaagcggtcgcagcggccggacgattacagaggttcctgcacgacctggatgcattcctggactggcttgttcgcgcccaagaagccgccggaggatctgagggccccctgccaaatagtctagaagaagctgacgcattgctggccaggcatgctgccctaaaagaagaagtggaccagcgggaagaagactatgcccgcatcgtagccgccagcgaggctctattggcggccgatggggctgagttgggtcccggcctcgccctggacgaatggctgccacatcttgaactgggctggcacaaactgctcgggctgtgggaggctcgcagggaagctctggttcaggctcatatctaccagttgtttctgagagatctgcgccaggcgttagttgtgctgcgaaaccaggagatggccctatcaggggctgagctgccaggaaccgtcgaatccgtggaggaggccttaaagcagcaccgcgattttctgaccactatggaactctctcagcagaagatgcaggttgccgtccaggcagctgagggtctgctgcgccagggcaacatctatggtgaacaggcacaagaagccgtgactcgattgctcgaaaaaaatcaggagaatcaactgcgcgcgcagcagtggatgcaaaagctgcacgatcagcttgagttacagcactttttacgcgattgccacgaactggacggttggatccatgaaaaaatgctgatggcccgcgacggcacccgagaagacaaccacaagttacataagcgatggctgcgtcaccaagctttcatggctgagctcgcccagaacaaggaatggctggagaagattgagcgagaggggcaacaacttatgcaagaaaaacccgagctggccgcctcagtacggaagaagctgggcgaaatccggcagtgttgggccgaacttgagagtactactcaggcaaaagctaggcagctctttgaggctagcaaggccgatcagctggtccagagcttcgccgaactggacaagaaactgcttcatatggagtcacagttgcaggacgtggaccctggcggtgatctcgcaactgtaaactcccaactgaagaaactacagagtatggagtctcaggtggaagaatggtaccgggaggtcggagagcttcaggcccagacagccgccctgccactggaacccgcatcaaaagaactggtaggcgaaaggcagaacgccgtgggtgagaggttagtccgattactagaacctctccaggagcgcaggcggctgcttctggcctccaaggagctgcaccaggtcgcgcatgatctggatgacgagctggcgtgggtacaggagcgcctgcccctggctatgcagacagaacgcgggaatgggctgcaggcagtacagcagcacataaaaaaaaatcagggactgcgaagagagattcaggcacacggcccaaggctagaagaagttttggagagggcaggcgccctcgcctcattgcggtccccggaggctgaggccgtcaggaggggccttgagcagttgcagagtgcctgggctggactgcgcgaagccgcagagcgccgtcagcaggtgttagatgccgcgttccaggtggaacaatattacttcgatgtcgcagaagtcgaagcctggctcggggaacaggagctgctgatgatgtcagaagataaggggaaggacgaacaatcaacacttcagctcctgaagaagcaccttcagctggagcaaggggtcgagaattacgaagagtcaatcgctcagctgtccaggcaatgccgagcgctgcttgagatgggacatcctgactcagaacagattagccggagacaaagccaggtggataggctctatgtcgcgttaaaagaactcggagaggagcgccgggtggctctggaacaacagtactggctgtaccagctcagccgccaggtcagcgagcttgagcactggattgccgagaaggaggtcgtcgccggctctccggagctggggcaagacttcgagcacgtgagtgtcttacaggaaaagttcagtgagttcgcctccgagactggcatggccggccgggagcgtctcgccgcagtgaatcagatggttgacgaactaatcgagtgcggtcacacagccgccgccaccatggcggagtggaaggacgggctgaatgaagcatgggcagagttactggagttaatgggcacgcgtgctcagctgctcgcagcctcccgagagctgcataagttttttagcgatgccagggagctgcaaggccagatcgaggaaaaaagaaggaggctcccgagactcacaacacccccggagcccaggccttcagcatcctccatgcaacgtacactacgcgccttcgaacatgatttacaactgctcgttagccaggtgagacagttacaagagggggcagctcagctgaggaccgtttatgccggtgagcatgctgaggctatagcttcacgggagcaagaggtgctgcaaggctggaaggaactgctaagtgcctgcgaggatgccagacttcatgtgagttctacggcagacgccctgaggttccattcacaagtacgtgacctgctgtcctggatggacggcatcgcttctcaaatcggggcagccgataagccgcgggatgtgagtagcgtggaggttttgatgaattatcaccaggggcttaagactgagttagaggctagagtgcctgagttgactacgtgtcaggagttgggccggtctctactgcttaacaagagtgctatggccgacgagatacaggctcagcttgacaaactgggtactagaaaagaggaagtgtcagagaaatgggacaggcactgggagtggctccagcagatgctagaagtccatcagtttgctcaagaggccgtggtggccgatgcttggttaaccgcacaagaacccctgttacagtctcgtgagctggggtcatccgtggacgaggtggaacaactcatccggcgacacgaggcgttccgaaaagcagcagctgcatgggaagagcggttttcatctctgcggaggctgaccaccccccgtagggaggaccatctcaatcccggtgtccaggaccaaccatggcagcacacagagaagccgtcactgccaaaacctaaagctaataaagagaaaaccgcccgcagagatggaacatgcctgtag

SEQ ID NO: 206772 - DNA, 3930 bp, Artificial Sequence
  derived and/or modified sequence
atggcccaggtgcccggcgaggtggacaacatggagggcctgcccgccccaaataacaatcccgctgctcgctgggagtctcccgatcgggggtgggagcgggagcaacctgccgcctcaactgccgccgcctcactcttcgagtgctccaggattaaggcccttgcagatgaaagagaagccgtacagaagaagacctttactaagtgggtgaactcccaccttgccagagtcggatgccacatcggagacttatacgttgatcttagagatggctttgttttaacaagactgttagaagtcctgtctggcgaacagctgccccggcccactcggggccgtatgcggattcattccctggagaacgttgacaaggcgctgcaatttttaaaagagcagcgtgtgcacctggaaaacgtagggtcacatgatatcgtcgacggaaatcacaggctcaccttgggcttagtgtggaccatcattctccgattccagattcaggtcatcaagattgaaaccgaggacaacagggaaaccagatcagcgaaggatgccctgttgctgtggtgtcagatgaagacagcaggctatccagaagttaatattcagaatttcaccactagctggcgagatggactcgcctttaatgctctgattcatagacatagaccagatctggtcgatttttccaaacttacaaagagtaacgccaactataatctgcagcgggccttcaggacggcagagcagcatctgggactggcacgattgctggacccagaggatgtgaacatggaggcccccgacgaaaagtctatcattacctatgtcgtttccttttaccactacttctccaagatgaaagctctggccgtggaaggcaaacgcatcggcaaagtgctcgatcaggtgttagaggtgggcaaaattattgagcgttacgaagagttggctgcagagctgctggcctggattcaccgaaccgtcgggttgatcagtaaccagaagttcgccaactcgctgtccggcgttcaacagcagcttcaggcctttacagcttattgcaccttggaaaagccggtgaaatttcaggagaagggaaatctggaggtgctgctatttagcatccagagcaaacttcgcgcttgcaatcgccggctgttcgtgccacgggaagggtgcgggatttgggatatagataaggcttggggggaactggagaaggcagagcacgagagagaggcagcgctccgcgctgagctgattagacaggagaagctagagctgctagcccagcggtttgatcacaaggtagcaatgcgggagagctggctgaatgagaaccaacgtctggtgagccaagataacttcggatacgaactacccgctgtggaggcagcgatgaagaagcacgaggcaatagaagccgacattgctgcctacgaagaacgggttcaaggagtagcggaactcgcccaggcgctagcagccgagggctactacgatattcggagggtagcagcacaacgggactccgtccttcgtcaatgggctttgttaacgggtcttgtgggtgccagacgcacaagactagaacaaaatctcgctcttcagaaggtgttccaagagatggtctacatggttgactggatggaagagatgcaggcgcagttgctctcaagggagtgtggtcagcatctggtcgaagctgatgacctgctccagaaacacgggcttttggagggagatattgccgcccaatctgagagagtagaggctttgaatgctgcggccctgaggttctcccagttgcaaggttatcagccttgtgatccccaggtgatctgtaatcgcgtcaatcacgttcatggatgcctcgcagagctgcaagaacaagcggctaggcgcagggccgagctagaagcgtcacggtcactatgggcccttctgcaggaattagaggaagcggaaagttgggccagagacaaggagcgactgttggaagctgctggaggaggcggtgctgcgggcgcagccggggccgccggcaccgccgggggcgcgcacgatttatcttcaacagcccgcctgttagcccagcataaaatattgcagggtgagctgggcggaaggcgggcactactgcagcaagctctcagatgcggggaagaacttgtggcagctggcggcgccgttggccctggcgccgatacggtgcacctggttgggctcgcggaacgtgccgcaagcgcaaggcggcgctggcagagactggaggaagccgcggcaaggagagaacgcagattacaagaggcaagagcactgcatcaattcggtgcagacctggatgggcttctcgactggctgcgcgacgcgtacaggcttgccgcagccggtgatttcgggcatgatgaggctagcagccggagactcgcaaggcaacacagagcactcactggggaagttgaagcccaccggggacctgtgtcaggtcttagaagacagctcgcgaccctggggggagcttccggcgccggtccattagtcgtcgccttgcaggtgcgggttgtcgaagcggagcagttgttcgccgaagtgactgaagtcgcggccttacggagacaatggctcagagacgccctggcagtgtaccgcatgttcggtgaggtccacgcttgtgaactgtggattggtgagaaggagcagtggctcctgtccatgagagtgcctgacagcctggacgatgtagaagttgttcagcaccgctttgaatccctggatcaggaaatgaacagcctgatgggcagggtgctggacgtgaaccacactgtgcaggagctcgtggaaggaggccaccctagttctgatgaggtgcgctcttgtcaggaccacctcaattcacgatggaataggatcgtggaattggttgagcaacggaaggaagagatgtctgccgtgctccttgtggagaaccacgttctggaggtcgcggaagtgcgtgcccaggtcagggaaaagcgccgcgccgtggaaagcgcacctcgcgccgggggcgcacttcagtggcgcttatcagggctggaggcagcgctgcaggcactggagccccgtcaagctgcattactggaggaggcagccctgctcgccgaaaggttcccagctcaggctgcacggctccatcagggggcggaggagctgggtgctgaatggggcgcccttgccagcgctgcccaggcctgtggcgaggctgtggcagccgctgggaggctgcaacgatttctgcacgacctggatgcttttttggattggttggtccgggcacaggaggccgccggaggtagtgaggggcccttgccgaacagccttgaagaggccgacgctttactcgccagacatgctgctcttaaggaggaggtggatcaacgtgaagaggactacgccagaatcgtggctgcatctgaagcgctgcttgctgccgatggggccgagctggggccaggtcttgctctcgacgagtggttgccccacctcgaacttggctggcacaaactgcttggcctttgggaagcgagacgcgaggcactagtacaggcccatatttaccagctgttccttcgcgatctacgccaagcactcgtggttctgcggaaccaggagatggctctttcgggcgcggagttgcccgggacagtcgagtccgtagaagaggcactaaagcagcacagagactttctgacaaccatggaactgagtcaacaaaagatgcaggttgccgtccaggccgccgagggcctcctccggcaagggaacatttacggtgagcaagcgcaagaagccgtaaccagattgctggagaaatgtctgattatacatccagccctccttcatccaccctgggagcctcccgatcttcctaggagtagttcctag

SEQ ID NO: 206773 - DNA, 7695 bp, Artificial Sequence
  derived and/or modified sequence
atggcccaggtgcccggcgaggtggacaacatggagggcctgcccgcccctaacaataatccagcagcacggtgggaaagccccgatagaggatgggagcgggaacagcctgccgcttccacagccgccgcttcacttttcgaatgttctagaataaaagccctggccgacgagagagaggccgtgcagaagaaaactttcacaaaatgggtgaacagccacctcgcaagggtgggatgtcatatcggagacctctacgttgatttgcgtgatgggtttgtactaacacgtctgttggaggtactctcaggggaacaattacccaggccgacccggggaagaatgcgcatccactcgcttgagaatgttgacaaggcactgcagtttctaaaggagcagagggtacacctggagaacgttgggagccacgatatcgtggatggtaaccaccgcctcacattggggctcgtctggactatcatcctaagatttcagatacaggtgataaagattgagacagaggacaaccgggaaaccaggtcagctaaggacgccttgctcctgtggtgtcagatgaagacggccggatatccagaagtcaatattcagaacttcacaacgagttggcgggatggcttggcgttcaatgctttaatccatcgtcacagacccgaccttgttgatttttccaagctcaccaagagcaatgcaaactataatcttcagagggcattccggaccgctgagcagcacctggggctggcaaggctcctggatcccgaagatgttaacatggaagccccagacgaaaagagtattattacttacgtggtgagcttttatcattatttctccaagatgaaggcgttggctgtggaaggaaaacgaatcggcaaagtattagatcaggtgttagaagttggcaaaatcattgagagatacgaggaacttgccgctgaattgcttgcatggattcatagaaccgtaggactaataagcaatcagaaatttgccaatagtctcagcggagtacagcaacagctgcaagcctttactgcatattgtactttagaaaagcctgtgaagttccaggagaaagggaatctggaagtgctgctgttcagcatccagagcaaactgcgggcgtgtaatcgccgactgttcgtgccccgagaaggctgcggaatttgggacatcgacaaagcgtggggagagctcgagaaagctgaacacgagcgcgaggccgcattgcgggctgaactgattcggcaggagaaactggaactcctggcccagagattcgatcacaaagtggccatgcgagagtcttggcttaatgagaatcagcgactcgttagccaggataactttggttacgagctgcccgcggtggaagccgccatgaaaaagcacgaagccatagaggccgatattgccgcgtacgaagaaagagtgcaaggcgtggccgagctcgcccaggccctggccgccgaaggctattatgacattagacgggtggcagcccaacgtgattcggtcctgaggcagtgggcgctcttgacgggcttagtgggagcaagaagaacccgtctggagcaaaatctggcacttcagaaagtgtttcaggagatggtctatatggtagactggatggaagaaatgcaggcccagctgttgtctagagagtgtggccagcatttagtggaagctgatgacctgctgcaaaaacatgggctgctggaaggagatatcgcggcccagagcgagagggtggaggctctcaacgctgccgccctccgtttttcgcagctccagggctatcagccatgcgatccccaggtgatctgtaacagggttaaccacgtgcacgggtgcctagcagaactccaagaacaggcagcaaggcgccgagcagaactggaggcaagtaggagcctatgggccctacttcaggagcttgaggaggcagagtcgtgggcacgggacaaagagcgtctgctggaagctgcaggggggggcggcgcagcaggcgcagcgggtgctgccggaaccgcgggcggagctcacgacctctccagtacagcgagattacttgcccaacataagatacttcaaggggagctgggtggacgacgggccctgctccagcaggcattgcgatgcggagaggaacttgttgcagcgggcggggctgttggaccaggagccgacaccgtgcacttagtgggacttgcggagcgcgccgccagcgcacgccgccgatggcaacgcctcgaagaggctgctgcccgccgtgaacggagactgcaggaagctcgcgcactccatcagtttggagctgatttggacggactgctcgattggctgcgcgatgcctatcgtcttgcagctgcaggcgatttcgggcatgatgaggcaagcagtcgtcggctggctagacagcacagagcccttaccggagaggtagaggctcatcggggtccagtgagcggcctcagacggcaactcgcaacgctaggcggagccagtggggctgggccattggtggtcgctctgcaggtgcgggttgtcgaagccgagcagctgtttgctgaagtgaccgaagtagccgctctcaggcgacagtggttgagggacgccctggctgtgtatagaatgttcggagaggtgcacgcatgcgaactgtggattggcgagaaagagcagtggctgctaagtatgcgcgtgcctgattcgttggatgatgtcgaagtggtccagcaccggttcgagtccctggaccaggagatgaattctctgatgggtagggtgttggatgtaaaccatacggttcaggagctagttgagggtggtcatccctccagtgacgaagttagatcttgccaagatcacctcaacagcaggtggaacagaattgtagagctcgtggaacagagaaaagaagaaatgagcgccgttctcctggtagagaaccatgtcctggaggttgctgaagtgcgagcacaagttcgagaaaagcgacgggccgtggagagtgccccgcgcgccggcggcgccctacagtggaggctgtcaggacttgaggccgccctccaagctttggaaccacgtcaagccgcactgctagaggaggcggcgctgttagctgagaggttccctgctcaagccgcccggctgcatcagggggccgaggaactgggagctgaatggggcgccctggcctctgcagcccaggcctgtggcgaggctgttgctgctgccgggcgactgcagagattcctgcatgacttggacgcattcttggactggctagtgagagcccaggaggcagccgggggatccgaagggcctctaccaaattcgctggaagaggcagacgcacttctcgcacggcacgccgcactgaaagaggaagttgatcagcgggaggaagactatgctagaattgtcgccgcctctgaggctcttttggcggcggatggcgctgagctagggccaggcctggcactggatgagtggctcccccatctggaactggggtggcacaaactactgggtctgtgggaggcacgaagggaagctctggttcaggcgcacatttaccagctcttccttcgcgacctccgccaggccctcgttgtccttaggaaccaggagatggccctgtccggtgctgagctccctgggacagtggagtccgtggaggaagcactaaaacagcacagggactttctgactactatggaactcagccagcagaagatgcaggtggcggtacaggcggcagagggcctcctccgccaggggaacatatatggggaacaggctcaagaggccgtcactcgcctgctcgaaaagaaccaggagaatcagttacgggcacagcagtggatgcaaaaattgcatgaccagctcgaactccagcacttcctgcgagattgccatgaactcgacgggtggatacatgagaaaatgcttatggccagggatgggacacgggaggacaatcataaattgcacaaacgctggttacggcatcaggcttttatggccgagcttgctcagaataaagaatggctcgaaaagattgagagagaggggcagcagctgatgcaagaaaagccagaactggctgcctcagtgcggaaaaaattgggggagatcaggcagtgctgggctgaattggagagtacaacccaggccaaggcgaggcagctcttcgaggccagcaaagcagatcagctggtgcagagtttcgccgaattggacaagaagcttttacacatggagtctcaactccaggacgtcgatcccggaggcgatctcgcaactgtgaacagccagttaaagaagttgcaatcaatggagagtcaggtggaggagtggtacagagaggtgggtgaactacaggcacagactgccgctctgcctctggaacctgctagtaaagagcttgtcggggaacggcagaacgccgtgggcgagagactcgtgcggctgctagagccactgcaggaacggagacgtctcttgctggctagcaaggaattgcatcaggttgctcacgacctcgatgacgagctggcctgggtgcaggagagacttccactggctatgcagacggagaggggcaacggactgcaggccgtccagcaacatataaagaagaaccagggcctccgaagggaaattcaggcgcacggaccaaggctggaggaggtcctggagagagccggggccctcgcctccttgcgtagccctgaagcagaagcggtgcgccgcgggctcgagcagcttcagagcgcatgggccggtctgagagaagcggcggagcggagacagcaggtgctcgatgctgcctttcaggtggaacaatactatttcgatgtagctgaggtggaggcctggttgggcgagcaggagctcctcatgatgagcgaggacaaaggaaaggatgaacagtcaaccctccagctgcttaaaaaacaccttcagttagagcagggagttgaaaactacgaggagagtattgctcagctgagccgccagtgcagggcgcttttagagatgggccaccccgacagcgagcagattagcagaagacagagtcaggtagacaggctgtatgtggccctcaaagagctcggcgaggagaggagagtggcattagagcagcagtactggttgtaccaattatccagacaggtgagcgagcttgaacactggatcgccgagaaggaggtcgtggctggttctcctgagttgggacaagactttgagcatgtgtccgtattgcaggaaaaattctctgagttcgcatctgaaactgggatggccggcagggagcgactcgcggcggtgaatcagatggtagacgagctcattgagtgtggtcatacagctgctgcaaccatggccgaatggaaagatgggcttaatgaggcgtgggctgagctcctcgagctgatgggaactcgagcccagttgctggctgcttctagagaactgcataaatttttttcagatgccagggaactgcaaggccagattgaggaaaagaggaggagattgcctagattgaccacaccccctgaaccccgacccagtgcatcatccatgcaaaggaccttgagagcatttgagcatgacctgcaactcctggtgagtcaggttaggcaactgcaggaaggcgctgctcagttgcggaccgtgtatgccggagagcacgccgaagcgattgctagcagggagcaggaggtgctccagggctggaaggaactgttatccgcttgtgaggatgctaggcttcacgtgagctccaccgctgacgcgctccggtttcattctcaggttagggatctccttagctggatggatgggattgcctctcagatcggtgcggcggataaaccacgcgacgtgtcctccgtggaggtgctaatgaattatcaccaagggctgaaaactgagcttgaagccagggtgcctgaactgaccacttgccaggagctgggacgctctttgctgctaaacaaatcggcgatggccgatgaaatccaggcccaattggacaagctgggaacacggaaagaagaagtcagcgaaaagtgggacagacactgggagtggcttcaacagatgctcgaggtgcaccaattcgctcaagaagctgtcgtggctgacgcttggctgaccgcacaggaacccctcttgcagtcacgcgagctaggtagtagtgttgacgaagtagagcagttgattcggcgccatgaggcctttaggaaggcagctgccgcctgggaggaaaggttctctagcttaaggcggttaactactatcgagaaaataaaagccgaacagtccaaacaaccgccaactcctctgctgggcaggaaattttttggggaccccactgagctcgccgccaaggctgcccctctcctgcggcctggcggttacgagcgcgggctggaacctctggcaaggcgtgcaagcgacacactgagtgctgaggtgcgcacacgagttggatatgtgcgtcaggagttgaaacccgaaagactccagcctagaattgaccggctgcctgagattccagggcgtgttgagcctgctgcgcttccagccgctcctgaggacgccgccgaaacacccgctacgcccgctgccgctgaacaggttcgaccccggccagaacggcaggaatccgctgaccgcgccgaagagttgcctagacgtcggcggcctgaaagacaggagagcgtggaccagtcagaggaggcagcccgccgcagaaggcctgagcgccaggaatccgccgagcatgaagctgctcactcactgactttgggacgctatgagcagatggagaggcgccgggaacggcgcgagcgccgcctggagcgccaggagagcagtgaacaggagatgcccatcaggggggacctggttaaaggcaaggccaccctggcagacatcgtcgagcagttacaggagaaggaagcagggcccggcttgcccgccggaccatctctaccccagccacgggaactgccacccggcagactgcctaacggtctggaactgcctgagagaactccccgaccagaccggcctcgtgccagggatcggccaaagccgaggaggaggcccagacctagagaggggggcgagggcggcggaagccgcaggtctagatctgctcctgctcaaggcggctcagcaccggcacctcctccacccccgactcacaccgtgcagcacgagggatttctcttacgcaaacgcgagctggatgctaaccgtaagtcatcaaaccgcagctgggtgtcactgtactgcgtgttgtccaaaggcgaactgggcttttataaggactccaaggggcccgccagcggctcgactcacggaggggaacccctcctgtctttgcataaggccacaagcgaggtggcttctgattacaaaaagaagaagcacgtgtttaaactgcaaacccaggacgggagtgagttcttgctgcaggctaaagacgaggaggagatgaacggctggctggaagcagtcgccagctccgttgccgagcatgccgaaatcgccagatggggccaaacactgccaacaacatcatcaaccgacgagggtaacccaaaacgtgaaggtggcgaccgtagggcatctggcaggagaaagtag

SEQ ID NO: 206774 - DNA, 3924 bp, Artificial Sequence
  derived and/or modified sequence
atgccccactaccccagctgcagcagcgcccccagcctgggcaccccaaggcccccccagattcagcagctggaagctcgtcatcgcaaccaggagaaccagctgcgggcacaacaatggatgcagaaactgcacgatcagctcgaactacaacatttcttgcgagattgtcacgaactcgatgggtggatacacgagaagatgcttatggctagagatgggacgcgggaagacaaccataaactacataagcgatggttacgccatcaggccttcatggccgagctagctcaaaataaagagtggctggaaaaaattgagcgcgaagggcagcagctcatgcaggaaaaacccgaactcgccgcttccgtccgaaaaaagctaggcgagatcaggcagtgttgggcagagcttgagtcaacaacacaggctaaagcacgtcaactcttcgaggcatccaaggccgaccagcttgtccagagttttgctgaactggacaagaaattacttcatatggaaagtcagcttcaggatgtggatccaggcggtgacctggcaacagtcaacagccagctgaagaagctgcaatccatggagtctcaggtggaggaatggtaccgcgaggtaggtgagctacaggcccagacggctgccctgcccttggagcccgctagtaaagagctcgttggagagcggcagaacgctgtgggggaacgcctggtgcggttgctggaaccgttacaggaacgccggagactcctgctggcatccaaggagttgcaccaggtcgcccatgatctggacgatgagctcgcttgggtgcaggaacggttgcctctggccatgcagacggagcgaggcaatggtcttcaagcggtgcagcaacacatcaagaagaatcaggggctcaggcgcgagattcaggcacacggcccgcgcctggaagaagtactggaacgcgccggtgcactggcaagcctccgatcccccgaggcagaggcggtaagaagggggctcgagcagcttcagagtgcctgggcgggactgagggaggccgctgaacgcaggcagcaagtactcgatgctgcatttcaagtggaacaatattactttgatgtagcggaggtggaggcctggcttggagaacaggagctgcttatgatgtccgaggacaaaggaaaggacgaacagtctacactccagctgctgaagaaacacctgcagttggagcagggcgtagagaactacgaagaatccatcgctcagctgtccaggcaatgtagagctctcctagagatgggtcaccccgattccgagcagattagtaggcggcaatcccaggttgatcggttatacgtggctctcaaagaactcggagaggagcggagggtggcgttagagcagcagtattggctttaccagctgagccgccaggtgtcagaacttgagcactggattgccgagaaagaggtggtcgcggggagcccggaactcggtcaggattttgagcatgttagcgtattgcaggaaaagttcagtgagtttgccagtgaaactgggatggccggtagagagcggcttgccgctgtgaaccagatggttgacgagctgattgaatgtggacacaccgcggctgctactatggcggagtggaaagacgggttaaatgaggcgtgggcagagctgctcgagctgatgggcactagggcccagctattggcggcctcccgagaactgcataagtttttcagtgacgctcgggaactgcaggggcagatagaggagaaacggcgtcgcctgccgagacttactaccccaccagaaccgagacctagcgctagctcaatgcaacgcactttaagggctttcgaacacgacttgcagctgctcgtgtcgcaggtgagacagctgcaggagggagcggcacagttgcggacagtctacgcgggggaacatgcagaagccattgcttcccgcgagcaggaggtgctgcaggggtggaaggagctactgtccgcttgcgaggacgcccgcctgcatgtctcttctaccgcagacgctcttagatttcactctcaggtacgggatctgctgtcttggatggacggcatcgcatcccaaattggcgccgccgacaagccccgggatgtctcatctgtggaggtcctaatgaactatcaccaggggctgaagactgagttagaggcacgtgttcccgaattgacaacctgccaagaactaggcaggtccctgcttctgaacaagtcagccatggcagacgaaattcaggcacagctggacaagctggggacaaggaaagaagaggtgtcagagaagtgggaccgccattgggagtggctgcaacagatgttggaagtgcatcagtttgcacaggaggcagtggtagccgacgcatggctcactgctcaggagcccctgttacagtcccgcgagctgggaagtagcgtcgacgaggtagaacagttgattcggaggcatgaagccttccgcaaagccgcagcggcctgggaggaacgtttcagctctcttaggcggctcaccaccatcgagaaaattaaggccgaacagtccaagcaaccccccactcctttacttggacgcaagttctttggcgaccctaccgaactggcagctaaagccgctccacttctgcggccaggcgggtatgaaaggggcctcgaaccgctcgctcggagggcttctgataccctgtctgccgaggtgcgcacaagggtggggtatgtgaggcaggagttgaagcccgaaagattgcaaccgaggattgatcgcttacctgaaatccccggccgcgttgaaccagcggccctccctgcagctcccgaggatgccgccgagaccccggctacacccgcagcggctgaacaagttcgcccgagaccagaacggcaggaaagtgccgaccgtgccgaggaactgcctcgaaggcgcagacccgagaggcaggaatcagttgatcagagtgaagaagcggccaggcgccgccgtcctgagagacaagagtctgctgaacacgaagccgcacactcactgacgttgggacgctacgagcagatggaacggcgtagggaacgaagagagcggcgactggagcggcaggagagctccgagcaggagatgcctattcgaggggacctggtgaaaggcaaagccacacttgcagatattgttgaacagttgcaggaaaaagaagcaggtcccggccttcctgcggggccatcgctgccgcaaccccgcgagctgccacctggaaggctgcctaacggcttggagttgcctgaaagaacaccccggccagatagaccacgggccagagacaggcctaagccccggcggcggccacggccccgcgaggggggagagggcgggggcagtcggcgctcccgctcagctcccgcccagggagggtcggcaccggcccccccacctccccctacccatacagtacaacatgagggctttttgttgcgaaagcgagagcttgacgcaaatcgcaagagtagcaatagatcttgggtgtctctttattgtgtgctgtctaaaggagaacttggtttctataaagatagcaagggccctgcgtccgggagcacgcatggcggggagcccttgctatcccttcacaaggcgacctcagaggtggcctctgactataagaagaagaagcacgtctttaagctgcagacccaggatggctccgaattcctactgcaggctaaggatgaggaggagatgaatggatggctcgaggccgtggcatcatcagttgccgagcatgcagagattgccaggtggggacaaaccttgccaacgacgagctccacagatgagggaaacccgaagcgcgaagggggtgataggcgcgctagcggcaggcggaagtag

SEQ ID NO: 206775 - DNA, 7695 bp, Artificial Sequence
  derived and/or modified sequence
atggcccaggtgcccggcgaggtggacaacatggagggcctgcccgcccccaacaacaaccccgcggccaggtgggaaagcccagatcgcggatgggaacgcgagcaaccggccgcatctacagcagccgcgagtctcttcgaatgtagtaggatcaaggcgcttgctgatgagcgggaagccgtgcagaagaagacctttactaagtgggtcaattcacatctggcaagggttggctgccatataggcgatctttatgttgacctcagggacggattcgttctgacgcgcctgcttgaggtactttccggcgaacagctgccaaggccaacccggggacgcatgagaatacactcactggaaaatgttgacaaggcactgcagttcttgaaggagcagcgggttcatttagagaacgttggctctcacgatattgtcgacgggaatcaccggctgacattgggcttggtttggaccatcatactgaggtttcagattcaggtgatcaagatcgagacagaagataacagggaaacgaggtccgccaaggacgccttactgctctggtgtcaaatgaagaccgctgggtacccagaggtcaacatccagaattttacgactagttggagagatggcctcgcgttcaatgctctgattcataggcaccggcccgatctcgtcgactttagtaaactcaccaagtctaatgccaactataacctccagagagcctttaggactgcagagcaacacctaggactcgcaagactgcttgaccccgaggacgtgaacatggaagcccctgatgagaagtccatcatcacctatgtggtgtctttttaccactacttctccaaaatgaaggctttggctgtggagggcaaaagaattggtaaggtcctggatcaggtgctggaggtcggcaagattatcgaacgctatgaggaactggccgctgagttgctcgcctggattcatcggaccgttggcttgattagcaatcagaaattcgccaatagcctctcaggcgtccagcagcagctgcaggcgtttaccgcgtactgtactctcgagaaacctgtgaaatttcaggaaaagggtaatctggaagtacttctgttttcaatccagtcaaagctcagagcttgtaatcgcaggctgttcgtgccccgagaagggtgtggcatttgggatattgacaaagcctggggcgaattggaaaaggcagagcatgaacgcgaggcagcactgcgagccgaacttataagacaggagaagctggagctgctggcccagcgatttgaccacaaagtggccatgagggaatcttggctcaacgagaatcagcgcctggtgtcccaagacaacttcggctacgagcttcccgccgtggaagccgcaatgaagaaacatgaggccattgaagcagatatcgcagcatacgaggaacgagtccagggcgtggccgagctagcccaggctcttgctgcggaggggtattacgacatcaggagagtggcagctcagagagacagcgtactgcgccagtgggccctcttaacaggcctggtcggcgcacggagaaccaggctggaacagaacttagccctacagaaagtctttcaggaaatggtctatatggttgactggatggaagagatgcaagcccagcttctctctcgtgaatgcggccagcacctcgtcgaggcagatgacttgttacagaagcatggcctgctcgagggcgatatagcagcgcaaagcgagcgtgtggaggccttgaatgcggctgcattacgcttttcacagctacagggataccagccctgtgaccctcaagtgatttgcaatagggtgaaccacgtgcacggttgcctagcagaactgcaggagcaggccgctcggcggagggccgagttggaagcgagccgctccctgtgggccttactccaggagttagaggaggctgagtcatgggcacgggataaggagcgcttgctggaagctgcaggtggggggggagctgcaggcgccgccggagcagccgggaccgccggcggcgcacatgatctgtctagcaccgccaggctcctagcccagcacaaaatccttcaaggagagctcgggggacggagagcactgctgcagcaagccctcaggtgtggcgaggaactagtggcagctggcggggctgtcggtcctggagccgacacagtccatctcgttgggctggcagaaagagcggctagcgctagaaggcggtggcagagactcgaggaggcagccgccagaagagagcgtcgcctgcaggaagcaagagcgctgcaccagttcggggccgacttagacgggttgcttgactggctgcgcgacgcctatcgccttgccgctgctggggatttcgggcatgatgaagccagttcccggaggcttgctcgacagcaccgggccttgactggggaggtcgaagcccaccgggggcccgtctctggtctccgtcggcagctggcaacacttgggggcgctagcggagccggccccctggttgtggcactgcaggttagagtggtcgaagcagagcaactatttgctgaggtgaccgaggtggccgccctcaggcggcagtggctgagagatgccctggcggtgtaccgtatgttcggcgaagtgcatgcctgcgaattatggatcggtgagaaggagcagtggctgctttctatgcgtgttcctgacagcctcgatgatgtggaagttgtgcagcaccgattcgagagcctagatcaggaaatgaactctctaatgggccgggtgctcgacgtcaaccacaccgttcaggagctggttgaaggcgggcatccttcgagcgacgaagtcaggtcctgtcaagatcatttgaactcccgctggaataggattgtggaactcgtggagcagcgaaaagaggagatgtcagctgttctgctggtagaaaatcatgtgctggaggtggctgaggtgcgggcgcaggtgcgggagaaaagaagagccgtcgagagtgcaccacgcgccggaggcgcactgcagtggcggctctccggcttagaagctgctctgcaggcattggagccacgtcaggccgccctgttggaagaagccgccctgttggccgaacgattcccagcccaagctgcgcgcttgcaccagggtgccgaggagctcggcgcggagtggggcgctttggcatccgcagctcaggcatgcggggaagccgtcgctgccgctgggcggttgcaacgtttcttacacgacctggatgcatttctggactggttagtgcgggcccaagaagctgctgggggatcagaggggcccctgccaaacagtttagaggaagccgatgctctcctcgccagacatgcggcactcaaggaagaggtagatcagagggaggaagactacgcccgaattgtggcggccagcgaggccctgctggcggcagatggcgcagagttaggacctggtctcgcactggacgaatggcttccccacctggagcttggatggcataaactgctcggtctctgggaggccagacgggaggccctagtccaggcccacatctaccagctgttcctgcgcgacttgcggcaggcgctggtggtcctcaggaaccaggagatggcgctgagcggggctgagctgccaggcaccgtggaaagcgtggaggaagcacttaagcaacatagggacttcctgactaccatggaactgtcccagcagaagatgcaggtggcggtacaggcagcggagggtctccttaggcaggggaacatctatggagaacaggcccaggaggccgtgacccgcctgttggagaaaaaccaggaaaaccaactgcgcgctcagcagtggatgcagaaattacacgaccagttggaactgcaacactttctccgagactgccatgaacttgacgggtggatccacgagaagatgctgatggcacgggacggaacaagagaagacaaccataaactgcacaagcgatggctacgacaccaggccttcatggctgagctggcgcaaaacaaggagtggctcgagaagattgagagagaggggcagcaactgatgcaggaaaaacctgaactagcagcatcagtgcgaaaaaagctgggggagatccgtcagtgctgggccgaactcgagtcgaccactcaggcgaaggctagacagcttttcgaggcaagtaaggcagatcagctggttcagtctttcgccgagctcgataaaaaacttctgcatatggagtcacagctgcaagatgtggacccaggcggggacctggcaaccgtgaactcccagcttaagaaactgcagagcatggagagtcaggttgaggagtggtaccgtgaggtcggagaactgcaagcccagactgcggctctccctctggaaccggcctccaaagagctcgtcggcgagcggcagaatgcagtcggcgaaaggctggtgaggttattagaaccacttcaagagcgacggagattgttactggccagtaaggagctgcaccaggtggcacatgactggacaacatcttgggcttgggtacaggagcggttgcccctggcgatgcagactgaaagaggcaatggccttcaggccgttcagcagcacattaagaaaaaccagggcctcagaagagagattcaagcacacggccccaggctagaggaagtattggagcgggcaggagccttagccagtttgcgctccccggaagctgaagctgtgcggcgggggctagagcagttgcagtccgcgtgggcagggctgagagaggccgcggaacgtaggcagcaggtgctggatgctgccttccaagtcgaacagtactacttcgatgtggccgaggtggaggcttggctcggtgagcaggagcttcttatgatgtccgaagacaagggcaaggatgaacagtccacattacaactgcttaagaagcacctgcagctggagcagggggtggaaaattatgaagagagcatcgcacagttatctcgccagtgccgggccctgcttgaaatggggcacccagactcagagcagatttctcgccgtcagtcgcaagtcgatcgcctgtacgtcgcactgaaggagttaggtgaagagcgccgagtagcgctagagcagcaatattggctctatcagctgagtcgacaggtgtctgagttggagcattggattgcagagaaagaggtggtggccggatcccccgagctggggcaagatttcgaacacgtttcagttttgcaagagaagttctccgaatttgcttccgaaacaggcatggcaggaagagagcgcttggcagctgtaaaccagatggtggacgaacttatagagtgcggccacacagccgccgctaccatggctgagtggaaggacggactgaatgaggcctgggccgaacttctagaactcatgggtacaagagctcagctgctagcggccagtcgagagctccataagtttttctccgacgcccgggagctgcaaggacagatcgaagagaaacgcagacgactgcctcggctgaccacgccacccgagcccagaccttctgccagttccatgcaacgtactttgagggcctttgaacacgacctgcagcttctggtttcacaggtccgacagctccaggagggagccgcgcaactcaggaccgtgtatgccggggagcacgcagaagcgattgcttctcgggaacaggaagtgctgcagggctggaaagagttactcagtgcctgcgaggacgctcgtctacacgtctccagcaccgccgatgcattgaggttccacagtcaggtgcgggatctgctatcgtggatggacggaattgcttcccagattggagctgctgacaaaccccgtgacgtaagctccgtcgaggttctcatgaattatcaccaaggtttgaagacagagctggaagcccgggtcccggaacttaccacgtgtcaggaactcggacggtcccttcttcttaacaagtcggccatggctgatgaaatccaggcccagttagacaaactggggacccggaaagaggaggtgtccgagaagtgggacaggcattgggagtggctacaacaaatgctggaggtgcatcagttcgcccaggaggcagtagttgcggatgcctggctcactgctcaagaaccattactgcagagccgggagctcggttccagtgtggatgaagtagagcagctgataagacgccatgaggcctttaggaaagcagctgcagcctgggaagagcgcttcagctccctccgccggctgacaactatcgaaaaaatcaaggcagagcaatccaagcagcctcccactccattactagggagaaaatttttcggcgaccccacagagcttgctgcgaaagccgccccgttgcttcgccctggcggctacgagcggggcttagagcccttggcaaggagagcttccgacacgctctctgcagaagtaagaactagggtgggatatgtgagacaggaattgaagccagagcgtttacagccgaggattgaccggcttccagagattccgggcagagtggagccagctgctctgcccgctgcccctgaagacgcagccgaaacccccgctacccccgccgcagctgagcaggtcagaccccgtcctgaacgacaggaatcggcagatcgggccgaggagttgcctcggaggcgccgtccagagagacaagaaagcgtggaccagagcgaggaggccgccaggaggagaaggcctgagagacaggagtctgcagagcatgaggctgcccactctcttactctcggacggtacgagcaaatggagcggagacgggagagacgggaacggagattggagcggcaggaaagcagcgagcaggaaatgccaattaggggtgacctggtgaaggggaaggccacgctcgccgacatcgtcgagcagctgcaggagaaggaggccggccctgggctccccgctggcccctcccttccacagcccagagaactgcctcctggaagacttcctaacgggctcgaactgcctgagagaaccccaagacccgatagacccagggccagggacaggccaaagccccggaggcgtccacgcccccgtgaaggcggggagggcggagggagtcggaggagccggagcgcccccgcgcagggggggtcagcccctgctcctcctcctcctcccacacatacagttcagcatgaaggttttctgctgcgaaaaagagaactagacgccaacaggaaaagttcaaacaggtcttgggtttcgctgtactgtgttctgtccaagggtgagcttgggttctataaggattctaagggccccgctagtgggtcaacccacggcggcgagccactgctcagcctccacaaggcgacaagcgaggttgcgagcgattataaaaagaagaaacatgttttcaagctccagacccaggacggatcagaatttctcttgcaggcgaaagacgaagaggaaatgaatggttggctcgaagctgtggccagtagtgttgctgagcatgcggaaattgcgaggtggggccagacactgcccaccacatcatctacagacgaaggtaatcccaagcgagagggcggggatcgccgggcctcgggtcgccggaagtag

SEQ ID NO: 206776 - DNA, 6465 bp, Artificial Sequence
  derived and/or modified sequence
atggcgcaagttcccggtgaagtagacaacatggagggcctgccggcacctaataacaatcccgcagcccgatgggaatcacctgaccgcggttgggaacgggaacagcctgccgctagtactgctgccgcatcactgtttgagtgttcccggattaaagcgttagcggacgaacgcgaggcagtgcagaagaagaccttcaccaaatgggtaaactcacacttggcacgggtaggatgtcacatcggcgacctgtatgtggatttgagagacggattcgtgttgacaagacttctggaagttctgagcggggaacagctgccccgacccacacgcggaaggatgagaattcacagcctagagaatgtggacaaagccctccagttcctgaaggagcagcgcgttcacctggaaaatgtggggtctcacgacatcgtggatggtaaccataggctaaccctcgggttggtatggacaattattctccggttccaaatccaggtcatcaagatcgagactgaggataatagggaaaccagatcagctaaagatgctctccttctctggtgtcagatgaagaccgcagggtaccccgaggttaacattcaaaacttcacgacctcgtggcgcgacgggctggcctttaatgccttaatccaccggcacagacctgatcttgtggacttttctaaactaacaaagtctaatgccaattataaccttcaacgcgcttttaggactgccgagcaacacctgggcctggcgcgattacttgacccagaagacgttaatatggaggcacctgacgagaagagtattattacttacgtggtatctttttaccattattttagcaagatgaaagccctcgcggtcgaaggaaaaagaatcggcaaggtgctagaccaggtgctagaggtggggaagatcattgagcgttatgaagagcttgctgccgaactccttgcatggatccaccgcactgtcggactgatctccaatcagaagttcgccaactctctcagcggtgtccaacagcagctgcaggcattcactgcctactgcaccctggagaagccggttaaattccaagaaaaggggaacctggaagtgctcctcttttcaatacagtccaagctacgggcatgcaatagaagacttttcgtgcctagagaagggtgtggaatctgggatatagataaagcctggggagagctggagaaggcagagcatgagagagaggcagccttgagggctgagctcatcagacaagaaaagcttgaattgctagcccagcgctttgatcataaagtggcaatgcgggaatcatggctcaacgagaatcagagactggtgtcccaggacaacttcggttacgaactgcccgctgtggaggccgcaatgaaaaagcacgaggcaattgaagctgacatcgcggcttatgaggaaagagtacagggcgtggccgaactggctcaagcactagcggcagagggatattacgatattcgacgcgtggcagcccagagagactcagtcctaaggcagtgggccctccttacgggcctcgtgggtgcacgaaggactaggctggaacagaatctggccctgcaaaaggtgtttcaagagatggtgtacatggtagactggatggaggagatgcaggcccaactcctctccagagaatgcggccaacacctggttgaggctgatgacctcttgcagaagcacgggctcctggaaggagatatcgcagcccagtcagagcgggtagaggccctgaatgcagcggctcttcgcttcagccagctgcagggctaccagccatgcgatccccaggtcatctgtaaccgggttaaccacgtgcatgggtgcctggctgagctgcaggaacaggcggctaggcgcagggctgaacttgaagcctcccgcagcctgtgggctctcctgcaggaactggaggaagcagagtcgtgggcacgggacaaggaacgcctgttagaggcagctggaggaggcggtgccgctggcgctgccggagccgctgggactgccggtggagcgcatgacttgagttccaccgctagactcctggcccagcacaagatcctgcaaggcgaactgggaggcagacgcgctttgctccagcaggcccttaggtgtggagaggagctggtagccgcaggcggagccgtcgggcctggcgctgacacggtgcatcttgtcggcttagccgagcgggcagcatccgcacgtaggcgttggcaaaggctcgaagaagcagctgcgagaagagaaaggcggctccaggaggcacgagctctacatcagtttggcgcagacttagatgggctgttggattggctacgggacgcataccggctcgctgctgcaggagacttcggtcacgatgaagcttccagccgtcgcctggcacgccaacaccgtgctttgacaggtgaagtggaagctcacagaggtccggttagcggcttacgtcgacagttggccaccctgggtggggcttcaggtgccggtcctctcgtcgtcgcactgcaggtgcgtgtggtcgaagctgagcagcttttcgcagaggtgaccgaggtggcagccctgcgccgacagtggcttcgagatgcactcgcggtatatcgtatgtttggtgaagtgcatgcatgtgaactgtggattggtgaaaaggagcaatggctactgtctatgcgggtgccagacagtctcgacgacgtggaagtcgttcagcaccgctttgaatccttggaccaggagatgaattccctgatgggtcgagtgctagacgttaatcatacagtccaggagcttgttgaggggggacaccctagttctgatgaggtgaggtcttgtcaagatcacctgaactcgaggtggaaccgaattgtcgagctggtggaacagcggaaggaggagatgtcagccgtgctgctcgtggagaaccacgttcttgaagtcgccgaggtgcgggctcaagtgagggagaaaaggcgggctgtcgagtctgcccctagggccggtggtgcgttgcagtggcggttaagtgggctcgaggcggcactccaagcactggaaccgaggcaggccgcacttctggaggaagccgcactgctggccgagaggtttcccgctcaagccgctaggcttcaccagggggcagaggagcttggcgcagagtggggcgctctagcttctgccgcacaagcctgcggcgaagcggtcgccgcagcaggacgcctccagaggtttctgcatgatcttgatgcgtttttggattggctggtacgcgctcaggaggctgcgggtggttccgaagggccacttcctaactcactcgaagaggcagacgctctcctggcacgtcatgcggctcttaaagaggaggttgatcagagggaagaggactatgcgaggattgtggccgcttccgaggccttgcttgccgcagacggcgctgaactaggaccaggcttggcgctggacgaatggctgccacacttagaactgggctggcataaactgctgggcctgtgggaggctcgacgcgaggccctggtgcaggcacacatctaccagctgttcctgagagacctgcgtcaagccttagtagtgctgcgcaatcaagagatggcactctcaggcgcagagctgcccggtacagtggagagtgtggaggaggccctcaagcagcacagggatttccttacaaccatggagctttctcaacagaagatgcaggtcgctgtgcaggcggctgaggggttactgcgacagggtaacatttacggtgagcaagctcaggaggcagtgacaagacttctggaaaaaaatcaggaaaaccagctgcgagcccagcagtggatgcagaagctgcatgatcagctcgagctccagcattttcttagggattgtcatgagctggacggctggatccacgaaaaaatgctgatggccagggatggtacccgggaggacaatcacaagctacacaagcgctggctcaggcatcaggcttttatggccgagctagcacagaataaagaatggctcgaaaagatagaaagggaaggccagcagctgatgcaggagaagcccgagctggcagcttctgtccggaagaaacttggcgagattagacaatgttgggcagagctcgaatctacgacgcaggcaaaagcaaggcagctcttcgaagcttccaaggccgaccaacttgtacagtcctttgccgagctggataaaaagctgctacatatggagagccaactccaagacgtagacccgggaggcgatcttgccacagtcaatagtcaactcaaaaaactgcagtctatggagtcacaagtggaggagtggtatcgtgaggtcggggagttacaggcacagacagccgctttgccgctggagcccgcttccaaggagctagttggagaacgccagaacgccgtaggagaacggttggtccgcctcctcgagcctttacaagaacgcagacgccttctcctcgcttccaaagaactccatcaggtcgcacatgatctcgacgacgagctcgcgtgggtgcaagagaggctgccattagccatgcagaccgaaagagggaacggactccaagcagtccagcagcatatcaaaaaaaaccagggtttaaggagagagatacaagcgcatggtccaagactcgaagaagtactcgagcgagcaggggcactagcatcactgaggtcaccagaggcagaggcagttcgtcgtggcttggagcagctccaaagtgcctgggccggtctccgcgaggccgcagagcggcgtcagcaggtgctcgatgctgccttccaggtagagcagtactattttgacgttgccgaagtggaagcctggctaggagagcaggaactgcttatgatgtcagaggacaaaggaaaggacgaacagagcacccttcagctcctgaaaaaacatttacagctggagcagggggtggagaactacgaggagtccatcgctcaactgtctcggcagtgccgggcactgctggaaatggggcaccccgatagtgagcagatatccaggcgacagtcgcaggtggatagactatacgtggcacttaaagaattaggggaggagcggagggtggcgcttgagcagcagtactggctgtatcagctgtcacggcaggtatccgagttagaacattggattgcagagaaggaggtggtggccggtagtcccgagctgggccaggatttcgagcatgtgagtgtgcttcaggaaaagttttccgagttcgcatccgagacaggcatggccggaagggaaaggctcgctgccgttaatcagatggtggacgagctaattgaatgtggccatacagccgctgcaaccatggctgaatggaaggatgggttgaatgaggcttgggccgagctgttggagttgatgggaacacgggctcaattacttgccgcttccagggagcttcacaagttttttagtgacgctagagaattgcaagggcagatcgaggagaagcggaggagattgccacggttaacaacaccccctgagcctcggcctagcgcgtcatccatgcagcggactctacgggcttttgagcacgacctgcagctgttggtgtcccaagtgcggcagctccaggagggtgcagcccagctgagaaccgtctatgctggggaacatgccgaggctatcgccagtcgagaacaggaagtcctccagggatggaaggagctccttagtgcatgcgaggatgctagattgcatgtgtcttccactgccgacgccctgcgattccattcgcaagtgagggacttgctgtcttggatggacggcattgcgagccaaatcggtgcagctgataagcccagggacgtgtcctcagtggaggtcctgatgaactatcaccaagggttgaaaacagagttggaagcaagagtccccgagctcactacttgccaggagcttgggaggtccctgctgttgaacaagtctgctatggcggacgaaattcaggcccagctggacaagctgggcacccgcaaggaggaggtaagcgaaaaatgggaccggcactgggaatggcttcagcaaatgctggaggtccatcagttcgcgcaggaagccgtcgtggcagacgcttggttaaccgcacaagagcccttgctccagagtcgggaacttggctcatccgtcgatgaagtggagcagctgatcagacgccatgaagcttttcgaaaggctgccgctgcttgggaggaaaggttctcaagcctgagacggctaactacaccgcgtcgggaagaccacctgaacccaggcgtgcaggaccagccctggcagcacactgagaagccttccctgcccaagcccaaggccaacaaagaaaagacggctcgcagggatggaacttgtctgtaa

SEQ ID NO: 206777 - DNA, 3930 bp, Artificial Sequence
  derived and/or modified sequence
atggcacaagtcccaggagaggtggacaacatggaaggtctgcccgcaccaaacaataaccctgcagcgcgttgggagtctcccgatcgcggatgggagcgggagcagcctgcggcttccaccgcagccgcatccttgttcgaatgctctcgcattaaggctctggccgacgaaagagaggcagtacagaagaaaacttttactaaatgggtaaatagccacctagcacgggttgggtgccatatcggggacctgtacgttgatctgcgggacggattcgttttaacccggctcttggaggtattgagcggagagcaacttccgaggccaacccgcggtcgtatgcggatacactctctggaaaacgtcgacaaggctcttcagtttctcaaagaacagcgagtgcacctggagaacgtgggctcacatgatatcgttgacggaaaccatcgacttaccctcgggctggtgtggactatcatcctccgcttccagatccaggtaattaagatcgagaccgaggacaacagagaaacacgatcggctaaggatgccctgctactttggtgccaaatgaaaaccgctggctacccagaagttaacatacagaacttcactaccagttggcgggacggcttggcgttcaatgctctcattcatagacacaggcctgatctggtggatttctccaaactaacaaagagtaacgctaactataatcttcagcgggcattcagaactgcggagcaacacttagggctggctcgtttactcgatcccgaagacgtcaacatggaagcacccgacgaaaaatcgatcattacttatgttgttagtttttatcactacttcagtaagatgaaggcattagccgtagagggcaagagaatcggtaaggtacttgaccaggtccttgaggtgggcaagattatcgaaaggtacgaggagttggctgctgagcttctggcctggatccatcggactgtgggacttatctcaaatcagaaattcgccaattcactgtctggcgtccaacagcagctgcaggccttcacagcatattgcacactggagaagccagtgaagtttcaggagaaaggaaacctcgaggtcctcttattcagcatccagagtaaactcagggcttgcaaccgacgtctgttcgtccctcgggagggttgcggcatttgggatatcgacaaggcctggggcgaactggaaaaagcagaacatgagagggaagcagcactccgggcagagctgattaggcaggagaagctcgagttgctggcccaacggttcgaccataaggtggcaatgagggagagctggctgaacgaaaaccagaggcttgtgagccaggacaacttcggctatgagttacccgcagtcgaggccgcaatgaagaaacacgaagcaatcgaggccgacatcgctgcctacgaggagcgggtccaaggagtcgccgaattagcccaagcgctggccgctgagggttattatgacatccggagggtcgccgcacagcgggactctgtgctgaggcagtgggcactgctcacaggactggtgggcgcacggcgaactaggctggagcagaacttggccttacaaaaggtctttcaggagatggtatacatggtagattggatggaggaaatgcaagctcaactgcttagtagggagtgcggtcagcacctcgtcgaggcagatgacctgctgcagaagcacggactgctcgagggcgacatagccgcacagtctgaacgagtggaggccctgaacgctgccgcactccgcttttcccagctgcagggataccagccatgcgatccccaggtgatctgcaaccgcgtgaatcatgtacacgggtgtcttgctgagctgcaagaacaggccgctaggcggcgtgccgaactggaagcctccagatctctttgggctttgctgcaagaactcgaggaggccgagagctgggcacgagataaggagaggctgcttgaggcagctgggggagggggagcagccggagccgcaggcgcagccggtacagctggcggagcacatgatctgtccagtacggccaggctactcgcccagcacaagatactgcagggcgaactgggaggcaggcgggctctgcttcaacaggccctgcggtgcggcgaagagctggtagccgctggcggagcagtgggccctggggcagacaccgtgcatctggtcggcctggctgagcgggctgccagtgcacggaggcgttggcagagactggaggaggcagctgctcggagagagcgacggttacaggaggcccgagctttacatcaattcggcgctgatttggacggcttgttggactggctgcgggacgcctacagactggcagcagcaggagatttcggccatgacgaggcctccagccgacgcctggctcgacaacatagagcgcttacaggtgaggtagaggctcatcgagggcctgtgtccggcttacgcagacagctggccaccctgggcggtgccagcggcgcagggcctcttgtggtggctctccaggtcagagtggtcgaagctgaacagctgttcgccgaggtcaccgaagtggctgctctgcggcgtcagtggctccgcgacgctctggcagtgtataggatgtttggggaggtccatgcttgcgaactctggataggtgagaaagaacagtggctgctgtctatgagagtaccagattctctggatgatgtggaagtcgttcagcaccgctttgagtcccttgaccaagaaatgaattctctgatgggcagagtgttggacgtgaaccatacggtgcaggaactcgtagagggcggacatccctcttccgacgaggtgcggagctgtcaggaccatctgaactctcgttggaacaggatcgttgaactggtcgaacagcgtaaggaggaaatgagcgctgtcctgctggtggaaaaccacgtgctggaagttgccgaggtgagggctcaagtgagggagaagcgcagggccgtggagtcagctcccagagccggtggcgctttgcagtggaggctcagtgggttggaggcggctctccaggctctggagccaaggcaggcggctctcctggaggaagccgcattgctggccgagcgattccccgcacaggccgcacggctgcaccagggggcagaggagctgggagcagagtggggcgcactggcaagcgcagcacaggcctgcggagaagccgtcgcggctgccggacgactccagcgtttccttcacgacctggacgcttttctcgactggctcgtccgcgctcaggaagccgcaggcggatccgagggacctctccccaattcactggaagaggcggacgctctcctggctaggcacgctgcactgaaagaagaggttgatcaacgggaagaggattacgccaggatcgttgccgcttcagaagccctgcttgctgctgacggggctgaacttggacctggcctggcactggacgagtggcttccacaccttgagctggggtggcacaagcttctcggtctctgggaagcacgaagagaagccctggtgcaggcacacatctaccaattgttcctccgggatttgaggcaggccctggtagtgctgagaaaccaggagatggcgttgtccggggctgagcttcccggaacagtggagtcagtcgaggaagctctgaaacaacaccgggactttcttaccacgatggaactcagtcagcagaaaatgcaggtagccgtgcaggccgcagaagggctactgaggcagggcaacatctatggggaacaggcgcaagaagctgtgaccaggcttctggaaaagtgcctcattatacaccctgcgctgctgcatcccccatgggagccacctgatctcccaagatccagttcctag

SEQ ID NO: 206778 - DNA, 7694 bp, Artificial Sequence
  derived and/or modified sequence
atggcccaggtccccggtgaagtcgacaacatggagggtctccccgcacctaataataaccctgcagcccgttgggaatctccagataggggctgggagcgcgagcagccggctgcttccactgccgctgcatccctgttcgagtgctcccgcatcaaagctctggccgatgaaagggaggcagtgcagaagaaaacatttaccaagtgggtgaattcacaccttgcaagagtgggttgccacatcggggatttgtatgtcgacctcagggatggctttgtgcttacaaggctgctggaagttctatcaggcgaacaacttcctcggccaacgagaggcaggatgcgcattcatagcctagagaatgtggataaagcacttcagttcctgaaggagcagagagtgcacctggagaatgtaggttctcacgatatcgtcgatggaaatcaccggttgacactcggactggtgtggactatcatactacgctttcaaatacaggtcatcaagatcgagaccgaggataatcgtgagactaggtccgcaaaggatgctctcctgctgtggtgtcagatgaagacagccggttacccagaagtcaatattcagaatttcaccacctcttggcgagatgggcttgcatttaacgccctaatccatcggcatcgacccgatctggtcgacttctccaagctcacaaagtctaatgccaactacaacctgcaacgagcttttcgtaccgccgagcagcacctcggactggcgagattgctggatccagaggatgtcaacatggaggcccctgatgagaaatcaatcataacgtatgtagtgagtttttaccactatttttcaaagatgaaagccttggctgtggaggggaaaaggattggcaaagtgctggatcaagtattggaggtggggaagatcattgagcgctacgaggagttggctgctgagctcctggcctggatccaccgcaccgtcggattgatatctaatcaaaaatttgccaactccctgtcaggggtgcagcaacaactgcaggcctttacagcttactgcacccttgagaaacctgtgaaattccaggagaagggcaatcttgaggtcttactcttctcaatacaatcaaagctgcgggcttgtaaccggagactgtttgttccccgtgagggatgcggcatctgggacattgacaaggcctggggcgagctggaaaaggctgagcacgaaagggaagccgcactacgcgctgagttgatcaggcaggaaaagctggagttgctagctcagcgatttgatcacaaggtcgcgatgcgagaaagctggttgaatgagaaccaacggcttgtgtcacaagacaacttcggatacgaactgcctgcagtggaagcggcaatgaagaagcacgaggctattgaggcagacatcgccgcatatgaagagagggtgcagggggtcgcagagttggcacaggctctggccgcagaaggctactacgatattcgacgcgtggccgcacagagagactcagtcctgcgccagtgggctcttcttactggtctggtcggtgccagacgaacgaggctggagcagaatctggccttgcaaaaagttttccaggagatggtctacatggtggactggatggaggaaatgcaagcccagctgttaagccgggagtgcggacagcatctagtggaagctgacgacctgttgcagaaacacgggctgctggaaggtgacatagctgctcagtctgaacgcgtcgaggccctgaacgcagccgctctgaggttttcgcagttacaggggtatcagccctgtgacccccaggtgatttgcaaccgcgtgaatcacgttcacgggtgcctagcggagctccaggagcaagctgctcggaggagggctgagttagaggccagcaggtcattgtgggcacttctgcaggagctcgaggaagccgaatcgtgggccagagacaaagagcgacttcttgaagcagccggaggcggaggcgcagcaggagccgcaggtgctgccggtaccgcgggtggggctcatgacttatcctctactgccagactgctggcgcagcataagattctacagggagagctcgggggaagaagggccttactccagcaggctttaagatgcggcgaagagcttgtggccgcaggcggagccgtggggcctggggctgatactgtccatttagtgggtttggccgagagagctgcttctgctcgaagaaggtggcagcggctggaagaagccgctgccagacgggagaggcggctgcaggaggctagggccttgcaccaatttggagccgatcttgatggtcttcttgactggctgcgtgatgcataccggttggcggctgcgggtgatttcgggcacgacgaagcctccagtagacgactggctcggcagcacagagccctcactggcgaggtggaagcgcataggggtccggtgtcgggactgagaagacagcttgcaacccttgggggagccagtggagccggacctttagtggtggcgttgcaggttcgcgtcgtggaggccgagcagctctttgcggaagtgaccgaagtggccgcattgaggcgtcagtggttgcgtgacgccctggccgtgtaccgcatgtttggggaggtccacgcatgcgaattgtggatcggcgagaaagaacagtggttgctctcaatgcgagtacccgatagccttgatgatgtcgaggttgtgcagcataggttcgagagcttggatcaggagatgaactccttgatgggaagagtgcttgatgtgaaccataccgtgcaggaactcgtagagggagggcaccctagtagcgacgaagttcggtcatgccaggatcatttaaactcaaggtggaacaggatcgtggagctggtggagcagagaaaagaagagatgtcggccgtccttctcgtagaaaatcatgtgttagaagttgccgaagtgagagcacaggtccgtgagaagcgcagagccgtggagtccgctcctcgcgcaggcggtgctctgcaatggcggctgagcggcctggaagctgcccttcaagccctggaacctagacaggccgcactattagaagaagcggctttgctcgcagaacgcttcccagctcaagccgcacgactgcatcaaggggctgaagagctgggcgctgaatggggggctcttgctagtgcagcccaggcctgtggcgaggcagtggcggctgcgggtcgactgcagaggttcctccatgacttagacgctttcctcgattggctggtgcgcgctcaggaagcggcaggcggttccgaggggcctctgccaaattcgcttgaagaggctgacgccctgttagcgcgtcatgccgctttgaaagaagaggtcgaccagcgggaagaggactacgcccgaattgtcgctgctagtgaggctctcctggctgccgacggtgccgaacttggtccgggactagcactcgacgaatggctacctcacctcgagctcggttggcacaaactccttggattgtgggaggcccgaagggaggccctggttcaagctcatatctatcagctgttcctacgggacctgaggcaggcactggttgtactccgtaaccaagagatggctctatcaggcgcagagttgccaggaactgtagagagtgttgaggaggcactgaaacagcaccgcgatttcctaacaaccatggagctaagccagcagaaaatgcaagtggccgtgcaagccgcagagggactgttgaggcagggaaatatatatggcgagcaggctcaggaggctgtaacaagattattggagaagaatcaggagaatcagttaagggcacaacagtggatgcaaaagctgcatgaccagcttgagctgcaacacttcttgagagactgtcacgagttagacggctggatccacgagaaaatgctcatggcaagggatgggacccgggaagataatcacaaattacacaagcgatggctccgccatcaggccttcatggccgagcttgcccaaaataaagaatggcttgagaaaattgaaagagaggggcagcagctcatgcaggagaaaccggaactcgcagccagcgtaaggaagaaattgggcgaaattcggcagtgttgggccgagctagagagcaccactcaggcaaaagccaggcagttgtttgaagccagtaaggccgatcagctggtgcagtcatttgcggagttggacaagaagctgctacacatggaaagtcagctacaggacgtggacccaggaggggatctggctacagtgaattcccaactcaaaaaacttcagagtatggagagccaggtcgaggagtggtaccgggaggtgggggagctccaagcccagacggcagccctacctctagaacccgcatccaaagagctggtgggcgaacgccaaaacgccgttggggagaggctggtcaggctgcttgaacctttacaggagaggagaaggcttctgctggcatcaaaggagcttcaccaggttgcgcacgacctggatgatgagctcgcctgggtacaggaaagattgcctttggcaatgcagacagagcgaggaaacgggttacaggctgtgcagcagcacatcaagaagaaccaaggactaaggagagagatacaggcacatggtcctcgccttgaggaagttcttgagcgtgccggagcactggcctctctcaggtcgccagaggctgaggcagttcgcaggggcctggagcagctgcaatccgcctgggccggattgagagaagcggcagagcgcaggcagcaagtgctggatgccgcatttcaggtggagcagtactactttgacgttgccgaggtggaggcttggttgggcgaacaggagctgctgatgatgtccgaggacaaagggaaagacgaacagtctacgttacaactattgaaaaaacacttacagctggaacagggagtagaaaattatgaggagtctatcgcccaactgagcaggcaatgcagagctctgctagagatgggccatccagacagcgagcagattagtcgacggcaatctcaagtagacaggctttacgtcgctttaaaagagctcggagaagagcgacgggtcgccctcgaacaacagtactggttgtatcagttgtctcgccaggttagtgaattggaacattggattgcagaaaaggaggttgtagccggttcacctgaacttggtcaagacttcgagcatgtgagcgtattacaagagaagttttccgagttcgccagcgagacagggatggccggacgggaaaggttagctgccgtaaaccagatggtggatgaattgatcgagtgcgggcacacagccgcagctaccatggccgagtggaaagacggtcttaacgaagcttgggctgaacttttagagctgatgggtaccagagcccagctgctagcggctagccgggagctccacaagttctttagcgacgcacgcgagctgcagggccagattgaagaaaaacgtcggaggctgccccgactcaccactcctccggagccccgtccttctgccagtagcatgcagcgcactcttcgcgctttcgaacatgatttacaactgctggtgagtcaggtacgtcagctccaggagggcgctgcacagctaagaaccgtttacgccggtgaacatgccgaggccatcgcatccagagagcaggaggtgttacagggctggaaagagttgctgagcgcctgcgaggacgccaggttgcacgtgtcctcaactgccgacgctctgagattccactctcaggttagggacctcctgtcctggatggacggtattgcctcccagattggtgctgcagataaaccgagggacgtgtcttccgtggaagttctcatgaactaccatcagggactgaaaacagaacttgaggccagggtgccggagctgactacctgtcaggagctcgggcgttcattgctcctcaacaagtccgcaatggcagatgagatccaagcacagctcgacaagctagggacaaggaaagaggaagtctcagaaaaatgggatagacactgggaatggctccaacagatgcttgaggttcaccaatttgcgcaggaagccgttgtggcagatgcctggctcactgcacaggagccgctcctgcagtccagagaattggggtcctcggtggacgaggtggagcagctaatccggagacatgaagcttttcgaaaagccgcagctgcctgggaagagaggttttccagcttacgcaggctgaccaccatcgaaaagatcaaggctgaacagtccaagcagcctcccactcctttgcttggtcggaagttttttggcgatcccaccgagctcgccgctaaggctgctcctctcctgcggcctggcggttacgagcgcggtttggaacccctcgccagacgcgcatcagacactttgtctgctgaggtccgcaccagagtgggttacgtacgacaggagcttaagcctgaaagattacagcccagaattgacaggctccctgagatcccagggagggtggagcccgcagcattacctgctgcccctgaggatgccgctgagacccctgccaccccagccgctgcagaacaggttagacccagaccagaaagacaggaatcagctgatcgcgcagaggaactgcctagacgacgcaggccggagcgacaggagagcgttgaccaaagtgaagaagcagctcgacggaggagacccgagaggcaagaaagcgctgagcatgaggccgctcactccctgaccctgggacggtacgagcagatggagagacgcagagaacgtagggaaagaagattggagaggcaggagtcatcggaacaggaaatgcccatccggggtgacttggtgaagggtaaggccactctcgccgacatcgtggagcagctgcaagaaaaagaagcaggacccggactgcccgctggaccatccctgccccagcctagggaactgcccccaggaagactccctaatggattggagttgcctgagaggacgccgagaccagaccggccaagagcacgagatcgcccaaaacctagaaggcgaccccgtccacgggagggcggagagggaggaggctcaaggaggtcacgatctgctcctgcacaaggcggaagtgcaccagctcccccacctccgcctactcataccgtccaacacgaggggttcctgctgagaaagagagaactggatgccaacagaaaatcctcgaaccgatcctgggtcagcctttattgtgtactgtccaaaggagagctcggcttttacaaggacagtaaaggccctgcttcggggtccacccacggaggcgagcctctcttgtccctacataaagcgaccagtgaggtggcatctgattacaagaaaaaaaagcatgtgttcaaactgcagacccaggacgggagtgaattcctcctgcaagcgaaggatgaagaagaaatgaacggctggctggaagctgtcgcttccagtgtggcagagcatgccgaaatcgctaggtggggccagaccttgccaactacgtcttcaacggacgaggggaatcctaaacgagagggaggggacaggagagcgtccgggcgtcgcaagta

SEQ ID NO: 206779 - DNA, 3924 bp, Artificial Sequence
  derived and/or modified sequence
atgccccactatcccagttgttccagtgcccctagcctgggcactcctcggccacctcagatccagcagctggaagccaggcatcggaaccaggagaatcagctgagggctcaacagtggatgcaaaagcttcacgaccagctcgaactccaacacttcttgcgtgactgtcatgagctggacggctggattcacgagaagatgctcatggcacgcgacggcacccgagaagacaatcataagcttcacaaaaggtggctgcgccatcaggcctttatggcggaactcgcacagaataaggagtggctggagaagattgaacgggagggtcagcaactgatgcaggaaaagccagagttggctgcaagcgtgagaaagaaacttggagagatccggcagtgttgggcggagctggagtccactacacaggcgaaagctcgtcaattatttgaggcatctaaggcagatcaattggtgcagtctttcgccgaattggataaaaaactgttacatatggaatcccagttgcaagacgttgacccaggaggcgatttggctaccgttaattcccaactgaaaaaacttcagtctatggagtcccaggtggaagaatggtatcgggaagtgggggagctgcaggcacaaaccgccgcattgccactcgaaccagcaagcaaagagcttgtcggagagaggcagaacgccgtcggggagagactcgtaaggctgcttgagcccttacaggagaggagacgcctgctgcttgcaagtaaagagttgcatcaggtcgcccatgatcttgatgatgaactggcctgggtacaggaacgcttgcccctcgcaatgcagaccgaacggggaaatggactccaggctgtccagcagcacattaagaagaatcaaggcctccgacgcgagatccaggcccacggacccaggttggaggaggtcctggaaagggctggcgctcttgctagccttcgctcccctgaggcagaggcagtccgtcgcggactcgaacaattacaatctgcctgggccggtcttcgggaagctgcggagcggagacaacaggtcttagacgctgctttccaggttgaacaatattattttgacgtggctgaagtggaagcctggctgggtgagcaggagttactgatgatgtcggaagacaagggaaaggacgagcagtcgactctccaactcctaaaaaagcacctccaattggagcagggggtggaaaactatgaggaatctatcgcgcagctgagccgtcaatgtagggcactcctggagatggggcatccagattccgagcagatctccagacggcagagccaggtggaccgcctatacgtcgccctgaaggagctgggcgaggaaaggcgagtcgcactcgagcagcagtattggctttatcagctgagcaggcaagtctctgagcttgagcactggattgcggaaaaggaggtggtagcagggtcacctgaacttggacaggacttcgaacatgtgtcggttttgcaggaaaagttttcagagtttgcttcagagacaggtatggctggcagagagcggctggctgctgtgaaccagatggtcgatgaactgattgaatgtggacacacggccgctgccacaatggccgaatggaaagacggtctaaatgaggcctgggcagagctgctggagttgatgggcaccagagcgcagttattagctgctagcagggagcttcacaagttcttctccgacgcacgtgaacttcaaggccagatagaggagaagagacgcaggttaccgaggcttaccacccctccagagccacggccatcagcatcaagcatgcaaagaaccctgcgtgccttcgaacatgatttacagttacttgtgagccaggtcaggcaattacaggagggagccgctcaattgaggaccgtctacgcgggtgaacacgccgaagcaatcgcgagcagagagcaggaagtgctccaggggtggaaggagctgctgtccgcttgtgaagacgcccgtctccatgtctcaagcactgctgatgccctccgattccacagtcaagtgcgagatctgctcagctggatggatgggattgccagtcaaatcggggcagctgacaaaccccgagatgtttcttccgtcgaagtgttgatgaattaccatcagggcctcaagactgagctggaagcgagggtacccgagcttacaacatgtcaggaactcggccgttcgttgctcttaaacaagagtgccatggccgacgagatacaggctcagctggataaactcggaacacggaaggaggaagtttccgaaaagtgggatcgccattgggagtggctgcaacaaatgttggaggtacaccagttcgcacaagaggctgttgtagctgacgcctggttaaccgcgcaggagccactgctacagtcgagagaattgggctccagtgtcgatgaagtggaacagctaatccggcgtcacgaggccttcaggaaagcagccgctgcctgggaagaacgattttcaagcctgcggaggctcaccactatcgagaagattaaagcggaacagagcaaacagccgccaaccccgctgctgggacgcaaattcttcggcgacccaaccgagctcgccgctaaagctgctccgttgctgcggcctggcggttacgagagaggactcgaacccttagctcgccgtgcctcggacacattatctgccgaagtccggactcgtgttgggtatgttcggcaggaactaaaacccgagaggctgcaacctagaattgatcgcttacctgagattccagggagggttgaaccagctgccctgccagcagctcccgaggacgccgctgagacgcctgcaactcccgctgcagccgagcaggtgaggcccaggccagaaaggcaggagagcgcagaccgggctgaagaattgcccagaagaagacggcctgagcgccaggaatctgttgatcagtcagaagaggccgctcggcgtcggcgtccagagagacaagagagcgccgaacacgaggcagcccacagtcttacactggggaggtacgagcaaatggagaggcgacgggaacgaagagagaggcgactggagcggcaagagagctcagaacaagaaatgccaatccgcggtgatctggtgaagggcaaggcaactctggccgatattgtggaacaactccaggaaaaagaggcgggacctggactcccagcagggccttcgctgccccagcccagggagttacccccaggcagactgccgaacggactcgagttaccagagaggaccccccgaccagacaggcccagagccagggacaggccaaagcctcgcagacgcccacgccctcgcgaaggtggagagggtggcggttccaggaggtccaggagcgctcctgcccaaggtggttctgcacccgctcctccccctcctcccacccacacagtccagcatgaaggtttccttctaaggaagcgcgaattggatgccaaccggaaatctagcaataggagctgggtctccctttactgcgtgttatccaaaggagagctaggtttttacaaggacagcaagggcccagctagtggctctacacatgggggagagcccctgttgtcgctgcataaagcgacttcagaggtggcctcagattataaaaagaagaagcacgtctttaagttgcagacccaggatggttccgagtttctgctgcaggcaaaagatgaagaggaaatgaacgggtggctcgaagcggtggccagtagtgtggccgaacacgctgagatcgctaggtggggtcagacactgcctacaaccagtagtacagacgaggggaatccaaagagagaaggtggcgacaggagagcaagcggccgtagaaagtag

SEQ ID NO: 206780 - DNA, 7694 bp, Artificial Sequence
  derived and/or modified sequence
atggcgcaggtgccaggcgaagtcgacaatatggaagggctgcccgctccaaacaataatccagcggctcggtgggagagcccagatcgcggatgggagcgggagcagcccgctgcatctaccgctgccgcttcactgttcgagtgttcaagaatcaaagcgctggcagacgagagagaggccgtgcaaaagaaaacatttacgaaatgggttaatagccatttggcccgagtgggctgccacattggagatttatacgtcgatctccgggatggattcgtgctcacacggttactggaggtgctctcaggggagcagcttcctcggccaacccgtgggagaatgagaatccatagcctagaaaatgtggacaaagccctgcaatttctgaaagaacagagggtccatctcgagaatgttgggagtcacgacatcgtggacggtaaccacaggctcactctgggactggtgtggactattatcctccgcttccagatccaggtaataaagatagagacagaggataatcgtgagactcgttcagctaaagacgcactactgttgtggtgccaaatgaaaaccgcaggttacccagaagtgaacattcagaactttaccaccagttggagagacggtttagcgtttaatgccttaatccatagacacaggcccgatctggtggacttttctaagctgactaagtctaacgccaactataacctgcagagagcattcagaaccgccgagcaacacctggggttggcaagactgttagatcctgaggacgtgaacatggaagcaccagacgagaaatccattattacctatgtagtgtcattttaccactattttagcaaaatgaaggccttggccgtggagggcaagcggataggaaaagtccttgaccaggtgctggaggtgggaaaaatcattgagcggtatgaggagcttgctgcggagctgctagcttggattcatcgcaccgtagggttgatctcaaaccagaaattcgccaatagcctcagtggggtgcagcagcaactgcaggccttcaccgcatattgcaccctagaaaagcccgtaaagttccaggaaaagggtaatctggaagtgctgttattctcaattcagagcaaactccgcgcttgcaacagacgcctgtttgtcccgagagagggttgcggcatttgggacatcgataaggcttggggcgagctggagaaagccgagcacgagcgcgaagctgccctacgggcagagctgattcggcaagagaaactcgagctcctggcacaacgctttgaccacaaggtggccatgcgcgagagttggctgaatgaaaaccaacggctggtctcccaggataacttcgggtacgaactccctgcagtggaggccgctatgaagaagcacgaggccatcgaggccgacatagccgcatatgaagagagggttcagggcgtggctgaactcgcccaagcactggcggcagaaggatattacgacattcggagggttgctgcccagagggattccgtgctgaggcagtgggccctgctcactggcctagtaggcgcacgacgtacacggctggagcagaacctcgccttgcagaaggtattccaagaaatggtttatatggtagactggatggaagagatgcaagctcagctgctgagcagagagtgcgggcagcacctcgtggaggccgacgacttgttgcaaaagcacggcttactggagggagatatcgcagcacagtccgagagggtcgaagccctcaatgccgctgccctgaggttttcccagctgcagggatatcagccctgcgatccgcaggtcatctgtaaccgcgtgaatcatgtgcacggatgtctcgcagaactgcaggaacaagcagcccgacgcagggccgagctggaggcaagtaggtccttgtgggccctgctccaggagctggaggaggcagaatcctgggctcgcgacaaagagcgactgcttgaggctgccggagggggaggggcagcaggagctgccggagctgccggtacggccggtggggctcacgacctgtcatctacagccaggctcctcgctcagcataagatccttcagggagaattgggaggacgacgggctcttttacagcaagccctgcggtgcggggaagagctggttgcagccggtggagctgtcggtcccggtgctgacacagttcaccttgtcgggttagcagaacgcgcagcctccgctcggagacgatggcagaggctggaagaggccgctgcgaggagagagaggagacttcaagaggcccgtgccctgcatcagttcggtgccgatctggatggtctgttggactggttgagagacgcctatagactcgctgccgcaggcgactttgggcatgatgaggcctcatccaggcggctcgccagacaacacagggcacttacaggcgaagtggaagctcaccgtggaccagtgtctggtctgcgacgacaacttgctaccttagggggagcctccggggctggaccactcgttgtcgctctacaggtgcgcgtggtggaggcagaacaattgttcgccgaggtgacagaagtggcggctctaaggcggcagtggctgagggacgcactggcagtctatcggatgttcggtgaagtgcacgcctgtgagctgtggatcggtgaaaaggagcagtggctattgagcatgcgtgtgcccgattccctagacgatgtcgaagtggtacagcacaggtttgaaagtttggaccaggaaatgaattcgctgatgggaagggttttggatgtgaatcacacagtccaggaactagtagaaggtggccatccgtctagtgacgaggtcaggtcctgccaggaccacctgaactcccgctggaaccggatagtagaactggtggagcaaaggaaagaggaaatgagcgcggtcctccttgttgagaaccacgtgttagaagttgcagaagtgagagcacaagttcgggagaagaggagggccgtagagtccgctccccgtgcaggcggagcactccagtggagactctccgggttggaggctgcccttcaggccctggaacctcgccaggcggcattgctggaagaggccgctctgctagccgaacgtttccctgcacaggcagctcgactgcaccaaggcgctgaagagctgggcgctgaatggggcgcactggcgtccgccgcacaggcctgtggagaagctgtggcagctgccggaagactgcagcgcttcctgcatgacctggacgcctttctggactggctggtcagagcccaggaagcagcgggtggctctgaaggacctttaccaaatagcctggaagaagcagacgctctgctcgccaggcacgcagcactgaaggaggaggtagatcaaagagaggaggattatgcaaggatagttgcagctagcgaggctctgctagctgccgatggcgctgagctgggcccagggttagctctggacgaatggctgccccatcttgagttgggctggcataaacttctcggcctgtgggaggctcgtcgcgaggccctagtgcaggcccacatctaccagcttttcttacgcgacttgagacaagccctggtggttctcaggaaccaagagatggccctctccggcgcagagctccccggtacagtcgagagcgtcgaggaggctctcaagcagcatcgggacttcttgaccaccatggagctgtctcagcagaaaatgcaggtcgcagtgcaggctgccgagggcctgctgcggcaggggaatatatacggcgagcaggcacaggaagccgtgacaaggcttctggaaaagaaccaggagaatcagcttcgcgcacaacaatggatgcagaaattgcatgaccagttagagcttcagcatttcctcagagactgccacgaactcgatggctggattcacgagaaaatgttaatggctagggacggcacaagggaggacaatcataagctacataagcgttggttgaggcatcaggctttcatggccgagttggcccagaacaaagagtggttggagaagatagaacgcgagggacagcagttgatgcaggagaaacctgagttagcagcttctgttcggaaaaagctgggcgagatcagacagtgttgggccgagttggaaagcaccacacaggccaaggccagacagttgttcgaagcttccaaggccgaccagctggttcagtcatttgctgaacttgataagaagctgctgcacatggagtctcagttacaagacgtcgacccaggtggggatctcgccactgtgaacagccagctgaagaaactgcaaagtatggaaagccaggtggaagagtggtatcgggaggttggagagcttcaggctcaaacggccgcacttccactggagcccgcatcaaaggagctggtgggcgagcgccagaacgcggtaggtgagaggcttgtccgccttctcgaacctcttcaggagcgcaggagacttctgctagcatcaaaagagctccatcaggtggcacatgactggaccacctcctgggcgtgggtgcaggagagacttcctctcgcgatgcagacagagcgcggaaatgggctgcaagcagtccagcagcacattaaaaaaaatcaggggttgcgccgtgaaatccaggctcacggccctcggctggaagaggtgctggaaagagcaggagctctggccagtcttagatcccctgaggctgaggccgtgagaagaggattggaacagcttcagtccgcatgggcaggactcagggaagcagctgaaagacgtcaacaggtgctcgatgccgcttttcaggtggagcagtattattttgatgtggccgaggtcgaagcctggctgggggaacaggaactgctgatgatgtccgaagataagggcaaggatgagcagtctactctgcagttacttaagaagcaccttcagctggaacagggtgtcgaaaactacgaggaaagcattgcgcagcttagtaggcagtgccgtgctcttctggaaatggggcacccagacagtgaacagatcagtcggaggcaatcccaggtcgatcgcctttacgtcgccctcaaggagctgggcgaagaacggcgtgtcgctctcgagcaacagtattggctttatcagttatcgagacaggtaagtgagcttgaacactggatcgctgaaaaagaggtcgtcgcagggtctcccgagctgggacaggactttgaacacgtgagcgtcctccaagagaaatttagtgagttcgcctctgaaacaggcatggcagggagagaacgcctcgcagcggtgaaccagatggtcgacgagttgattgagtgcggacacaccgccgctgccaccatggccgaatggaaggacggcctgaatgaggcgtgggccgagcttctggagttgatgggcacacgggcacagctgctggctgcatcccgcgaattgcataaattcttctccgacgccagggagctgcagggtcagatagaagaaaagaggcgaagactccccagactgacaactccaccagagccccgaccttccgctagttcaatgcagcggaccctgcgcgcttttgagcacgacttgcagttacttgtgagccaggtaaggcagcttcaggaaggagccgctcagctacgcaccgtctacgctggagagcacgctgaggctattgcatctagggaacaagaggtcttacaaggttggaaagagctgctcagtgcctgcgaggacgcaagactccacgtatccagtacagccgatgctctcaggtttcatagccaggttagggacctgctgagctggatggatggcatcgccagtcaaattggagcagctgataagccaagagacgttagcagtgtcgaggttcttatgaactaccaccagggtcttaagacggagcttgaggcacgagtccccgaactgacgacgtgccaggaactcggacgcagtctgttactgaataagtctgctatggctgatgagatccaagcccaactagacaaactaggcactcgtaaggaagaagtctcggagaagtgggacaggcactgggagtggctacagcaaatgttggaagtgcatcagtttgctcaggaagccgtcgtagccgatgcttggctgacagcccaggagccactgctgcagtcacgtgagttgggctcttcagtggatgaagtagaacagctcataaggcgacatgaggctttccggaaggccgctgcagcctgggaagagcggttctcaagtctacgacgactgactacgatcgagaaaatcaaagcggaacaaagtaaacagcctcctactcctctgttagggaggaagttttttggcgacccaacagagctcgctgcaaaagccgcaccacttctgcggccaggcggttacgagagggggcttgagccactcgctcggcgtgcatcagatacgctgtctgccgaggtgcggacgcgcgttggctacgtccgacaggaactaaagcccgagcgcctgcagcccaggattgatagactacccgagataccagggagggtggaaccagcagcacttccggcagccccagaggatgccgctgaaacccctgccacacccgctgccgcagagcaagtaagacccaggccagagcgtcaggagagcgctgatcgggctgaagaattacctagacgaagaaggcccgagcgtcaggaaagtgtcgatcagtccgaggaagcggctaggaggcgacggcctgaaagacaggaatcggccgagcacgaagctgcccactcccttaccctcgggagatacgaacagatggaacgaagacgggagagacgcgaacgaagattggaaaggcaggaatcctctgagcaggagatgcccatccgaggggacctggttaaagggaaggccacgctggcggatattgtggaacagttgcaggaaaaggaggccggaccaggcctaccggcaggacctagcttgccacagcccagagagctgccaccagggagactccccaacggcttggaacttccggaacggacaccaagaccagaccggcctagggcaagggacaggccaaagcccaggcggaggcctcggccaagggaggggggagaggggggagggtctcggaggtctcggtcagcgccagcacagggtgggagtgccccagctcctcccccacctcctacccacacagtgcagcacgagggcttcctgctgcgcaagcgagagttggatgccaacagaaagagcagcaatagatcttgggtaagcctgtactgcgttttaagtaaaggagagctcggattctacaaagacagtaagggacctgcgtctggctcaacccatggaggcgagccactcctctctcttcacaaggccaccagtgaagtcgccagcgactataagaagaaaaaacatgtgttcaaactgcagacacaggacggatcagagttcttattgcaggctaaagatgaggaagaaatgaatggctggctagaggccgtcgcctcttctgtggcggaacacgccgagatcgctagatgggggcagacacttcccaccacgagcagtacagatgaggggaatcctaagagggaggggggagacaggcgcgcaagcggaagacgcaagta

SEQ ID NO: 206781 - DNA, 6567 bp, Artificial Sequence
  derived and/or modified sequence
ggccgggccgggcagcggacgccgacagggagggcggtcggtcgcggcgagcagcggagacagcgacgctggcggccgcgggcccaggcctcaccttccccgatggcgcaggtaccaggggaagtggacaacatggagggcctgcctgctcctaacaacaaccctgctgcccgctgggagagtccggatcggggctgggagcgggagcagccggctgcgtccaccgcagcggcctcgctctttgagtgctcccggatcaaggccttggcagatgagcgggaagccgtgcagaagaaaaccttcaccaagtgggtgaactcgcacctcgcccgcgtgggctgccacatcggggacctctatgtggacctccgggacggcttcgtgctcacgcggctcctggaagtgctgtctggggagcagctgcccaggcccacgcgcggccgcatgcggatccactcactggagaacgtggacaaggcgctgcagtttctgaaggagcagcgcgtgcacctggagaacgtgggttcgcatgacatcgtggatgggaatcaccggctgacgctggggctggtctggaccatcatcctgcgcttccagattcaagtcatcaaaattgagactgaggacaacagagagacacgctcagccaaggatgctctgctcttgtggtgtcagatgaagacagctggttaccctgaggtaaacatccagaatttcaccaccagctggcgggatggcttggccttcaatgccctcattcaccggcacaggcctgatctcgtggacttcagcaaactcaccaagtccaatgccaactacaacctgcagagagccttccgcacagctgagcagcacctggggctggcgcggctgctggatcctgaagatgtgaacatggaggctccagatgagaagtccatcatcacctacgtggtctctttctaccactatttctccaagatgaaggctctggctgtggaggggaagcgtatcgggaaggtcttggaccaggtattggaggtggggaagatcatagaacgctacgaggagctggcggctgagctgctggcctggatccaccgcaccgtgggcctcatcagcaatcagaaatttgccaactccttaagtggggtgcagcagcaactccaggctttcacggcctattgcacgctggagaagcctgtcaagttccaggagaaggggaacctagaggtgctgctcttcagcatccagagcaaactgcgtgcctgcaaccgtcgcctctttgtgcctcgggagggctgtggcatctgggatattgacaaggcatggggtgagctggagaaggctgagcatgagcgggaggctgccctacgggctgagctgattcggcaggagaagctggaactactggcacagaggtttgaccacaaggtggctatgagggagagctggctgaatgagaaccagcgtctggtctcccaggacaactttgggtatgagctgcccgcagtggaggcagccatgaagaaacacgaagcgatcgaggcagacattgcggcctacgaggagcgggtgcagggtgtggcggagctggcccaggcattggcagccgaaggctactacgatatccggcgggtggcagcccagcgtgacagcgtcctgcgccagtgggccctgctaactgggcttgtgggtgcccggcggacacgacttgagcagaaccttgccctgcagaaggtcttccaggagatggtgtacatggtggactggatggaggagatgcaggctcagctgctgtcccgggagtgtgggcagcacctggtggaggcagacgacctgttgcagaagcatggactgctggagggagacattgccgcccagagcgagcgggtggaggctctcaatgccgctgccctgcgcttctcccagctgcagggctaccagccctgcgacccgcaggtcatctgcaaccgcgtgaaccacgtgcacggctgcctggcggagctgcaggagcaggcagcgcggcgacgcgcggagctggaggcttcgcggagcctgtgggcgctgctgcaggagctggaggaggccgagagctgggcgcgcgacaaggagcgtctcctggaggctgcgggcggcggcggtgcggcgggcgcagcgggcgcagcgggaacagcgggcggcgcgcatgacctgtccagcacagcgcgcctcctggcccagcacaagatcctgcagggcgagctgggcgggcggcgagcgttgctgcagcaggccctgcggtgtggcgaggagctggttgcggccggcggtgccgtcggcccgggagcagacaccgtgcacctggtaggcctggcggagcgcgcggcgagcgcccggcgccgctggcagaggctggaagaggcggcggcgcggcgagagcggcggctgcaggaggcgcgggcgctgcaccagttcggcgctgacctcgacgggctgctggactggcttcgcgacgcttaccgcctggcagccgccggtgacttcggccacgacgaagcttccagccgccgcctggcgcgccagcaccgcgcgctcaccggggaggtggaggcacatcgcgggcccgtgagcggcctgcggcgccagctggcgacactcgggggtgccagtggcgcagggccactggtggtggcgctgcaggtgcgcgtggtggaagcagagcagttgttcgctgaggtgaccgaagtggcggcgctgaggcgccagtggctgcgggacgcgctcgctgtctaccgcatgtttggcgaggtgcacgcgtgtgagctgtggatcggcgagaaggagcaatggctgctctccatgcgtgtgccggattcactcgacgacgtcgaggtggtgcagcaccgattcgagagcctggaccaagagatgaacagcctgatgggccgcgttctggacgtgaaccacacagtccaggagctggtggaaggaggccaccccagttcagatgaggtgcgttcctgccaggaccacctcaacagcaggtggaaccgcatcgtggagctagtggaacagcgcaaagaggaaatgagcgcggtgctgctggtggagaaccacgtgctggaggtggccgaggtgcgcgcccaggtgcgtgagaagcggagagctgtggagagcgcgccccgggccggcggcgccctgcagtggcgtcttagcggcctagaggccgctctgcaggcgctggagccgcgccaggcggcccttctggaggaggcagccctgctggctgagcgcttcccggcgcaggcggcgcggctgcaccagggcgcggaggagctgggcgccgagtggggcgcgctagctagcgcggctcaggcctgcggcgaggcggtggcggcagcagggcgcctgcagcgcttcctacatgacctcgacgctttcctggactggctcgtgcgcgcccaggaggcggcgggcggcagcgaggggcccctgcccaacagcctagaagaggcggacgcgctgctggcgcgccacgctgcgctcaaggaggaggtggaccagcgcgaggaagactatgctcgcatcgtggcggccagcgaggcgctgctggccgccgacggcgcagagctgggcccgggcctggcactagacgagtggctgccacacctcgaacttggctggcataaactgctcggcttgtgggaggcgcgcagggaggcgctggtccaggcgcacatctaccagctcttcctgcgggatctacgccaggcgctcgtggtgctgcgtaaccaggagatggcgctgtctggtgcggagctcccgggcacagtggaatcggtggaggaggccttgaaacagcaccgtgactttctcaccaccatggagctgagccagcaaaagatgcaggtggccgtgcaggctgcagagggcctgctgaggcagggcaacatctacggggagcaggctcaggaggctgtgacccggctgctggagaagaaccaagaaaaccagttacgggcccagcaatggatgcaaaagctacatgaccaacttgagctgcagcacttcctccgagactgccacgagctggatggctggatccatgagaagatgctgatggcgcgggatggcacgcgggaggacaaccacaagctgcataagagatggctccggcaccaggcattcatggccgagctggctcagaataaggagtggctggagaagatcgagcgggagggccagcaactgatgcaggagaagcccgaactggcggcctccgtgcggaagaagctgggcgagatccgccagtgctgggcggagctggagagcaccacccaggccaaggcacggcagctctttgaggccagcaaagcagaccagctggtgcagagctttgctgagctggacaagaagctccttcacatggagagccagctgcaagacgtggaccctggaggagacctggccactgtcaacagtcagctcaagaagctgcagtccatggagtcgcaggtggaggagtggtaccgcgaggtgggagagctgcaggcgcagacggcggcgctgccgctggagccggcgagcaaggagctggtgggtgagcggcagaacgcggtgggcgagcgcctggtgcgcctgctcgagccgttgcaggagcgccgccgcttgctgctggcttccaaggagttgcaccaggtggcgcacgacctggacgacgagctggcatgggttcaggagcggctgccactggccatgcagacagagcgaggcaacggtttgcaggcggtccagcagcacatcaaaaagaaccagggcctgcggcgggagatccaggcgcatgggccgcgcctggaggaggtgctggagcgcgcgggcgcgctggcgtcgctgcgcagcccggaggcagaggcagtgcgccggggcctggagcagctgcagagcgcctgggccggactgcgggaggctgccgagcgacggcagcaggtgctggacgccgccttccaggtggagcagtactacttcgacgtggctgaggtggaggcgtggctgggcgagcaggagctgctcatgatgagtgaggacaagggcaaggacgaacagagcaccctgcagctgctcaagaaacacctgcagctggagcaaggcgtggagaactacgaggaaagcatcgcgcagctgtcgcgccagtgccgggcgctgctggagatggggcacccggacagcgagcagatcagccggcggcagtctcaggtggaccgcctgtacgtggcgctcaaggagctgggtgaggagcgccgggtggctctggaacagcagtactggctgtaccagctcagccgccaggtgagcgagcttgagcactggattgccgagaaggaggtggtggctggctcacccgagctcggccaggactttgagcatgtctcggtgctgcaggagaaattctcagagtttgccagcgagacaggtatggcagggcgggaacggctggcagctgtgaaccagatggtggatgagctgatcgagtgtggccatacagcagcggccaccatggccgagtggaaggacggactgaacgaggcctgggctgagctgctggagctcatgggcacacgggcccagctgctggccgcctctcgggagcttcataagttcttcagtgacgcccgagagcttcagggacagattgaggagaagcggaggcggctgccccgcctgaccaccccgcctgagccgagacccagtgccagttccatgcagcggaccctgagagcctttgagcatgacctgcagctcctcgtgtcccaggtacggcagctgcaggagggggcggcccagctgcggacggtgtatgcgggtgaacatgccgaggccatcgctagccgggagcaggaggtgctgcagggttggaaagagctgctgtcagcctgtgaggatgcccgcctgcatgtcagctccacagccgacgccctgcgcttccacagccaagtccgcgacctgctctcctggatggatggcatcgccagccagattggggcagccgacaagcccagggacgtgtcatcagtggaggtgctcatgaactaccaccagggcctgaagactgagctggaggcgcgggtgcctgagctgaccacctgccaggagctggggcgatctctgctgctcaacaaaagtgccatggctgatgagatccaggcacagctggacaagctgggaaccaggaaggaggaggtgtcggaaaagtgggaccgccattgggagtggctgcagcagatgctggaggtgcaccagtttgcccaggaggcggtggtggctgatgcctggctgacagcccaggagccgctcctgcagagccgggagctgggcagcagcgtggatgaggtggagcagcttatccggcgacatgaggccttccgcaaagcggctgcagcctgggaagagaggttcagctctctgcggcgcctgaccacgcctaggcgggaggatcacttgaacccaggagttcaagaccagccttggcaacatactgagaagccgtctctaccaaaaccaaaagcaaacaaagaaaaaacagccaggcgtgatggcacgtgcctgtag

SEQ ID NO: 206782 - DNA, 4032 bp, Artificial Sequence
  derived and/or modified sequence
ggccgggccgggcagcggacgccgacagggagggcggtcggtcgcggcgagcagcggagacagcgacgctggcggccgcgggcccaggcctcaccttccccgatggcgcaggtaccaggggaagtggacaacatggagggcctgcctgctcctaacaacaaccctgctgcccgctgggagagtccggatcggggctgggagcgggagcagccggctgcgtccaccgcagcggcctcgctctttgagtgctcccggatcaaggccttggcagatgagcgggaagccgtgcagaagaaaaccttcaccaagtgggtgaactcgcacctcgcccgcgtgggctgccacatcggggacctctatgtggacctccgggacggcttcgtgctcacgcggctcctggaagtgctgtctggggagcagctgcccaggcccacgcgcggccgcatgcggatccactcactggagaacgtggacaaggcgctgcagtttctgaaggagcagcgcgtgcacctggagaacgtgggttcgcatgacatcgtggatgggaatcaccggctgacgctggggctggtctggaccatcatcctgcgcttccagattcaagtcatcaaaattgagactgaggacaacagagagacacgctcagccaaggatgctctgctcttgtggtgtcagatgaagacagctggttaccctgaggtaaacatccagaatttcaccaccagctggcgggatggcttggccttcaatgccctcattcaccggcacaggcctgatctcgtggacttcagcaaactcaccaagtccaatgccaactacaacctgcagagagccttccgcacagctgagcagcacctggggctggcgcggctgctggatcctgaagatgtgaacatggaggctccagatgagaagtccatcatcacctacgtggtctctttctaccactatttctccaagatgaaggctctggctgtggaggggaagcgtatcgggaaggtcttggaccaggtattggaggtggggaagatcatagaacgctacgaggagctggcggctgagctgctggcctggatccaccgcaccgtgggcctcatcagcaatcagaaatttgccaactccttaagtggggtgcagcagcaactccaggctttcacggcctattgcacgctggagaagcctgtcaagttccaggagaaggggaacctagaggtgctgctcttcagcatccagagcaaactgcgtgcctgcaaccgtcgcctctttgtgcctcgggagggctgtggcatctgggatattgacaaggcatggggtgagctggagaaggctgagcatgagcgggaggctgccctacgggctgagctgattcggcaggagaagctggaactactggcacagaggtttgaccacaaggtggctatgagggagagctggctgaatgagaaccagcgtctggtctcccaggacaactttgggtatgagctgcccgcagtggaggcagccatgaagaaacacgaagcgatcgaggcagacattgcggcctacgaggagcgggtgcagggtgtggcggagctggcccaggcattggcagccgaaggctactacgatatccggcgggtggcagcccagcgtgacagcgtcctgcgccagtgggccctgctaactgggcttgtgggtgcccggcggacacgacttgagcagaaccttgccctgcagaaggtcttccaggagatggtgtacatggtggactggatggaggagatgcaggctcagctgctgtcccgggagtgtgggcagcacctggtggaggcagacgacctgttgcagaagcatggactgctggagggagacattgccgcccagagcgagcgggtggaggctctcaatgccgctgccctgcgcttctcccagctgcagggctaccagccctgcgacccgcaggtcatctgcaaccgcgtgaaccacgtgcacggctgcctggcggagctgcaggagcaggcagcgcggcgacgcgcggagctggaggcttcgcggagcctgtgggcgctgctgcaggagctggaggaggccgagagctgggcgcgcgacaaggagcgtctcctggaggctgcgggcggcggcggtgcggcgggcgcagcgggcgcagcgggaacagcgggcggcgcgcatgacctgtccagcacagcgcgcctcctggcccagcacaagatcctgcagggcgagctgggcgggcggcgagcgttgctgcagcaggccctgcggtgtggcgaggagctggttgcggccggcggtgccgtcggcccgggagcagacaccgtgcacctggtaggcctggcggagcgcgcggcgagcgcccggcgccgctggcagaggctggaagaggcggcggcgcggcgagagcggcggctgcaggaggcgcgggcgctgcaccagttcggcgctgacctcgacgggctgctggactggcttcgcgacgcttaccgcctggcagccgccggtgacttcggccacgacgaagcttccagccgccgcctggcgcgccagcaccgcgcgctcaccggggaggtggaggcacatcgcgggcccgtgagcggcctgcggcgccagctggcgacactcgggggtgccagtggcgcagggccactggtggtggcgctgcaggtgcgcgtggtggaagcagagcagttgttcgctgaggtgaccgaagtggcggcgctgaggcgccagtggctgcgggacgcgctcgctgtctaccgcatgtttggcgaggtgcacgcgtgtgagctgtggatcggcgagaaggagcaatggctgctctccatgcgtgtgccggattcactcgacgacgtcgaggtggtgcagcaccgattcgagagcctggaccaagagatgaacagcctgatgggccgcgttctggacgtgaaccacacagtccaggagctggtggaaggaggccaccccagttcagatgaggtgcgttcctgccaggaccacctcaacagcaggtggaaccgcatcgtggagctagtggaacagcgcaaagaggaaatgagcgcggtgctgctggtggagaaccacgtgctggaggtggccgaggtgcgcgcccaggtgcgtgagaagcggagagctgtggagagcgcgccccgggccggcggcgccctgcagtggcgtcttagcggcctagaggccgctctgcaggcgctggagccgcgccaggcggcccttctggaggaggcagccctgctggctgagcgcttcccggcgcaggcggcgcggctgcaccagggcgcggaggagctgggcgccgagtggggcgcgctagctagcgcggctcaggcctgcggcgaggcggtggcggcagcagggcgcctgcagcgcttcctacatgacctcgacgctttcctggactggctcgtgcgcgcccaggaggcggcgggcggcagcgaggggcccctgcccaacagcctagaagaggcggacgcgctgctggcgcgccacgctgcgctcaaggaggaggtggaccagcgcgaggaagactatgctcgcatcgtggcggccagcgaggcgctgctggccgccgacggcgcagagctgggcccgggcctggcactagacgagtggctgccacacctcgaacttggctggcataaactgctcggcttgtgggaggcgcgcagggaggcgctggtccaggcgcacatctaccagctcttcctgcgggatctacgccaggcgctcgtggtgctgcgtaaccaggagatggcgctgtctggtgcggagctcccgggcacagtggaatcggtggaggaggccttgaaacagcaccgtgactttctcaccaccatggagctgagccagcaaaagatgcaggtggccgtgcaggctgcagagggcctgctgaggcagggcaacatctacggggagcaggctcaggaggctgtgacccggctgctggagaaatgcctcattatccatcctgctcttctgcaccctccttgggaacccccagacctccccagatccagcagctag

SEQ ID NO: 206783 - DNA, 8686 bp, Artificial Sequence
  derived and/or modified sequence
ggccgggccgggcagcggacgccgacagggagggcggtcggtcgcggcgagcagcggagacagcgacgctggcggccgcgggcccaggcctcaccttccccgatggcgcaggtaccaggggaagtggacaacatggagggcctgcctgctcctaacaacaaccctgctgcccgctgggagagtccggatcggggctgggagcgggagcagccggctgcgtccaccgcagcggcctcgctctttgagtgctcccggatcaaggccttggcagatgagcgggaagccgtgcagaagaaaaccttcaccaagtgggtgaactcgcacctcgcccgcgtgggctgccacatcggggacctctatgtggacctccgggacggcttcgtgctcacgcggctcctggaagtgctgtctggggagcagctgcccaggcccacgcgcggccgcatgcggatccactcactggagaacgtggacaaggcgctgcagtttctgaaggagcagcgcgtgcacctggagaacgtgggttcgcatgacatcgtggatgggaatcaccggctgacgctggggctggtctggaccatcatcctgcgcttccagattcaagtcatcaaaattgagactgaggacaacagagagacacgctcagccaaggatgctctgctcttgtggtgtcagatgaagacagctggttaccctgaggtaaacatccagaatttcaccaccagctggcgggatggcttggccttcaatgccctcattcaccggcacaggcctgatctcgtggacttcagcaaactcaccaagtccaatgccaactacaacctgcagagagccttccgcacagctgagcagcacctggggctggcgcggctgctggatcctgaagatgtgaacatggaggctccagatgagaagtccatcatcacctacgtggtctctttctaccactatttctccaagatgaaggctctggctgtggaggggaagcgtatcgggaaggtcttggaccaggtattggaggtggggaagatcatagaacgctacgaggagctggcggctgagctgctggcctggatccaccgcaccgtgggcctcatcagcaatcagaaatttgccaactccttaagtggggtgcagcagcaactccaggctttcacggcctattgcacgctggagaagcctgtcaagttccaggagaaggggaacctagaggtgctgctcttcagcatccagagcaaactgcgtgcctgcaaccgtcgcctctttgtgcctcgggagggctgtggcatctgggatattgacaaggcatggggtgagctggagaaggctgagcatgagcgggaggctgccctacgggctgagctgattcggcaggagaagctggaactactggcacagaggtttgaccacaaggtggctatgagggagagctggctgaatgagaaccagcgtctggtctcccaggacaactttgggtatgagctgcccgcagtggaggcagccatgaagaaacacgaagcgatcgaggcagacattgcggcctacgaggagcgggtgcagggtgtggcggagctggcccaggcattggcagccgaaggctactacgatatccggcgggtggcagcccagcgtgacagcgtcctgcgccagtgggccctgctaactgggcttgtgggtgcccggcggacacgacttgagcagaaccttgccctgcagaaggtcttccaggagatggtgtacatggtggactggatggaggagatgcaggctcagctgctgtcccgggagtgtgggcagcacctggtggaggcagacgacctgttgcagaagcatggactgctggagggagacattgccgcccagagcgagcgggtggaggctctcaatgccgctgccctgcgcttctcccagctgcagggctaccagccctgcgacccgcaggtcatctgcaaccgcgtgaaccacgtgcacggctgcctggcggagctgcaggagcaggcagcgcggcgacgcgcggagctggaggcttcgcggagcctgtgggcgctgctgcaggagctggaggaggccgagagctgggcgcgcgacaaggagcgtctcctggaggctgcgggcggcggcggtgcggcgggcgcagcgggcgcagcgggaacagcgggcggcgcgcatgacctgtccagcacagcgcgcctcctggcccagcacaagatcctgcagggcgagctgggcgggcggcgagcgttgctgcagcaggccctgcggtgtggcgaggagctggttgcggccggcggtgccgtcggcccgggagcagacaccgtgcacctggtaggcctggcggagcgcgcggcgagcgcccggcgccgctggcagaggctggaagaggcggcggcgcggcgagagcggcggctgcaggaggcgcgggcgctgcaccagttcggcgctgacctcgacgggctgctggactggcttcgcgacgcttaccgcctggcagccgccggtgacttcggccacgacgaagcttccagccgccgcctggcgcgccagcaccgcgcgctcaccggggaggtggaggcacatcgcgggcccgtgagcggcctgcggcgccagctggcgacactcgggggtgccagtggcgcagggccactggtggtggcgctgcaggtgcgcgtggtggaagcagagcagttgttcgctgaggtgaccgaagtggcggcgctgaggcgccagtggctgcgggacgcgctcgctgtctaccgcatgtttggcgaggtgcacgcgtgtgagctgtggatcggcgagaaggagcaatggctgctctccatgcgtgtgccggattcactcgacgacgtcgaggtggtgcagcaccgattcgagagcctggaccaagagatgaacagcctgatgggccgcgttctggacgtgaaccacacagtccaggagctggtggaaggaggccaccccagttcagatgaggtgcgttcctgccaggaccacctcaacagcaggtggaaccgcatcgtggagctagtggaacagcgcaaagaggaaatgagcgcggtgctgctggtggagaaccacgtgctggaggtggccgaggtgcgcgcccaggtgcgtgagaagcggagagctgtggagagcgcgccccgggccggcggcgccctgcagtggcgtcttagcggcctagaggccgctctgcaggcgctggagccgcgccaggcggcccttctggaggaggcagccctgctggctgagcgcttcccggcgcaggcggcgcggctgcaccagggcgcggaggagctgggcgccgagtggggcgcgctagctagcgcggctcaggcctgcggcgaggcggtggcggcagcagggcgcctgcagcgcttcctacatgacctcgacgctttcctggactggctcgtgcgcgcccaggaggcggcgggcggcagcgaggggcccctgcccaacagcctagaagaggcggacgcgctgctggcgcgccacgctgcgctcaaggaggaggtggaccagcgcgaggaagactatgctcgcatcgtggcggccagcgaggcgctgctggccgccgacggcgcagagctgggcccgggcctggcactagacgagtggctgccacacctcgaacttggctggcataaactgctcggcttgtgggaggcgcgcagggaggcgctggtccaggcgcacatctaccagctcttcctgcgggatctacgccaggcgctcgtggtgctgcgtaaccaggagatggcgctgtctggtgcggagctcccgggcacagtggaatcggtggaggaggccttgaaacagcaccgtgactttctcaccaccatggagctgagccagcaaaagatgcaggtggccgtgcaggctgcagagggcctgctgaggcagggcaacatctacggggagcaggctcaggaggctgtgacccggctgctggagaagaaccaagaaaaccagttacgggcccagcaatggatgcaaaagctacatgaccaacttgagctgcagcacttcctccgagactgccacgagctggatggctggatccatgagaagatgctgatggcgcgggatggcacgcgggaggacaaccacaagctgcataagagatggctccggcaccaggcattcatggccgagctggctcagaataaggagtggctggagaagatcgagcgggagggccagcaactgatgcaggagaagcccgaactggcggcctccgtgcggaagaagctgggcgagatccgccagtgctgggcggagctggagagcaccacccaggccaaggcacggcagctctttgaggccagcaaagcagaccagctggtgcagagctttgctgagctggacaagaagctccttcacatggagagccagctgcaagacgtggaccctggaggagacctggccactgtcaacagtcagctcaagaagctgcagtccatggagtcgcaggtggaggagtggtaccgcgaggtgggagagctgcaggcgcagacggcggcgctgccgctggagccggcgagcaaggagctggtgggtgagcggcagaacgcggtgggcgagcgcctggtgcgcctgctcgagccgttgcaggagcgccgccgcttgctgctggcttccaaggagttgcaccaggtggcgcacgacctggacgacgagctggcatgggttcaggagcggctgccactggccatgcagacagagcgaggcaacggtttgcaggcggtccagcagcacatcaaaaagaaccagggcctgcggcgggagatccaggcgcatgggccgcgcctggaggaggtgctggagcgcgcgggcgcgctggcgtcgctgcgcagcccggaggcagaggcagtgcgccggggcctggagcagctgcagagcgcctgggccggactgcgggaggctgccgagcgacggcagcaggtgctggacgccgccttccaggtggagcagtactacttcgacgtggctgaggtggaggcgtggctgggcgagcaggagctgctcatgatgagtgaggacaagggcaaggacgaacagagcaccctgcagctgctcaagaaacacctgcagctggagcaaggcgtggagaactacgaggaaagcatcgcgcagctgtcgcgccagtgccgggcgctgctggagatggggcacccggacagcgagcagatcagccggcggcagtctcaggtggaccgcctgtacgtggcgctcaaggagctgggtgaggagcgccgggtggctctggaacagcagtactggctgtaccagctcagccgccaggtgagcgagcttgagcactggattgccgagaaggaggtggtggctggctcacccgagctcggccaggactttgagcatgtctcggtgctgcaggagaaattctcagagtttgccagcgagacaggtatggcagggcgggaacggctggcagctgtgaaccagatggtggatgagctgatcgagtgtggccatacagcagcggccaccatggccgagtggaaggacggactgaacgaggcctgggctgagctgctggagctcatgggcacacgggcccagctgctggccgcctctcgggagcttcataagttcttcagtgacgcccgagagcttcagggacagattgaggagaagcggaggcggctgccccgcctgaccaccccgcctgagccgagacccagtgccagttccatgcagcggaccctgagagcctttgagcatgacctgcagctcctcgtgtcccaggtacggcagctgcaggagggggcggcccagctgcggacggtgtatgcgggtgaacatgccgaggccatcgctagccgggagcaggaggtgctgcagggttggaaagagctgctgtcagcctgtgaggatgcccgcctgcatgtcagctccacagccgacgccctgcgcttccacagccaagtccgcgacctgctctcctggatggatggcatcgccagccagattggggcagccgacaagcccagggacgtgtcatcagtggaggtgctcatgaactaccaccagggcctgaagactgagctggaggcgcgggtgcctgagctgaccacctgccaggagctggggcgatctctgctgctcaacaaaagtgccatggctgatgagatccaggcacagctggacaagctgggaaccaggaaggaggaggtgtcggaaaagtgggaccgccattgggagtggctgcagcagatgctggaggtgcaccagtttgcccaggaggcggtggtggctgatgcctggctgacagcccaggagccgctcctgcagagccgggagctgggcagcagcgtggatgaggtggagcagcttatccggcgacatgaggccttccgcaaagcggctgcagcctgggaagagaggttcagctctctgcggcgcctgaccacgatcgagaaaatcaaagcggaacagagcaagcagccgcctaccccactgctggggcgcaagttctttggggaccccacggaactggcggccaaggcggcgcccctgctgcggccagggggctatgaaaggggcttggagcccctggcccgccgagcctcggacacgctctcggccgaggtgcggactcgggtggggtatgtgcgccaggagctcaagcccgagcgcctccagccgcgcattgaccggctgccggagatcccggggagggtggagcccgcggccctgccggccgcaccagaggacgcggcggagacccccgcgacccccgcggcggcggagcaggtgcggccacgaccggagcgccaggagtcagctgatcgcgcggaggagctgcccaggaggcggcggcctgagcggcaagagtcagtcgatcaatccgaggaggctgcgcggaggcggcggccggagcggcaggagtcagcggagcacgaggcggcacacagccttaccctgggccgctatgagcagatggagcggcggcgcgagcggcgtgagcggcgcttggagcggcaggagtccagcgaacaggagatgcccatcagaggagacctggtcaaggggaaggccaccctggctgacattgtggaacagctgcaggagaaagaggcaggcccagggctgcctgctgggccgtcgctgcctcagccacgcgagcttcccccaggtcgcctgcccaacgggcttgagctgcccgagcggacacctcggccggaccggccccgggcgcgggaccggcccaagccgcgacggcggccgcggcccagagagggtggtgagggcgggggaagccggcgctcgcgctccgccccggcccagggcggctccgcccccgcgcctccgccaccgcccactcacacagtgcagcacgagggcttcctactgcgcaagcgcgagctcgacgctaaccgcaagtcgtccaaccggtcgtgggtgagcctgtactgtgtgcttagtaagggggaactgggcttctacaaggactccaagggcccggcatccgggagcacacacggtggggaaccgctgctcagcctgcacaaggccaccagcgaggtggctagtgactacaagaaaaagaagcatgtcttcaagctccagacccaggatggcagtgagtttttgctccaggcaaaagatgaggaggagatgaacggctggctggaggctgtagcttcctcggtggcggaacacgcagagatcgcccgctggggccagacactacccactacttcatccacagatgagggcaaccctaagagggaaggcggagatcgcagggccagcgggcgcaggaagtgacttcccacccccaggacctgacacatctcgtctcccctcttttccgcactgtgggcacaaagacactttttcttccgcaggggcgggagcccctagttccaacactgaggacgcgtgacatggtgggcaccggaaaggaggggacttctcctgcaccccaagaagtggtggggagattgctgcccctatagccatatctcggccccttcccactcaccacccccaccccaggtgctgggggtcccttatttttatgcaataactgagcttgatgggggtgggcagggggccagttgagccaagcccccagccccgatctgcagatcctgccccaagaagctggggtggtgggggcagtaattcctgcccccctctctgccctagggatgggcacgggggcgctggtgaggtcccctggaccatccagggtgctagggggcagggaggggacaccccctccccgcctttacctcacttccaatgctgccttgatctctgtctgggaggggggagtgaaggggccctagccccctgcactccgccgcctcagagccatgcggttaattcctgacttagtttatttttgcaaaacgtcgatctcctcctcccccgccccgcatccgcgaaggcttttaatgggaggggcgtcaaagctcaaaactgttttcctctctcctcccccctccagttgtaaatgccacttcatgaggggaggggcgaggggaagcccacccctgcatgcttctggctggagcacctccctggggagtcgggggattgggttgtgggcagtccccatggccgcctggagaagccgctggggcccgggggtgtggggcggtgtggcgggcgcacactgtatgtacctataataaaccctttggctttg

SEQ ID NO: 206784 - DNA, 2419 bp, Artificial Sequence
  derived and/or modified sequence
ggagcctcagccttcgccgccgctgccgctgccgtcgcagttgaggggcgagcacccgcccgcccgctgcagggacgccccgccaacgccactgccgcttcagctggatggctggatccatgagaagatgctgatggcgcgggatggcacgcgggaggacaaccacaagctgcataagagatggctccggcaccaggcattcatggccgagctggctcagaataaggagtggctggagaagatcgagcgggagggccagcaactgatgcaggagaagcccgaactggcggcctccgtgcggaagaagctgggcgagatccgccagtgctgggcggagctggagagcaccacccaggccaaggcacggcagctctttgaggccagcaaagcagaccagctggtgcagagctttgctgagctggacaagaagctccttcacatggagagccagctgcaagacgtggaccctggaggagacctggccactgtcaacagtcagctcaagaagctgcagtccatggagtcgcaggtggaggagtggtaccgcgaggtgggagagctgcaggcgcagacggcggcgctgccgctggagccggcgagcaaggagctggtgggtgagcggcagaacgcggtgggcgagcgcctggtgcgcctgctcgagccgttgcaggagcgccgccgcttgctgctggcttccaaggagttgcaccaggtggcgcacgacctggacgacgagctggcatgggttcaggagcggctgccactggccatgcagacagagcgaggcaacggtttgcaggcggtccagcagcacatcaaaaagaaccagggcctgcggcgggagatccaggcgcatgggccgcgcctggaggaggtgctggagcgcgcgggcgcgctggcgtcgctgcgcagcccggaggcagaggcagtgcgccggggcctggagcagctgcagagcgcctgggccggactgcgggaggctgccgagcgacggcagcaggtgctggacgccgccttccaggtggagcagtactacttcgacgtggctgaggtggaggcgtggctgggcgagcaggagctgctcatgatgagtgaggacaagggcaaggacgaacagagcaccctgcagctgctcaagaaacacctgcagctggagcaaggcgtggagaactacgaggaaagcatcgcgcagctgtcgcgccagtgccgggcgctgctggagatggggcacccggacagcgagcagatcagccggcggcagtctcaggtggaccgcctgtacgtggcgctcaaggagctgggtgaggagcgccgggtggctctggaacagcagtactggctgtaccagctcagccgccaggtgagcgagcttgagcactggattgccgagaaggaggtggtggctggctcacccgagctcggccaggactttgagcatgtctcggtgctgcaggagaaattctcagagtttgccagcgagacaggtatggcagggcgggaacggctggcagctgtgaaccagatggtggatgagctgatcgagtgtggccatacagcagcggccaccatggccgagtggaaggacggactgaacgaggcctgggctgagctgctggagctcatgggcacacgggcccagctgctggccgcctctcgggagcttcataagttcttcagtgacgcccgagagcttcagggacagattgaggagaagcggaggcggctgccccgcctgaccaccccgcctgagccgagacccagtgccagttccatgcagcggaccctgagagcctttgagcatgacctgcagctcctcgtgtcccaggtacggcagctgcaggagggggcggcccagctgcggacggtgtatgcgggtgaacatgccgaggccatcgctagccgggagcaggaggtgctgcagggttggaaagagctgctgtcagcctgtgaggatgcccgcctgcatgtcagctccacagccgacgccctgcgcttccacagccaagtccgcgacctgctctcctggatggatggcatcgccagccagattggggcagccgacaagcccaggtgcccctcatccctcctcgggcttcctgcctccccctggtggcctaccccagccacccccagcccattgacagcccccttctcaatggaatgacaacagccaatatctgtgtggcgcctctgtgtgctaggcactgttctaggtgcttcgtgtgtattcagaccccttttttaggcctgtcattggggacttcggtcatggggcatccttctgtccgctgtccttcccagttgcctattattaccctctccatgggatgtcacagcatgaaacaggctaaagacaggatgggcaagggaggtgtgggactgtatttgtgagggtgggtgaagaattctaacaattcca

SEQ ID NO: 206785 - DNA, 4813 bp, Artificial Sequence
  derived and/or modified sequence
atgcctcattatccatcctgctcttctgcaccctccttgggaacccccagacctccccagatccagcagctagaggccaggcacaggaaccaagaaaaccagttacgggcccagcaatggatgcaaaagctacatgaccaacttgagctgcagcacttcctccgagactgccacgagctggatggctggatccatgagaagatgctgatggcgcgggatggcacgcgggaggacaaccacaagctgcataagagatggctccggcaccaggcattcatggccgagctggctcagaataaggagtggctggagaagatcgagcgggagggccagcaactgatgcaggagaagcccgaactggcggcctccgtgcggaagaagctgggcgagatccgccagtgctgggcggagctggagagcaccacccaggccaaggcacggcagctctttgaggccagcaaagcagaccagctggtgcagagctttgctgagctggacaagaagctccttcacatggagagccagctgcaagacgtggaccctggaggagacctggccactgtcaacagtcagctcaagaagctgcagtccatggagtcgcaggtggaggagtggtaccgcgaggtgggagagctgcaggcgcagacggcggcgctgccgctggagccggcgagcaaggagctggtgggtgagcggcagaacgcggtgggcgagcgcctggtgcgcctgctcgagccgttgcaggagcgccgccgcttgctgctggcttccaaggagttgcaccaggtggcgcacgacctggacgacgagctggcatgggttcaggagcggctgccactggccatgcagacagagcgaggcaacggtttgcaggcggtccagcagcacatcaaaaagaaccagggcctgcggcgggagatccaggcgcatgggccgcgcctggaggaggtgctggagcgcgcgggcgcgctggcgtcgctgcgcagcccggaggcagaggcagtgcgccggggcctggagcagctgcagagcgcctgggccggactgcgggaggctgccgagcgacggcagcaggtgctggacgccgccttccaggtggagcagtactacttcgacgtggctgaggtggaggcgtggctgggcgagcaggagctgctcatgatgagtgaggacaagggcaaggacgaacagagcaccctgcagctgctcaagaaacacctgcagctggagcaaggcgtggagaactacgaggaaagcatcgcgcagctgtcgcgccagtgccgggcgctgctggagatggggcacccggacagcgagcagatcagccggcggcagtctcaggtggaccgcctgtacgtggcgctcaaggagctgggtgaggagcgccgggtggctctggaacagcagtactggctgtaccagctcagccgccaggtgagcgagcttgagcactggattgccgagaaggaggtggtggctggctcacccgagctcggccaggactttgagcatgtctcggtgctgcaggagaaattctcagagtttgccagcgagacaggtatggcagggcgggaacggctggcagctgtgaaccagatggtggatgagctgatcgagtgtggccatacagcagcggccaccatggccgagtggaaggacggactgaacgaggcctgggctgagctgctggagctcatgggcacacgggcccagctgctggccgcctctcgggagcttcataagttcttcagtgacgcccgagagcttcagggacagattgaggagaagcggaggcggctgccccgcctgaccaccccgcctgagccgagacccagtgccagttccatgcagcggaccctgagagcctttgagcatgacctgcagctcctcgtgtcccaggtacggcagctgcaggagggggcggcccagctgcggacggtgtatgcgggtgaacatgccgaggccatcgctagccgggagcaggaggtgctgcagggttggaaagagctgctgtcagcctgtgaggatgcccgcctgcatgtcagctccacagccgacgccctgcgcttccacagccaagtccgcgacctgctctcctggatggatggcatcgccagccagattggggcagccgacaagcccagggacgtgtcatcagtggaggtgctcatgaactaccaccagggcctgaagactgagctggaggcgcgggtgcctgagctgaccacctgccaggagctggggcgatctctgctgctcaacaaaagtgccatggctgatgagatccaggcacagctggacaagctgggaaccaggaaggaggaggtgtcggaaaagtgggaccgccattgggagtggctgcagcagatgctggaggtgcaccagtttgcccaggaggcggtggtggctgatgcctggctgacagcccaggagccgctcctgcagagccgggagctgggcagcagcgtggatgaggtggagcagcttatccggcgacatgaggccttccgcaaagcggctgcagcctgggaagagaggttcagctctctgcggcgcctgaccacgatcgagaaaatcaaagcggaacagagcaagcagccgcctaccccactgctggggcgcaagttctttggggaccccacggaactggcggccaaggcggcgcccctgctgcggccagggggctatgaaaggggcttggagcccctggcccgccgagcctcggacacgctctcggccgaggtgcggactcgggtggggtatgtgcgccaggagctcaagcccgagcgcctccagccgcgcattgaccggctgccggagatcccggggagggtggagcccgcggccctgccggccgcaccagaggacgcggcggagacccccgcgacccccgcggcggcggagcaggtgcggccacgaccggagcgccaggagtcagctgatcgcgcggaggagctgcccaggaggcggcggcctgagcggcaagagtcagtcgatcaatccgaggaggctgcgcggaggcggcggccggagcggcaggagtcagcggagcacgaggcggcacacagccttaccctgggccgctatgagcagatggagcggcggcgcgagcggcgtgagcggcgcttggagcggcaggagtccagcgaacaggagatgcccatcagaggagacctggtcaaggggaaggccaccctggctgacattgtggaacagctgcaggagaaagaggcaggcccagggctgcctgctgggccgtcgctgcctcagccacgcgagcttcccccaggtcgcctgcccaacgggcttgagctgcccgagcggacacctcggccggaccggccccgggcgcgggaccggcccaagccgcgacggcggccgcggcccagagagggtggtgagggcgggggaagccggcgctcgcgctccgccccggcccagggcggctccgcccccgcgcctccgccaccgcccactcacacagtgcagcacgagggcttcctactgcgcaagcgcgagctcgacgctaaccgcaagtcgtccaaccggtcgtgggtgagcctgtactgtgtgcttagtaagggggaactgggcttctacaaggactccaagggcccggcatccgggagcacacacggtggggaaccgctgctcagcctgcacaaggccaccagcgaggtggctagtgactacaagaaaaagaagcatgtcttcaagctccagacccaggatggcagtgagtttttgctccaggcaaaagatgaggaggagatgaacggctggctggaggctgtagcttcctcggtggcggaacacgcagagatcgcccgctggggccagacactacccactacttcatccacagatgagggcaaccctaagagggaaggcggagatcgcagggccagcgggcgcaggaagtgacttcccacccccaggacctgacacatctcgtctcccctcttttccgcactgtgggcacaaagacactttttcttccgcaggggcgggagcccctagttccaacactgaggacgcgtgacatggtgggcaccggaaaggaggggacttctcctgcaccccaagaagtggtggggagattgctgcccctatagccatatctcggccccttcccactcaccacccccaccccaggtgctgggggtcccttatttttatgcaataactgagcttgatgggggtgggcagggggccagttgagccaagcccccagccccgatctgcagatcctgccccaagaagctggggtggtgggggcagtaattcctgcccccctctctgccctagggatgggcacgggggcgctggtgaggtcccctggaccatccagggtgctagggggcagggaggggacaccccctccccgcctttacctcacttccaatgctgccttgatctctgtctgggaggggggagtgaaggggccctagccccctgcactccgccgcctcagagccatgcggttaattcctgacttagtttatttttgcaaaacgtcgatctcctcctcccccgccccgcatccgcgaaggcttttaatgggaggggcgtcaaagctcaaaactgttttcctctctcctcccccctccagttgtaaatgccacttcatgaggggaggggcgaggggaagcccacccctgcatgcttctggctggagcacctccctggggagtcgggggattgggttgtgggcagtccccatggccgcctggagaagccgctggggcccgggggtgtggggcggtgtggcgggcgcacactgtatgtacctataataaaccctttggctttg

SEQ ID NO: 206786 - DNA, 8671 bp, Artificial Sequence
  derived and/or modified sequence
tatgaccctgtgtgactcagtgacccggagggcaagcaggactgtgggtgacaccttgtgtcatcctctgagcctcaccttccccgatggcgcaggtaccaggggaagtggacaacatggagggcctgcctgctcctaacaacaaccctgctgcccgctgggagagtccggatcggggctgggagcgggagcagccggctgcgtccaccgcagcggcctcgctctttgagtgctcccggatcaaggccttggcagatgagcgggaagccgtgcagaagaaaaccttcaccaagtgggtgaactcgcacctcgcccgcgtgggctgccacatcggggacctctatgtggacctccgggacggcttcgtgctcacgcggctcctggaagtgctgtctggggagcagctgcccaggcccacgcgcggccgcatgcggatccactcactggagaacgtggacaaggcgctgcagtttctgaaggagcagcgcgtgcacctggagaacgtgggttcgcatgacatcgtggatgggaatcaccggctgacgctggggctggtctggaccatcatcctgcgcttccagattcaagtcatcaaaattgagactgaggacaacagagagacacgctcagccaaggatgctctgctcttgtggtgtcagatgaagacagctggttaccctgaggtaaacatccagaatttcaccaccagctggcgggatggcttggccttcaatgccctcattcaccggcacaggcctgatctcgtggacttcagcaaactcaccaagtccaatgccaactacaacctgcagagagccttccgcacagctgagcagcacctggggctggcgcggctgctggatcctgaagatgtgaacatggaggctccagatgagaagtccatcatcacctacgtggtctctttctaccactatttctccaagatgaaggctctggctgtggaggggaagcgtatcgggaaggtcttggaccaggtattggaggtggggaagatcatagaacgctacgaggagctggcggctgagctgctggcctggatccaccgcaccgtgggcctcatcagcaatcagaaatttgccaactccttaagtggggtgcagcagcaactccaggctttcacggcctattgcacgctggagaagcctgtcaagttccaggagaaggggaacctagaggtgctgctcttcagcatccagagcaaactgcgtgcctgcaaccgtcgcctctttgtgcctcgggagggctgtggcatctgggatattgacaaggcatggggtgagctggagaaggctgagcatgagcgggaggctgccctacgggctgagctgattcggcaggagaagctggaactactggcacagaggtttgaccacaaggtggctatgagggagagctggctgaatgagaaccagcgtctggtctcccaggacaactttgggtatgagctgcccgcagtggaggcagccatgaagaaacacgaagcgatcgaggcagacattgcggcctacgaggagcgggtgcagggtgtggcggagctggcccaggcattggcagccgaaggctactacgatatccggcgggtggcagcccagcgtgacagcgtcctgcgccagtgggccctgctaactgggcttgtgggtgcccggcggacacgacttgagcagaaccttgccctgcagaaggtcttccaggagatggtgtacatggtggactggatggaggagatgcaggctcagctgctgtcccgggagtgtgggcagcacctggtggaggcagacgacctgttgcagaagcatggactgctggagggagacattgccgcccagagcgagcgggtggaggctctcaatgccgctgccctgcgcttctcccagctgcagggctaccagccctgcgacccgcaggtcatctgcaaccgcgtgaaccacgtgcacggctgcctggcggagctgcaggagcaggcagcgcggcgacgcgcggagctggaggcttcgcggagcctgtgggcgctgctgcaggagctggaggaggccgagagctgggcgcgcgacaaggagcgtctcctggaggctgcgggcggcggcggtgcggcgggcgcagcgggcgcagcgggaacagcgggcggcgcgcatgacctgtccagcacagcgcgcctcctggcccagcacaagatcctgcagggcgagctgggcgggcggcgagcgttgctgcagcaggccctgcggtgtggcgaggagctggttgcggccggcggtgccgtcggcccgggagcagacaccgtgcacctggtaggcctggcggagcgcgcggcgagcgcccggcgccgctggcagaggctggaagaggcggcggcgcggcgagagcggcggctgcaggaggcgcgggcgctgcaccagttcggcgctgacctcgacgggctgctggactggcttcgcgacgcttaccgcctggcagccgccggtgacttcggccacgacgaagcttccagccgccgcctggcgcgccagcaccgcgcgctcaccggggaggtggaggcacatcgcgggcccgtgagcggcctgcggcgccagctggcgacactcgggggtgccagtggcgcagggccactggtggtggcgctgcaggtgcgcgtggtggaagcagagcagttgttcgctgaggtgaccgaagtggcggcgctgaggcgccagtggctgcgggacgcgctcgctgtctaccgcatgtttggcgaggtgcacgcgtgtgagctgtggatcggcgagaaggagcaatggctgctctccatgcgtgtgccggattcactcgacgacgtcgaggtggtgcagcaccgattcgagagcctggaccaagagatgaacagcctgatgggccgcgttctggacgtgaaccacacagtccaggagctggtggaaggaggccaccccagttcagatgaggtgcgttcctgccaggaccacctcaacagcaggtggaaccgcatcgtggagctagtggaacagcgcaaagaggaaatgagcgcggtgctgctggtggagaaccacgtgctggaggtggccgaggtgcgcgcccaggtgcgtgagaagcggagagctgtggagagcgcgccccgggccggcggcgccctgcagtggcgtcttagcggcctagaggccgctctgcaggcgctggagccgcgccaggcggcccttctggaggaggcagccctgctggctgagcgcttcccggcgcaggcggcgcggctgcaccagggcgcggaggagctgggcgccgagtggggcgcgctagctagcgcggctcaggcctgcggcgaggcggtggcggcagcagggcgcctgcagcgcttcctacatgacctcgacgctttcctggactggctcgtgcgcgcccaggaggcggcgggcggcagcgaggggcccctgcccaacagcctagaagaggcggacgcgctgctggcgcgccacgctgcgctcaaggaggaggtggaccagcgcgaggaagactatgctcgcatcgtggcggccagcgaggcgctgctggccgccgacggcgcagagctgggcccgggcctggcactagacgagtggctgccacacctcgaacttggctggcataaactgctcggcttgtgggaggcgcgcagggaggcgctggtccaggcgcacatctaccagctcttcctgcgggatctacgccaggcgctcgtggtgctgcgtaaccaggagatggcgctgtctggtgcggagctcccgggcacagtggaatcggtggaggaggccttgaaacagcaccgtgactttctcaccaccatggagctgagccagcaaaagatgcaggtggccgtgcaggctgcagagggcctgctgaggcagggcaacatctacggggagcaggctcaggaggctgtgacccggctgctggagaagaaccaagaaaaccagttacgggcccagcaatggatgcaaaagctacatgaccaacttgagctgcagcacttcctccgagactgccacgagctggatggctggatccatgagaagatgctgatggcgcgggatggcacgcgggaggacaaccacaagctgcataagagatggctccggcaccaggcattcatggccgagctggctcagaataaggagtggctggagaagatcgagcgggagggccagcaactgatgcaggagaagcccgaactggcggcctccgtgcggaagaagctgggcgagatccgccagtgctgggcggagctggagagcaccacccaggccaaggcacggcagctctttgaggccagcaaagcagaccagctggtgcagagctttgctgagctggacaagaagctccttcacatggagagccagctgcaagacgtggaccctggaggagacctggccactgtcaacagtcagctcaagaagctgcagtccatggagtcgcaggtggaggagtggtaccgcgaggtgggagagctgcaggcgcagacggcggcgctgccgctggagccggcgagcaaggagctggtgggtgagcggcagaacgcggtgggcgagcgcctggtgcgcctgctcgagccgttgcaggagcgccgccgcttgctgctggcttccaaggagttgcaccaggtggcgcacgactggacgacgagctgggcatgggttcaggagcggctgccactggccatgcagacagagcgaggcaacggtttgcaggcggtccagcagcacatcaaaaagaaccagggcctgcggcgggagatccaggcgcatgggccgcgcctggaggaggtgctggagcgcgcgggcgcgctggcgtcgctgcgcagcccggaggcagaggcagtgcgccggggcctggagcagctgcagagcgcctgggccggactgcgggaggctgccgagcgacggcagcaggtgctggacgccgccttccaggtggagcagtactacttcgacgtggctgaggtggaggcgtggctgggcgagcaggagctgctcatgatgagtgaggacaagggcaaggacgaacagagcaccctgcagctgctcaagaaacacctgcagctggagcaaggcgtggagaactacgaggaaagcatcgcgcagctgtcgcgccagtgccgggcgctgctggagatggggcacccggacagcgagcagatcagccggcggcagtctcaggtggaccgcctgtacgtggcgctcaaggagctgggtgaggagcgccgggtggctctggaacagcagtactggctgtaccagctcagccgccaggtgagcgagcttgagcactggattgccgagaaggaggtggtggctggctcacccgagctcggccaggactttgagcatgtctcggtgctgcaggagaaattctcagagtttgccagcgagacaggtatggcagggcgggaacggctggcagctgtgaaccagatggtggatgagctgatcgagtgtggccatacagcagcggccaccatggccgagtggaaggacggactgaacgaggcctgggctgagctgctggagctcatgggcacacgggcccagctgctggccgcctctcgggagcttcataagttcttcagtgacgcccgagagcttcagggacagattgaggagaagcggaggcggctgccccgcctgaccaccccgcctgagccgagacccagtgccagttccatgcagcggaccctgagagcctttgagcatgacctgcagctcctcgtgtcccaggtacggcagctgcaggagggggcggcccagctgcggacggtgtatgcgggtgaacatgccgaggccatcgctagccgggagcaggaggtgctgcagggttggaaagagctgctgtcagcctgtgaggatgcccgcctgcatgtcagctccacagccgacgccctgcgcttccacagccaagtccgcgacctgctctcctggatggatggcatcgccagccagattggggcagccgacaagcccagggacgtgtcatcagtggaggtgctcatgaactaccaccagggcctgaagactgagctggaggcgcgggtgcctgagctgaccacctgccaggagctggggcgatctctgctgctcaacaaaagtgccatggctgatgagatccaggcacagctggacaagctgggaaccaggaaggaggaggtgtcggaaaagtgggaccgccattgggagtggctgcagcagatgctggaggtgcaccagtttgcccaggaggcggtggtggctgatgcctggctgacagcccaggagccgctcctgcagagccgggagctgggcagcagcgtggatgaggtggagcagcttatccggcgacatgaggccttccgcaaagcggctgcagcctgggaagagaggttcagctctctgcggcgcctgaccacgatcgagaaaatcaaagcggaacagagcaagcagccgcctaccccactgctggggcgcaagttctttggggaccccacggaactggcggccaaggcggcgcccctgctgcggccagggggctatgaaaggggcttggagcccctggcccgccgagcctcggacacgctctcggccgaggtgcggactcgggtggggtatgtgcgccaggagctcaagcccgagcgcctccagccgcgcattgaccggctgccggagatcccggggagggtggagcccgcggccctgccggccgcaccagaggacgcggcggagacccccgcgacccccgcggcggcggagcaggtgcggccacgaccggagcgccaggagtcagctgatcgcgcggaggagctgcccaggaggcggcggcctgagcggcaagagtcagtcgatcaatccgaggaggctgcgcggaggcggcggccggagcggcaggagtcagcggagcacgaggcggcacacagccttaccctgggccgctatgagcagatggagcggcggcgcgagcggcgtgagcggcgcttggagcggcaggagtccagcgaacaggagatgcccatcagaggagacctggtcaaggggaaggccaccctggctgacattgtggaacagctgcaggagaaagaggcaggcccagggctgcctgctgggccgtcgctgcctcagccacgcgagcttcccccaggtcgcctgcccaacgggcttgagctgcccgagcggacacctcggccggaccggccccgggcgcgggaccggcccaagccgcgacggcggccgcggcccagagagggtggtgagggcgggggaagccggcgctcgcgctccgccccggcccagggcggctccgcccccgcgcctccgccaccgcccactcacacagtgcagcacgagggcttcctactgcgcaagcgcgagctcgacgctaaccgcaagtcgtccaaccggtcgtgggtgagcctgtactgtgtgcttagtaagggggaactgggcttctacaaggactccaagggcccggcatccgggagcacacacggtggggaaccgctgctcagcctgcacaaggccaccagcgaggtggctagtgactacaagaaaaagaagcatgtcttcaagctccagacccaggatggcagtgagtttttgctccaggcaaaagatgaggaggagatgaacggctggctggaggctgtagcttcctcggtggcggaacacgcagagatcgcccgctggggccagacactacccactacttcatccacagatgagggcaaccctaagagggaaggcggagatcgcagggccagcgggcgcaggaagtgacttcccacccccaggacctgacacatctcgtctcccctcttttccgcactgtgggcacaaagacactttttcttccgcaggggcgggagcccctagttccaacactgaggacgcgtgacatggtgggcaccggaaaggaggggacttctcctgcaccccaagaagtggtggggagattgctgcccctatagccatatctcggccccttcccactcaccacccccaccccaggtgctgggggtcccttatttttatgcaataactgagcttgatgggggtgggcagggggccagttgagccaagcccccagccccgatctgcagatcctgccccaagaagctggggtggtgggggcagtaattcctgcccccctctctgccctagggatgggcacgggggcgctggtgaggtcccctggaccatccagggtgctagggggcagggaggggacaccccctccccgcctttacctcacttccaatgctgccttgatctctgtctgggaggggggagtgaaggggccctagccccctgcactccgccgcctcagagccatgcggttaattcctgacttagtttatttttgcaaaacgtcgatctcctcctcccccgccccgcatccgcgaaggcttttaatgggaggggcgtcaaagctcaaaactgttttcctctctcctcccccctccagttgtaaatgccacttcatgaggggaggggcgaggggaagcccacccctgcatgcttctggctggagcacctccctggggagtcgggggattgggttgtgggcagtccccatggccgcctggagaagccgctggggcccgggggtgtggggcggtgtggcgggcgcacactgtatgtacctataataaaccctttggctttga

SEQ ID NO: 206787 - protein, 887 aa, Artificial Sequence
  derived and/or modified sequence
MMNRFRKWLYKPKRSDPQLLARFYYADEELNQVAAELDSLDGRKDPQRCTLLVSQFRSCQDNVLNIINQIMDECIPQDRAPRDFCVKFPEEIRHDNLAGQLWFGAECLAAGSIIMNRELESMAMRPLAKELTRSLEDVRGALRDQALRDLNTYTEKMREALRHFDVLFAEFELSYVSAMVPVKSPREYYVQQEVIVLFCETVERALDFGYLTQDMIDDYEPALMFSIPRLAIVCGLVVYADGPLNLDRKVEDMSELFRPFHTLLRKIRDLLQTLTEEELHTLERNLCISQDVEFPIRADVQGPAALAPALSAPLPPEGPLSAKAKDPDAELACSMQYDDQELEQLSRMVHRAGDEMSSLLSPPIACQSPAHRPGAEGSPGGEASPGRPRLRSGSDEEERVFFMDDVEGTAEALARPESPAGPFGWAGSTWADPQEKGQGGPGGAAGISLPASEKEEDLSNNNLEAEGTDGASLAGTSSCSCLDSRLHLDGWEVGADDAETAEMIAHRTGGMKLSATVIFNPKSPTSLDSAVATQEAASEPVAEGMDGGPHKLSTGATNCLLHSCVCCGSCGDSREDVVERLREKCSPGGVIGASYAAGLAKASDRAPERQEEAPPPSEDASNGREPKAPTSDKCLPHTSGSQVDTASGLQGEAGVAGQQEPEARELHAGSPSAHEAPQALSGSSSSTAGSCSSDKMGPEAAPAATHAAPQATREKIRSRFHGSHDLIHRLFVCISGVADQLQTNYASDLRSILKTLFEVMATKPETDDKEKLRKVTQTLRSAALEDCALCQETLSSSELAAKTRDGDFEDPPEWVPDEACGFCTACKAPFTVIRRKHHCRSCGKIFCSRCSSHSAPLPRYGQVKPVRVCTHCYMFHVTPFYSDKAGL

SEQ ID NO: 206788 - protein, 817 aa, Artificial Sequence
  derived and/or modified sequence
MDECIPQDRAPRDFCVKFPEEIRHDNLAGQLWFGAECLAAGSIIMNRELESMAMRPLAKELTRSLEDVRGALRDQALRDLNTYTEKMREALRHFDVLFAEFELSYVSAMVPVKSPREYYVQQEVIVLFCETVERALDFGYLTQDMIDDYEPALMFSIPRLAIVCGLVVYADGPLNLDRKVEDMSELFRPFHTLLRKIRDLLQTLTEEELHTLERNLCISQDVEFPIRADVQGPAALAPALSAPLPPEGPLSAKAKDPDAELACSMQYDDQELEQLSRMVHRAGDEMSSLLSPPIACQSPAHRPGAEGSPGGEASPGRPRLRSGSDEEERVFFMDDVEGTAEALARPESPAGPFGWAGSTWADPQEKGQGGPGGAAGISLPASEKEEDLSNNNLEAEGTDGASLAGTSSCSCLDSRLHLDGWEVGADDAETAEMIAHRTGGMKLSATVIFNPKSPTSLDSAVATQEAASEPVAEGMDGGPHKLSTGATNCLLHSCVCCGSCGDSREDVVERLREKCSPGGVIGASYAAGLAKASDRAPERQEEAPPPSEDASNGREPKAPTSDKCLPHTSGSQVDTASGLQGEAGVAGQQEPEARELHAGSPSAHEAPQALSGSSSSTAGSCSSDKMGPEAAPAATHAAPQATREKIRSRFHGSHDLIHRLFVCISGVADQLQTNYASDLRSILKTLFEVMATKPETDDKEKLRKVTQTLRSAALEDCALCQETLSSSELAAKTRDGDFEDPPEWVPDEACGFCTACKAPFTVIRRKHHCRSCGKIFCSRCSSHSAPLPRYGQVKPVRVCTHCYMFHVTPFYSDKAGL

SEQ ID NO: 206789 - DNA, 2664 bp, Artificial Sequence
  derived and/or modified sequence
atgatgaacagattcagaaagtggctgtacaagcccaagagaagcgacccccagctgctggccagattctactacgccgacgaggagctgaaccaggtggccgccgagctggacagcctggacggcagaaaggacccccagagatgcaccctgctggtgagccagttcagaagctgccaggacaacgtgctgaacatcatcaaccagatcatggacgagtgcatcccccaggacagagcccccagagacttctgcgtgaagttccccgaggagatcagacacgacaacctggccggccagctgtggttcggcgccgagtgcctggccgccggcagcatcatcatgaacagagagctggagagcatggccatgagacccctggccaaggagctgaccagaagcctggaggacgtgagaggcgccctgagagaccaggccctgagagacctgaacacctacaccgagaagatgagagaggccctgagacacttcgacgtgctgttcgccgagttcgagctgagctacgtgagcgccatggtgcccgtgaagagccccagagagtactacgtgcagcaggaggtgatcgtgctgttctgcgagaccgtggagagagccctggacttcggctacctgacccaggacatgatcgacgactacgagcccgccctgatgttcagcatccccagactggccatcgtgtgcggcctggtggtgtacgccgacggccccctgaacctggacagaaaggtggaggacatgagcgagctgttcagacccttccacaccctgctgagaaagatcagagacctgctgcagaccctgaccgaggaggagctgcacaccctggagagaaacctgtgcatcagccaggacgtggagttccccatcagagccgacgtgcagggccccgccgccctggcccccgccctgagcgcccccctgccccccgagggccccctgagcgccaaggccaaggaccccgacgccgagctggcctgcagcatgcagtacgacgaccaggagctggagcagctgagcagaatggtgcacagagccggcgacgagatgagcagcctgctgagcccccccatcgcctgccagagccccgcccacagacccggcgccgagggcagccccggcggcgaggccagccccggcagacccagactgagaagcggcagcgacgaggaggagagagtgttcttcatggacgacgtggagggcaccgccgaggccctggccagacccgagagccccgccggccccttcggctgggccggcagcacctgggccgacccccaggagaagggccagggcggccccggcggcgccgccggcatcagcctgcccgccagcgagaaggaggaggacctgagcaacaacaacctggaggccgagggcaccgacggcgccagcctggccggcaccagcagctgcagctgcctggacagcagactgcacctggacggctgggaggtgggcgccgacgacgccgagaccgccgagatgatcgcccacagaaccggcggcatgaagctgagcgccaccgtgatcttcaaccccaagagccccaccagcctggacagcgccgtggccacccaggaggccgccagcgagcccgtggccgagggcatggacggcggcccccacaagctgagcaccggcgccaccaactgcctgctgcacagctgcgtgtgctgcggcagctgcggcgacagcagagaggacgtggtggagagactgagagagaagtgcagccccggcggcgtgatcggcgccagctacgccgccggcctggccaaggccagcgacagagcccccgagagacaggaggaggcccccccccccagcgaggacgccagcaacggcagagagcccaaggcccccaccagcgacaagtgcctgccccacaccagcggcagccaggtggacaccgccagcggcctgcagggcgaggccggcgtggccggccagcaggagcccgaggccagagagctgcacgccggcagccccagcgcccacgaggccccccaggccctgagcggcagcagcagcagcaccgccggcagctgcagcagcgacaagatgggccccgaggccgcccccgccgccacccacgccgccccccaggccaccagagagaagatcagaagcagattccacggcagccacgacctgatccacagactgttcgtgtgcatcagcggcgtggccgaccagctgcagaccaactacgccagcgacctgagaagcatcctgaagaccctgttcgaggtgatggccaccaagcccgagaccgacgacaaggagaagctgagaaaggtgacccagaccctgagaagcgccgccctggaggactgcgccctgtgccaggagaccctgagcagcagcgagctggccgccaagaccagagacggcgacttcgaggacccccccgagtgggtgcccgacgaggcctgcggcttctgcaccgcctgcaaggcccccttcaccgtgatcagaagaaagcaccactgcagaagctgcggcaagatcttctgcagcagatgcagcagccacagcgcccccctgcccagatacggccaggtgaagcccgtgagagtgtgcacccactgctacatgttccacgtgacccccttctacagcgacaaggccggcctgtag

SEQ ID NO: 206790 - DNA, 2664 bp, Artificial Sequence
  derived and/or modified sequence
atgatgaatcggttccgcaaatggttgtataagcctaaaagatctgatccccagctgctggcccgcttttattatgccgacgaggagctgaatcaggtggctgccgagcttgattccctggacggcagaaaagatccacaaaggtgcactctgttggtgagccagttccggtcctgccaggacaatgtgctgaacattatcaatcagatcatggacgagtgtattcctcaagaccgggcgcctagagacttctgtgtgaaattccccgaggagatccggcacgataatctggccggccaactctggtttggggcagaatgtttagccgccggtagtataatcatgaacagggagcttgaatcaatggcaatgcgacctctggctaaagagcttacccgaagtctggaagacgtgcggggggccctcagggatcaagccttgagagacttgaacacctacaccgagaagatgagggaagccctcaggcacttcgacgtgctgtttgcagagtttgagcttagttacgtgtcggcaatggttcctgtcaaaagcccgcgggagtactatgtgcagcaggaagtcatcgttcttttctgtgaaactgttgaacgggccctggacttcggataccttacacaggatatgatcgatgactacgaacctgctctgatgttttctattcctcgcctcgctatcgtgtgtggcttagtagtttatgctgacggtcccttaaacctcgatcgaaaagtggaggatatgagcgagctgttcaggccattccacactctacttcgaaaaatacgggacctgctccagacactgacggaagaagaactccatacgctggagcgtaacctgtgtatatcacaggacgttgaattcccaatccgcgctgatgtccagggacccgccgcgctcgctccggcgctgagtgctcctctcccccctgagggaccgctcagtgccaaagccaaagacccggacgcagaactcgcgtgctcaatgcagtacgatgaccaggagcttgagcagctgtcaagaatggtgcaccgggccggcgatgagatgtctagccttctgtcgcctccaattgcctgtcagagcccggcgcaccgccctggggctgaggggtctcccggcggtgaggctagcccaggcagaccacgtctgcgttccgggtctgacgaggaagagcgagtgttctttatggacgacgtggaggggacagcagaagccctcgccaggccagagtcccccgcgggcccttttgggtgggccggcagcacatgggccgacccccaggagaagggccaaggaggtcccggtggagccgcagggatctcgctgcccgcaagtgaaaaggaagaagatctctctaataacaatctggaggccgaaggcacagacggagcatcactcgccgggacaagcagctgctcctgcttggatagtagactgcatctcgatgggtgggaagtgggggccgacgatgccgagacagccgagatgatcgctcacagaactggagggatgaaactaagtgcaacagtaatatttaatcccaagtctcccaccagtcttgactcagctgtggctacgcaggaagccgcctccgagcctgtcgcagagggcatggatggggggcctcacaaacttagtacaggggctaccaattgtctgttgcatagttgcgtgtgctgcgggagttgcggtgactctagggaagatgtggtagaaaggttgagggagaagtgttctccaggcggcgtgatcggggcgagttatgctgcagggctggcaaaagctagtgaccgagccccagaacggcaagaagaagctcctcctccaagcgaggatgctagcaacggccgagagccaaaggcacccaccagcgataagtgcctaccacacaccagcggttctcaggtggatacagcatcaggcttgcagggcgaagcaggcgtcgcagggcaacaagagcctgaagctcgggagttacatgcaggctcccccagcgcacacgaagcaccacaagctctctccggatcttcttcctctacagccggttcctgctcatctgataagatgggcccagaagccgcacctgcagccacccacgcagccccccaggccaccagagagaagattcgaagccggtttcacggtagccatgatttgatccatcggctcttcgtctgtatttccggagttgccgaccaactgcagaccaactacgcttccgatttgaggtctatattgaagacactctttgaggtcatggcgactaaacccgagaccgacgataaagaaaaactcagaaaggtgacccagaccttaaggtccgcagcccttgaagactgcgctctgtgtcaagaaacattgagcagttctgaactggccgctaagacgcgcgacggggacttcgaggatcccccagagtgggttccggacgaggcatgcggcttttgtacagcatgtaaagctccttttactgtgattcggaggaaacaccattgccgctcgtgtggcaaaatattctgcagccgatgctccagccatagcgcacctcttcctcggtatggccaggtgaagcccgtacgagtttgcacacactgctacatgtttcatgtcacccctttctacagtgacaaggctggcttgtag

SEQ ID NO: 206791 - DNA, 2664 bp, Artificial Sequence
  derived and/or modified sequence
atgatgaaccgcttcaggaagtggctgtacaagcccaagagaagtgacccccagctgctggcccgcttctactatgcagatgaggagctgaaccaggtggccgctgagctggacagcctggatggcaggaaggacccccagcgctgcaccctgctggtgtcccagttccgcagctgccaggacaacgtgctgaacatcatcaaccagatcatggatgagtgcatcccccaggaccgggccccccgggacttctgtgtgaagtttcctgaggagatcagacatgacaacctggccggccagctgtggtttggagctgagtgcctggccgccggcagcatcatcatgaaccgggagctggagagcatggccatgaggcccctggccaaggagctgaccaggagcctggaggatgtgcggggggccctgcgggaccaggccctgcgggacctgaacacctacacagagaagatgagggaggccctgcggcactttgatgtgctgtttgctgagtttgagctgtcctatgtgtctgccatggtgcctgtgaagagcccccgggagtactacgtgcagcaggaggtgattgtgctcttctgtgaaacagtggagcgggccctggactttggctacctgacccaggacatgattgatgattatgagcccgccctgatgttcagcatcccccggctggccatcgtgtgtggcctggtggtgtatgcagatggccccctgaacctggacaggaaggtggaggacatgtctgagctgttccggcccttccacaccctgctgaggaagatccgggacctgctgcagaccctgacagaggaggagctgcacaccctggagaggaacctgtgcatcagccaggatgtggagttccccatccgggcagatgtgcagggccctgctgccctggccccagccctgagcgcccccctgcccccagagggccccctgagcgccaaggccaaggaccctgatgctgagctggcctgcagcatgcagtatgatgaccaggagctggagcagctgagcaggatggtgcacagagctggagatgagatgagcagcctgctgagcccccccatcgcctgccagagccctgcccacaggcctggagctgagggcagccctggaggagaggccagccctggccggccccggctgcggagcggcagtgatgaggaggagagggtcttcttcatggatgatgtggagggcacagctgaggccctggcccggcctgagagccctgctggccccttcggctgggccggcagcacctgggccgacccccaggagaagggccagggcggccctggaggagctgctggcatcagcctgcctgccagcgagaaggaggaggacctgagcaacaacaacctggaggccgagggcacagatggagccagcctggccggcaccagcagctgcagctgcctggacagccggctgcacctggatggctgggaggtgggcgcagatgatgctgagacagctgagatgattgcccacaggactggaggcatgaagctgagcgccaccgtcatcttcaaccccaagagccccaccagcctggacagcgctgtggccacccaggaggccgccagcgagcctgtggccgagggcatggatggcggcccccacaagctgagcactggagccaccaactgcctgctgcacagctgtgtgtgctgcggcagctgtggggacagcagagaagatgtggtggagcggctgcgggagaagtgcagccctggaggagtgattggagccagctatgctgctggcctggccaaggccagtgaccgggcccctgagcggcaggaggaggcccctcctccttctgaagatgccagcaatggccgggagcccaaggcccccaccagtgacaagtgcctgccccacaccagcggcagccaggtggacacagccagcggcctgcagggcgaggccggcgtggccggccagcaggagcctgaggcccgggagctgcacgccggcagccccagcgcccacgaggccccccaggccctgagcggcagcagcagcagcacagctggcagctgcagcagtgacaagatgggccctgaggccgccccagctgccacccatgctgccccccaggccacccgggagaagatccgcagccgcttccacggcagccatgacctgatccaccggctgtttgtgtgcatctctggagtggccgaccagctgcagaccaactatgccagtgacctgcggagcatcctgaagaccctgtttgaggtgatggccaccaagccagagacagatgacaaggagaagctgaggaaggtgacccagaccctgcggtctgctgccctggaggactgtgccctgtgccaggagaccctgagcagcagcgagctggccgccaagaccagagatggagactttgaagatcctcctgagtgggtgcctgatgaggcctgtggcttctgcacagcctgcaaggcccccttcaccgtcatccggaggaagcaccactgccgcagctgtgggaagatcttctgcagccgctgcagcagccacagcgcccccctgcccaggtatggccaggtgaagcctgtgcgggtgtgcacccactgctacatgttccacgtgacccccttctacagcgacaaggccggcctgtag

SEQ ID NO: 206792 - DNA, 2664 bp, Artificial Sequence
  derived and/or modified sequence
atgatgaaccggttccggaagtggctgtacaagcccaagcggagcgatcctcagctgcttgccaggttctattacgccgatgaggagctgaatcaggtcgctgcagagctcgattcgcttgatgggcgaaaggacccccagagatgcaccctgctggtttcccagtttcgatcttgtcaggataatgtacttaacattatcaatcagattatggatgaatgtatcccgcaagatagagctccgcgtgacttctgcgtgaagtttcccgaagagatacggcacgataacctggccggccagctgtggttcggagctgagtgtcttgcggctgggagcatcatcatgaacagagagttggaatctatggcgatgcgccctttggcaaaagagctcacccgcagtctggaggacgttagaggggctcttcgggaccaggccttgcgtgatcttaatacatatactgagaagatgagagaggcgctccggcattttgacgtactcttcgctgagtttgaattgtcttacgtaagcgccatggtgcccgtgaagagccctcgagaatactacgtccagcaggaggtgatcgtgctgttctgcgagactgtggaacgagcactggattttggctacctcacccaggacatgatcgatgattatgagccagcccttatgttttctatcccacgactagcaattgtctgtggactcgtggtctacgcagatggccctctcaacctcgatcggaaggttgaggacatgagcgaactgtttcgaccttttcataccctgctcaggaagatacgagacttgttgcagacactgactgaggaggagctacacactctggagagaaacctgtgtatctcgcaggacgttgagttcccaatccgtgccgatgtgcagggccctgccgccctcgcacctgctttgagtgcccctttgccgccagagggaccgttatctgccaaagccaaggatccagatgctgagctagcgtgctctatgcagtacgatgaccaggagctggaacaactgagtcgcatggtgcaccgggctggagacgagatgtccagccttctttcaccacctattgcatgccagtcacccgctcatcggcccggggctgagggcagccctggcggagaggcttctcctggccgccccaggttacgttctgggtccgacgaagaggaaagagtgttctttatggacgatgtggaaggtacggcagaagctttggccaggcccgagtcccctgccgggccgtttggctgggcagggtcaacctgggcagacccgcaggagaagggacagggaggccccggtggagcagccggaatatctctgcccgccagtgagaaggaggaagacctctctaacaataatctggaggctgagggtaccgatggggcatccctggctgggacctctagttgtagctgtctcgacagccggctgcacctggatggatgggaagtcggcgccgacgatgcggagacagccgaaatgatcgctcaccgcaccggtggcatgaagctctccgctaccgttatcttcaacccaaagagtcctacttccctggatagcgccgtagccacccaagaggcagcctctgaacccgtggcagaaggtatggatggggggccgcataaattgtcaactggtgcaactaattgcctcctgcattcgtgcgtgtgttgcggttcctgtggcgacagcagagaggatgttgtcgagcggctcagggaaaagtgctcccccgggggtgttattggcgcttcctacgccgctggcctcgccaaggccagcgatagggcacctgagcgccaggaggaagccccacccccttctgaggatgcatctaacggacgtgaacccaaggcacccacctcagacaaatgtctcccgcataccagcggcagccaggtggatacagcctctggattgcagggcgaggctggtgtggccggacaacaggagcccgaggcccgcgagcttcacgctggctctccatcagctcacgaggctcctcaggctttatctggcagctcaagctccacagcggggtcttgtagtagcgataagatgggccccgaagccgcccccgccgctactcacgcagctccacaagctactagagagaagatcagaagtcgattccatggcagtcatgatttgattcaccggctttttgtgtgtatatctggggtcgctgatcagttacagactaattacgcctctgatctgcgaagcatcttgaagactctcttcgaggtaatggccacgaaaccagaaacagatgacaaagagaagctcagaaaggttactcagaccttgaggagtgccgctctggaggactgtgccctgtgtcaggaaaccctcagtagctctgaactggcagcaaaaacgagagacggggacttcgaggatcccccagaatgggtacctgatgaggcctgcgggttctgcaccgcctgcaaggcccccttcacagtgatacggagaaagcaccattgcagatcttgcggcaagatcttttgctcccggtgcagtagtcatagtgcacctcttccgcgttatgggcaggtcaaacccgtgcgtgtttgcactcactgttatatgttccatgtgacacctttctactcagacaaggccggactgtag

SEQ ID NO: 206793 - DNA, 2664 bp, Artificial Sequence
  derived and/or modified sequence
atgatgaatagattccgaaaatggctgtataaaccaaaaagatctgacccacaactgcttgcacggttttactatgccgatgaggagctgaaccaggtggccgctgaattggactctctcgacgggagaaaggatccacagcggtgcaccctgctcgtgtcccaattccgttcatgccaggataacgtgctgaatatcatcaaccagatcatggatgaatgtattcctcaagatcgtgccccacgcgatttctgcgtgaaatttcctgaggagatacggcacgacaacctcgccggacaactgtggttcggtgcagagtgcctggctgctggctccataatcatgaatcgagaattggagtccatggccatgaggcccctggcaaaagagttaaccagaagtttggaggacgtgcgcggagccttacgggaccaggcccttagagacctgaatacgtacaccgagaagatgagggaggccttgaggcatttcgatgtgctgtttgcagaatttgaactgagctatgtgtccgccatggttcctgtgaagtccccaagagagtattacgtacagcaggaggtgatcgtgctgttctgcgaaaccgtcgagcgcgctctcgacttcgggtatttgacccaagatatgattgatgattatgagcccgcactgatgttttccatccctcgcctggccattgtctgcgggcttgtggtgtatgcagatggcccacttaatctcgatcggaaagttgaggatatgtccgagctgttccggccattccacaccttgttaaggaagataagagatctgctgcagacactcactgaggaagagctgcacacgctcgagcggaacttgtgtatctcacaggacgtggagtttcccatcagggcagacgtacagggccctgcggctctcgctcctgcactatccgccccactcccacccgaaggtccacttagcgccaaggccaaagatcccgacgctgagttggcctgctctatgcagtatgacgatcaggaactagagcagcttagccggatggtgcatagagcgggtgatgagatgagctctttgctctccccacctatagcctgtcaaagccctgcccaccgcccaggagctgaagggtcccccggaggcgaggccagccctggcagacctagactgagatcaggtagcgatgaggaggaacgggttttttttatggacgacgtggagggcacggccgaggctcttgcacgccctgagtcccccgcaggtcccttcggctgggctggttctacttgggcagacccacaggagaaaggccagggtggaccaggcggagctgctggcatcagcctgcctgcctccgagaaggaagaggacctgtctaacaataatcttgaagccgaaggcacagacggtgcctccttggctggtacaagcagttgtagctgccttgactcgcgattgcacctggacggatgggaggtaggggctgacgacgcggagaccgccgaaatgattgctcaccgcactggtggaatgaagctgagcgcaacggtcatctttaatcccaagtctcctacttcgttggattccgccgtggccacacaagaggcagcaagcgagcccgtcgccgaaggcatggacggcggacctcataaacttagtaccggtgcgaccaactgcttgcttcatagttgcgtgtgttgcggcagctgcggagattctcgagaagacgtggtcgaacgcctgagggagaagtgctcccccggaggagtgatcggcgcttcatatgcagcaggcctggccaaagcgagtgatagggccccagaaaggcaggaagaggctcctccgccttccgaagacgcgtccaacggacgtgagcccaaggctccaacatccgataagtgtctcccccataccagcggcagccaggtggacacagctagtgggttacagggagaggctggtgtggcaggccagcaggaacctgaagcgcgagagctgcatgcgggttccccatccgcccatgaggcaccccaggcgctgtctggcagttcctcctcaaccgcagggtcctgttcttccgacaagatgggtcccgaggccgcaccagccgcaactcatgcagcaccacaggcaactcgagaaaaaattagatcgagatttcatggttcgcatgaccttattcatcggcttttcgtgtgcattagcggcgttgctgatcagctacagacaaattacgctagcgatctccggtccatcttgaaaacattgtttgaggtgatggccacgaagccggaaaccgacgataaggaaaagctccgcaaggtcacccagactctgagaagcgccgctctggaggactgtgcactttgccaggagactttgagctcctctgagctggctgccaagaccagggacggcgacttcgaggaccctccagaatgggtccctgatgaggcctgcgggttctgcactgcatgcaaggcaccctttactgtcattaggcgtaaacaccactgccgcagttgcggcaagatcttttgttctcgctgctcctctcacagcgccccattgccacggtatggccaagtgaaacctgtgcgtgtatgcactcactgctatatgtttcatgtgacaccattctattccgacaaggctgggctatag

SEQ ID NO: 206794 - DNA, 4131 bp, Artificial Sequence
  derived and/or modified sequence
gtgcggcgcggggcggccgtgaccagcggagcgctgggtgtcagtgagcagcgaggagccgcgcgcccccgtgcccgcgtctgtccgtgcgcccgagcgcccactcccgggtctgaggtctgcccggcgcgccgcttgcagagcatactcagggccgcgcacctgccccgcgcacctgcccgccgcccgctcggcgctccgggcttcgctagccagcctccctgcgacagcgcgggggctccggccgtgcctccgcgtccgccccgcgcctcagccgggcccgggcgcagcgctgcggagggcgagggccgcccggagtccggccagggccggcgcggcgatgatgaacaggttccgaaagtggctctacaaacccaagaggtcggatccgcagctgcttgcccggttctactatgccgacgaggagctgaaccaggtggccgcggagctggacagcctggatgggcggaaggacccccagcggtgcacgctgctggtcagccagttccgctcctgtcaggacaatgtgttgaacatcattaaccagatcatggatgagtgcatcccccaggaccgcgcccccagagatttctgcgtcaagttccctgaggagatccggcacgacaacctggccggccagctgtggttcggtgccgagtgcctggccgccggctccatcatcatgaaccgggagctggagagcatggccatgcgcccgctggccaaggagctgacgcgcagcctggaggacgtgcggggcgccctccgtgaccaggcgctgcgggacctgaacacctacacagagaagatgagggaagcgctgaggcacttcgacgtcctgttcgcagagtttgagctcagctacgtctcggccatggtgcctgtgaagtcccccagggagtactacgtgcagcaggaggtcatcgtgctcttctgcgagacggtggagagggccctggacttcgggtacctgactcaggacatgattgatgactacgagccggccctcatgttcagcatccccaggctggccatcgtgtgtggcctcgtggtctatgcggacggacctctgaacttggaccgcaaggtggaagacatgtccgagctgttccggcccttccacacgttgctgcggaaaataagggatttgctgcagacgctgacggaggaggagctgcacacgctggaacggaacctctgcatttcccaagacgtggagttccccatccgcgcagacgtgcagggacccgctgccctggcgcctgccctctctgcccctctcccccctgaggggccactctcagctaaggccaaagacccggatgcagagctggcctgctccatgcagtacgacgaccaggagctggagcagctcagccgcatggtccacagggcgggggacgagatgtcctctttgctttcaccgcccattgcctgccagtccccagctcacaggccaggagcggagggcagcccaggcggggaggcctctccaggtagaccgcgcctgcggtcaggcagtgacgaggaggagcgcgtgttcttcatggatgacgtggaggggacggcagaagccctggccaggcccgagtccccagctggcccatttgggtgggcaggcagtacctgggccgacccccaggagaaagggcagggtgggccaggcggagcggcggggatcagcttgcccgcctcggaaaaggaggaggacttgagcaacaacaatctcgaggccgagggcacagatggggccagcctcgcgggcaccagctcctgcagctgcctggactcgcggctgcacctggacggctgggaggtgggtgcggatgacgcagagacggctgagatgatcgcccaccggacagggggcatgaagctctcagccacggtcatcttcaaccccaaatcgcccacttccctggactctgcggtcgccacccaggaggccgcctcggagcccgtggccgaggggatggatggcggcccccacaagcttagcactggggccaccaactgccttctgcattcctgcgtgtgctgtgggagctgcggggacagcagggaggacgtggtggagcgtctgcgggagaagtgcagcccgggaggcgtcattggtgcctcgtacgctgccggcttagccaaggccagcgacagggcccctgagagacaggaggaggcgcccccaccctcagaagatgcctccaacgggcgggagcccaaagcccccacttccgacaagtgcctgcctcacacctcaggttcccaggtggacacagcgagtgggctgcaaggagaggctggggttgcaggtcagcaggagccagaggccagagagctgcatgctgggagcccctcggctcacgaggcgcctcaggccctgtcgggctccagcagctccacagctgggtcctgctcctcagacaagatggggccagaggcggccccagcagccacgcatgctgccccacaggccacaagagagaagatccggtccaggttccacggcagccacgacctcatccaccgcctgttcgtctgcatttcaggtgtggctgaccagctgcagacgaactatgccagtgacctgagaagtattcttaaaacactgtttgaggtcatggccaccaagcctgaaacagacgacaaggaaaagttaaggaaggtcacccagactctgcggagtgcggccttggaggactgtgcactgtgccaggagaccctgtcatcctctgaactggcagccaagacccgcgatggggactttgaagaccccccggagtgggtgccagacgaggcctgtggcttctgcacggcgtgcaaagcacccttcaccgtcatccgccggaagcaccactgccgcagctgtgggaagatcttctgctcgcgctgctcctcgcactcagcaccgctgccccgctacgggcaggtgaagccggtccgagtgtgcacccactgctacatgttccatgtcacgcccttctacagcgacaaggccggcctgtgacgtggtgccaggggcagccccaacccacccgggccaggaacccccaggaaggtggggccacgctgcaggcaggtctcactgcgtctcatgaggccgctgccgctgctgcaggggcacccagacctccagagcatccagagcctctgtcctgcccacgctagcctccctgcagggaccccgggccggctgcaggggccaacaagaggtcagctttgcccagcaggggacccggaggagcctggtggctgcctcagggcagggtgcctggcggagaaggcctgggccctcccactggtccctcggagatctgctggggctatgggaatcggggcgggtgatggaggtggacaagagtggggccactctgcgcctctgctgttgcggtgaatctggaagccggagcaagggccactccacaggctctttggcacagcagggctccctatgtgcctcccaaacgtcaaatgcaggctacccattctccccatcagctgcccacctcgttccccagccctcacccctcacccctcaccatccttcctcaggacttggctaaacaacatgcatctcatttcttcttggagtggggagatgcgggaagctgacccagtggtcctctaggcaggcagggtgctcctggtgtctgcccaccactgtccccttgctgatggcatgggggtccgaccaggcactgacaccgcaggcagaggttgctcggggccttgggtcgggtttaccaatcagccaggacgcccggggccaccagctcagctaccacttccccttccctctgcaccctctggaaccctggcccaattcctcagaccccagagtggcctgggacccaagctgccgcagctgagtggccccagcggacacctcctcaggcttaaatctcaggcttcacattgcaatgacgattgcagttttatttttggagatgacacacctactgcttcttttctaggataaatctaattactgtttactggtggagtacatatgcatagaaacggcttctgtcggggggagagtatataatggaggaaatattatgtattgagattatatttattttctaaatgctgtaatttgaagccatttccataaatctatttaaggattgc

SEQ ID NO: 206795 - DNA, 3247 bp, Artificial Sequence
  derived and/or modified sequence
actctcgcgactttgccgcggcgacgtgggggttttatcgcggtatcgcggaacacagcccccgccattcccagtcacccgctcggaggccgtgggcgccttgacgagggcgcggcggcgggaatgcacaacgttatgctcatcacctgcgtccaccactgtcacccctgacggcgagacgcgaggtgctaagggcttgtccaggctaagcgggttctctgcgtccttaagcccactttgcagatgctaatcagaggggacaggcggccaagaacctggagcccacccgggcgtctgtgcccagtgccgaccgtctaaattcccttcccacgtggctcctgttgcgtctgggctgtggaggattcctctaaacaggcacagccaccctctggaggtcggatccgcagctgcttgcccggttctactatgccgacgaggagctgaaccaggtggccgcggagctggacagcctggatgggcggaaggacccccagcggtgcacgctgctggtcagccagttccgctcctgtcaggacaatgtgttgaacatcattaaccagatcatggatgagtgcatcccccaggaccgcgcccccagagatttctgcgtcaagttccctgaggagatccggcacgacaacctggccggccagctgtggttcggtgccgagtgcctggccgccggctccatcatcatgaaccgggagctggagagcatggccatgcgcccgctggccaaggagctgacgcgcagcctggaggacgtgcggggcgccctccgtgaccaggcgctgcgggacctgaacacctacacagagaagatgagggaagcgctgaggcacttcgacgtcctgttcgcagagtttgagctcagctacgtctcggccatggtgcctgtgaagtcccccagggagtactacgtgcagcaggaggtcatcgtgctcttctgcgagacggtggagagggccctggacttcgggtacctgactcaggacatgattgatgactacgagccggccctcatgttcagcatccccaggctggccatcgtgtgtggcctcgtggtctatgcggacggacctctgaacttggaccgcaaggtggaagacatgtccgagctgttccggcccttccacacgttgctgcggaaaataagggatttgctgcagacgctgacggaggaggagctgcacacgctggaacggaacctctgcatttcccaagacgtggagttccccatccgcgcagacgtgcagggacccgctgccctggcgcctgccctctctgcccctctcccccctgaggggccactctcagctaaggccaaagacccggatgcagagctggcctgctccatgcagtacgacgaccaggagctggagcagctcagccgcatggtccacagggcgggggacgagatgtcctctttgctttcaccgcccattgcctgccagtccccagctcacaggccaggagcggagggcagcccaggcggggaggcctctccaggtagaccgcgcctgcggtcaggcagtgacgaggaggagcgcgtgttcttcatggatgacgtggaggggacggcagaagccctggccaggcccgagtccccagctggcccatttgggtgggcaggcagtacctgggccgacccccaggagaaagggcagggtgggccaggcggagcggcggggatcagcttgcccgcctcggaaaaggaggaggacttgagcaacaacaatctcgaggccgagggcacagatggggccagcctcgcgggcaccagctcctgcagctgcctggactcgcggctgcacctggacggctgggaggtgggtgcggatgacgcagagacggctgagatgatcgcccaccggacagggggcatgaagctctcagccacggtcatcttcaaccccaaatcgcccacttccctggactctgcggtcgccacccaggaggccgcctcggagcccgtggccgaggggatggatggcggcccccacaagcttagcactggggccaccaactgccttctgcattcctgcgtgtgctgtgggagctgcggggacagcagggaggacgtggtggagcgtctgcgggagaagtgcagcccgggaggcgtcattggtgcctcgtacgctgccggcttagccaaggccagcgacagggcccctgagagacaggaggaggcgcccccaccctcagaagatgcctccaacgggcgggagcccaaagcccccacttccgacaagtgcctgcctcacacctcaggttcccaggtggacacagcgagtgggctgcaaggagaggctggggttgcaggtcagcaggagccagaggccagagagctgcatgctgggagcccctcggctcacgaggcgcctcaggccctgtcgggctccagcagctccacagctgggtcctgctcctcagacaagatggggccagaggcggccccagcagccacgcatgctgccccacaggccacaagagagaagatccggtccaggttccacggcagccacgacctcatccaccgcctgttcgtctgcatttcaggtgtggctgaccagctgcagacgaactatgccagtgacctgagaagtattcttaaaacactgtttgaggtcatggccaccaagcctgaaacagacgacaaggaaaagttaaggaaggtcacccagactctgcggagtgcggccttggaggactgtgcactgtgccaggagaccctgtcatcctctgaactggcagccaagacccgcgatggggactttgaagaccccccggagtgggtgccagacgaggcctgtggcttctgcacggcgtgcaaagcacccttcaccgtcatccgccggaagcaccactgccgcagctgtgggaagatcttctgctcgcgctgctcctcgcactcagcaccgctgccccgctacgggcaggtgaagccggtccgagtgtgcacccactgctacatgttccatgtcacgcccttctacagcgacaaggccggcctgtgacgtggtgccaggggcagccccaacccacccgggccaggaacccccaggaaggtggggccacgctgcaggcaggtctcactgcgtctcatgaggccgctgccgctgctgcaggggcacccagacctccagagcatccagagcctctgtcctgcccacgctagcctccctgcagggaccccgggccggctgcaggggccaacaagaggtcagctttgcccagcaggggaccc

SEQ ID NO: 206796 - protein, 971 aa, Artificial Sequence
  derived and/or modified sequence
MGVAGRNRPGAAWAVLLLLLLLPPLLLLAGAVPPGRGRAAGPQEDVDECAQGLDDCHADALCQNTPTSYKCSCKPGYQGEGRQCEDIDECGNELNGGCVHDCLNIPGNYRCTCFDGFMLAHDGHNCLDVDECLENNGGCQHTCVNVMGSYECCCKEGFFLSDNQHTCIHRSEEGLSCMNKDHGCSHICKEAPRGSVACECRPGFELAKNQRDCILTCNHGNGGCQHSCDDTADGPECSCHPQYKMHTDGRSCLEREDTVLEVTESNTTSVVDGDKRVKRRLLMETCAVNNGGCDRTCKDTSTGVHCSCPVGFTLQLDGKTCKDIDECQTRNGGCDHFCKNIVGSFDCGCKKGFKLLTDEKSCQDVDECSLDRTCDHSCINHPGTFACACNRGYTLYGFTHCGDTNECSINNGGCQQVCVNTVGSYECQCHPGYKLHWNKKDCVEVKGLLPTSVSPRVSLHCGKSGGGDGCFLRCHSGIHLSSGLQGAYSVTCGSSSPLRNKQQKSNDSAFGDVTTIRTSVTFKLNEGKCSLKNAELFPEGLRPALPEKHSSVKESFRYVNLTCSSGKQVPGAPGRPSTPKEMFITVEFELETNQKEVTASCDLSCIVKRTEKRLRKAIRTLRKAVHREQFHLQLSGMNLDVAKKPPRTSERQAESCGVGQGHAENQCGLCQPGEYSADGFAPCHLCALGTFQPEAGRTSCFPCGGGLATKHQGATSFQDCETRVQCSPGHFYNTTTHRCIRCPVGTYQPEFGKNNCVSCPGNTTTDFDGSTNITQCKNRRCGGELGDFTGYIESPNYPGNYPANTECTWTINPPPKRRILIVVPEIFLPIEDDCGDYLVMRKTSSSNSVTTYETCQTYERPIAFTSRSKKLWIQFKSNEGNSARGFQVPYVTYDEDYQELIEDIVRDGRLYASENHQEILKDKKLIKALFDVLAHPQNYFKYTAQESREMFPRSFIRLLRSKVSRFLRPYK

SEQ ID NO: 206797 - DNA, 2916 bp, Artificial Sequence
  derived and/or modified sequence
atgggggtggcaggccgtaataggccaggtgcagcatgggcagtgttattactcctccttctgctacccccccttttactgctggcaggggcagttcctccgggaagaggccgagccgcgggtccccaggaggacgtagatgaatgcgctcaagggctagacgactgtcacgccgacgcattgtgccaaaatactcccacgtcttacaaatgctcatgtaaaccagggtaccagggcgagggccggcagtgcgaggatattgacgaatgcggtaacgagttaaatggcgggtgcgtgcatgattgcctgaatattcctgggaattaccgatgcacatgttttgatgggtttatgcttgcacacgacgggcataattgtttggacgtggatgaatgtctggagaacaacggagggtgccaacatacatgtgtcaacgttatggggagctacgagtgttgttgcaaggaggggtttttcttgagcgataaccaacacacttgcattcaccggtccgaggagggactgagttgcatgaataaagaccacggatgcagccatatctgcaaagaagccccccggggaagtgttgcatgtgagtgcaggccgggattcgaacttgctaaaaatcagagggattgcattctcacatgtaaccatgggaacggcggctgccagcatagttgtgatgacactgcggacggccccgaatgttcctgccatcctcaatataagatgcacactgatgggaggagttgcctcgagcgagaggacactgtgttggaggtcactgaatcaaatacaacaagtgtcgtcgacggcgacaagcgagttaagagaaggctacttatggaaacatgtgccgtgaataacggtgggtgcgatcgcacctgcaaagacacatccactggcgtgcactgttcatgtcctgtgggtttcacgctacagctggacggtaaaacctgcaaggatatagacgagtgtcagactcgcaacggcggctgcgaccatttctgcaagaatattgtaggatctttcgattgcggttgcaagaaaggcttcaaactgctgaccgacgagaagtcctgccaggatgtggatgaatgcagtctagacagaacctgtgatcactcttgtatcaatcaccccgggaccttcgcctgtgcctgcaacagaggttatacactctacgggtttacacattgcggggatacaaacgagtgttcaataaataacggtgggtgccagcaggtttgcgtaaataccgtgggaagctatgagtgccagtgtcaccccgggtataagctgcattggaacaaaaaggactgcgtggaagtgaagggtctgctccccacttctgtcagccccagggtgtcgctccactgtgggaagagcggcggaggcgacggttgtttcctacgttgtcattctggaattcacctgtcttccgggctgcagggagcatattcagtgacatgcggatcctcgtcaccacttcgtaacaagcagcagaaaagcaacgattctgccttcggagacgttacgaccatacggacttccgtcactttcaaattgaacgaggggaagtgctctctgaagaacgcagaactattccctgaaggactgcgccctgcactgccggagaaacacagtagcgtgaaagagagtttccggtacgttaatcttacttgctcatccggcaaacaggtgcctggtgcccctgggcggccgtcaacacccaaggagatgttcatcacagtggagtttgaactagagaccaaccagaaagaggttactgcatcttgtgatcttagctgtattgtcaaacggacagagaagcgactgcgcaaagctatccgcaccctgcgcaaggcagttcatagagaacaattccacctccagctctctggaatgaacctggatgttgccaaaaaaccgccccgcaccagcgagcggcaggccgagtcctgcggagtcggccagggacatgccgagaaccagtgcggattgtgtcagccaggcgagtacagtgccgacggatttgctccatgccatctgtgcgccctcggaacctttcagcccgaggcaggccggacatcttgcttcccgtgcggtggggggcttgccactaagcatcagggtgccacctcctttcaggactgcgagacaagggtccagtgttccccaggccatttctacaatactactacccacaggtgcattcgctgtcctgtggggacttatcaaccagaatttggcaagaacaactgcgtatcttgtccaggtaatacaaccactgactttgacggctcaaccaatatcacccagtgcaaaaaccgtagatgcggtggtgagctcggcgattttacagggtatatcgagtctcctaattacccaggcaattaccctgcaaatactgagtgcacctggaccatcaacccccctccaaagaggagaatcttgattgtggtaccagagatctttctgcccatagaggacgactgtggggattacttagttatgcgtaaaacaagctcctccaattctgtcacaacgtacgaaacttgtcaaacatatgaacgacccatagcctttacatctcgaagcaagaagctgtggatacagtttaaatcaaatgaagggaatagcgcccggggattccaggttccatatgttacatatgacgaggattaccaggagctaattgaggacatcgtccgcgatggcaggctgtacgctagcgaaaaccaccaggaaatactgaaggacaagaagctcattaaagcactctttgatgtgctcgctcatcctcagaattacttcaaatatactgctcaggagagccgcgaaatgttcccacggtccttcattagactcctccgcagcaaggtcagccgattcttacgcccttacaagtag

SEQ ID NO: 206798 - DNA, 2916 bp, Artificial Sequence
  derived and/or modified sequence
atgggcgtggccggcaggaacagacctggagctgcctgggccgtgctgctgctgctgctgctgctgccccccctgctgctgctggccggggctgtgcccccaggccggggccgggccgccggcccccaggaggatgtggatgaatgtgcccagggcctggatgactgccacgcagatgccctgtgccagaacacccccaccagctacaagtgcagctgcaagccaggctaccagggcgagggccggcagtgtgaagatattgatgaatgtggaaatgagctgaatggaggctgtgtgcatgactgcctgaacatccctggcaactaccgctgcacctgctttgatggcttcatgctggcccatgatggccacaactgcctggatgtggatgaatgtctggagaacaacggcggctgccagcacacctgtgtgaatgtgatgggcagctatgagtgctgctgcaaggagggcttcttcctgagtgacaaccagcacacctgcatccacaggtctgaggagggcctgagctgcatgaacaaggaccacggctgcagccacatctgcaaggaggccccccggggctctgtggcctgtgaatgtcggcccggctttgagctggccaagaaccagagggactgcatcctgacctgcaaccacggcaatggaggctgccagcacagctgtgatgacacagcagatggccctgagtgcagctgccacccccagtacaagatgcacacagatggccgcagctgcctggagcgggaggacacagtgctggaggtgacagagagcaacaccacctctgtggtggatggagacaagagggtgaagaggcggctgctgatggagacctgtgctgtgaacaacggcggctgtgacaggacctgcaaggacaccagcactggagtgcactgcagctgccctgtgggcttcaccctgcagctggatggcaagacctgcaaggacattgatgagtgccagaccagaaatggaggctgtgaccacttctgcaagaacatcgtgggcagctttgactgtggctgcaagaagggcttcaagctgctgacagatgagaagagctgccaggatgtggatgaatgttccctggacaggacctgtgaccacagctgcatcaaccaccctggcacctttgcctgtgcctgcaacagaggctacaccctgtatggcttcacccactgtggggacaccaatgaatgttccatcaacaatggaggctgccagcaggtgtgtgtgaacacagtgggcagctatgagtgccagtgccaccctggctacaagctgcactggaacaagaaggactgtgtggaggtgaagggcctgctgcccacctctgtgagcccccgggtgtccctgcactgcggcaagagcggcggcggagatggctgcttcctgcgctgccacagcggcatccacctgagcagcggcctgcagggcgcctacagcgtgacctgtggcagcagcagccccctgaggaacaagcagcagaagagcaatgacagcgcctttggagatgtgaccaccatccgcacctctgtgaccttcaagctgaatgaaggcaagtgcagcctgaagaatgctgagctgtttcctgagggcctgcggcctgccctgcctgagaagcacagctctgtgaaggagagcttccgctacgtgaacctgacctgcagcagcggcaagcaggtgcctggggcccctggccggcccagcacccccaaggagatgttcatcaccgtggagtttgagctggagaccaaccagaaggaggtgacagccagctgtgacctgagctgcatcgtgaagaggacagagaagaggctgaggaaggccatccgcaccctgaggaaggctgtgcaccgggagcagttccacctgcagctgagcggcatgaacctggatgtggccaagaagccacccaggaccagcgagcggcaggccgagagctgtggggtgggccagggccatgctgagaaccagtgtggcctgtgccagcccggggagtacagcgcagatggctttgccccctgccacctgtgtgccctgggcaccttccagcctgaggccggccgcaccagctgcttcccctgtggcggcggcctggccaccaagcaccagggcgccaccagcttccaggactgtgagaccagggtgcagtgcagccctggccacttctacaacaccaccacccaccgctgcatccgctgccctgtgggcacctaccagcctgagtttgggaagaacaactgtgtgtcctgccccggcaacaccaccacagactttgatggcagcaccaacatcacccagtgcaagaacagaagatgtggcggggagctgggggacttcaccggctacatcgagagccccaactacccaggcaactacccagccaacacagagtgcacctggaccatcaaccccccacccaagaggcgcatcctgattgtggtgcctgagatcttcctgcccattgaagatgactgtggggactacctggtgatgaggaagaccagcagcagcaacagcgtgaccacctatgagacctgccagacctatgaaagacccatcgccttcaccagccgcagcaagaagctgtggatccagttcaagagcaatgaaggcaacagcgcccggggcttccaggtgccctacgtgacctatgatgaggactaccaggagctgattgaggacatcgtgagagatggccgcctgtatgccagcgagaaccaccaggagatcctgaaggacaagaagctgatcaaggccctgtttgatgtgctggcccacccccagaactacttcaagtacacagcccaggagagccgggagatgttccccaggagcttcatccggctgctgcggagcaaggtgagccgcttcctgcggccctacaagtag

SEQ ID NO: 206799 - DNA, 2916 bp, Artificial Sequence
  derived and/or modified sequence
atgggcgtggccggccggaaccggcccggcgccgcctgggccgtgctgctgcttctcctgctccttccaccgcttctcctgctggcaggcgccgtcccccctggaaggggccgagctgccggcccacaggaagatgtggacgaatgcgcacagggacttgacgactgtcacgctgacgcactgtgccaaaatacacccacatcttataaatgttcatgtaagcctggctaccagggggagggaagacagtgtgaggatatcgatgagtgcggtaacgagctcaacggtggatgtgttcacgattgtctcaacatacccggcaattatcgatgtacgtgcttcgatggtttcatgttggcccatgatggacataactgcctggacgttgatgagtgtctcgaaaacaacggggggtgccaacacacctgcgtgaatgtgatggggtcatatgagtgctgttgcaaggaggggtttttcctgtctgataaccagcacacctgtatccatagaagcgaggaaggcctctcttgtatgaataaagatcatggatgctcccacatctgcaaggaggcccccaggggaagtgtggcctgcgagtgccgacctgggttcgaactcgctaagaatcagagggactgtatacttacttgtaaccacggcaacggcggttgccagcatagctgcgatgacacagctgatggccctgagtgtagttgtcatccccagtacaaaatgcacactgacgggcggtcgtgtctcgaaagagaagacactgtgctggaagtaaccgagtcaaacactacctctgtagtggacggagataaaagggttaagcggagactactgatggaaacctgtgctgtaaacaatggtggttgtgaccggacttgcaaggacactagcaccggcgtgcactgttcttgccctgtgggtttcacacttcagctggatggcaagacatgcaaggacatcgacgaatgtcaaactcgtaacgggggatgcgatcatttctgtaagaacattgtaggatcctttgactgcgggtgtaaaaaggggtttaaactgctgacggatgagaaaagctgccaggatgttgacgagtgtagcctcgatcgcacatgtgaccatagctgtataaaccatcccggcacgttcgcctgcgcctgcaacagagggtacacactgtatggattcacacattgcggggacaccaacgaatgtagcattaacaatgggggctgtcagcaggtgtgcgtgaacaccgttggtagctatgagtgtcaatgccaccctgggtataagctgcactggaataagaaggactgcgtggaggtgaaaggcctgctgcctacttcagtctcgcccagagtgtcacttcattgcggaaagtctggggggggagatggctgctttctacggtgccatagtggcatccacttatcctctggtctgcaaggcgcctatagcgtgacatgcgggtcctcatctcccctccgtaacaagcaacagaagagtaatgattcagccttcggtgacgtgacaaccattcgcacaagtgtcacctttaaactaaatgaaggaaagtgttcgctaaagaatgcggaattgtttccagaagggctgcgacccgcgcttcccgagaaacattcaagtgtgaaggagagcttccgttacgtcaacctcacatgtagtagtgggaaacaggtgcccggagctccgggtagacctagtactccaaaagaaatgtttattaccgtcgagttcgaactggagaccaaccagaaagaagttaccgctagctgcgatctgagctgcatcgtgaaacgcacggagaaacgtctgagaaaggccatcaggaccttgcgcaaggctgtccaccgggaacagtttcaccttcagctctcaggaatgaaccttgatgtggctaagaaaccaccacggaccagcgagagacaggcagagtcatgtggtgtgggccagggacatgccgagaaccaatgcgggctctgccagcccggcgagtacagcgcggacgggtttgctccctgtcatctatgcgccctgggcacgttccagcccgaagccggacggactagttgcttcccatgcggcgggggcctggccaccaagcaccagggcgccaccagtttccaggactgtgagacacgcgtccagtgttctcccgggcacttttacaacaccaccacacaccgctgtatcagatgtcccgtgggaacctatcagcccgagtttgggaagaacaattgtgtcagctgccctggcaatactaccaccgatttcgacggctccaccaacatcacccagtgtaaaaaccggagatgtggaggcgaacttggggacttcactggctacatcgaatctcctaattatccaggcaattatcccgctaacactgaatgcacctggacaataaatccgccgcctaagagacggatcctcatcgtggtgcctgagatcttcctccccatcgaagacgattgcggtgactacctcgtgatgcgcaaaacctcctcaagtaactcagtgaccacctatgaaacatgccagacatacgagcgccccatcgcattcacaagcaggtcaaagaagctgtggatacagttcaagtctaatgagggcaatagtgccaggggatttcaagtgccatacgtcacctacgatgaggattaccaagaactgattgaagatattgttcgggatggcagactttacgcctcagagaaccaccaggagatcttaaaggacaaaaagctgatcaaagccctgtttgatgtcctggcacaccctcagaactatttcaagtacacggcccaggaaagtcgcgagatgtttcctaggagctttattcgcctgcttagatctaaggtttcacgatttctgcggccatataagtag

SEQ ID NO: 206800 - DNA, 2916 bp, Artificial Sequence
  derived and/or modified sequence
atgggtgtggcagggagaaacagaccgggtgctgcttgggccgtcttgcttttgctgctgctgctgccgccactactcctgcttgccggagcggttccacctggcaggggaagggctgcagggccacaggaggacgtggacgagtgcgcccagggcctcgacgactgccacgccgacgcactatgtcagaacacccctactagctacaaatgcagctgtaagccaggctaccagggagagggacgacagtgtgaggacattgacgagtgtggaaacgagctgaatggaggctgcgtgcacgattgcttgaacatccccggtaattaccgatgcacatgctttgacggattcatgctcgcccacgatggacacaattgcttggacgtcgatgagtgtttggaaaataatggaggctgtcagcacacgtgcgtcaacgtaatggggagctacgagtgctgctgcaaggaagggttttttctctcggataaccagcacacatgcatccacaggtctgaggagggactgtcatgcatgaacaaggatcacgggtgtagccacatatgtaaggaggcacctaggggatctgtcgcctgtgagtgccgcccaggcttcgaattagccaagaaccagcgcgattgcattctcacatgtaatcatggaaacggaggttgccagcactcgtgcgacgataccgcagacgggcctgagtgttcctgccatccgcagtacaaaatgcacacagacgggaggagctgcctggagagagaagataccgtgctagaagtgacggagagtaacactacgtccgtggtcgatggggacaagagggtcaagcgtcgcctgctgatggagacctgcgctgtgaataacggaggttgtgaccggacatgtaaggacaccagtacaggcgtgcattgtagctgcccggtgggcttcacccttcagctggacgggaagacatgtaaggatatcgatgaatgtcagacgcgaaatggaggatgtgatcatttctgtaagaacattgtggggagctttgattgtgggtgtaaaaagggcttcaaattgctgaccgacgagaagtcctgccaggatgttgacgagtgtagcctagatagaacctgcgatcattcctgcatcaaccatccaggtacatttgcgtgtgcctgcaacagaggctataccctgtacggtttcacgcattgcggcgatacaaatgagtgcagcataaacaatggcggatgtcagcaggtttgcgtcaatacagtcggatcctatgagtgccaatgtcatccaggatacaagctccattggaataagaaggattgcgttgaggttaaaggtcttctccccaccagcgtgagcccaagagtgtcgctgcactgcggaaagtccgggggaggggatggctgttttctgcggtgtcactctggtattcatctgagttcaggactccagggagcatacagcgttacctgtgggtcgtcctccccattgagaaataagcagcagaaaagcaatgactcagctttcggggatgtgaccactatacgaacaagtgtgacgttcaagcttaatgaggggaagtgctcacttaagaatgccgagctgtttcctgaaggcctgcgccctgctttacccgaaaagcactcgagtgtcaaggagtcttttcgctatgtgaatctcacttgttcttcaggcaaacaggtgcccggtgcacctggccgaccttccacccccaaagagatgttcatcaccgtagagttcgaacttgagaccaaccaaaaggaagtgactgcgagctgtgacttgtcttgcatcgtcaagcgcaccgaaaaacgactgcggaaggccatccggactttacgaaaggcagtccatcgtgaacagttccacttgcagttatcagggatgaacctggatgtggccaagaagcccccaaggacttctgaacgtcaggccgagtcctgcggggttggccaggggcacgcagagaatcaatgcggattgtgtcagccaggagaatactccgccgatggattcgcaccatgccacttgtgtgccctgggtacctttcaacctgaagccggtcgaaccagctgcttcccatgcgggggtgggctagccaccaaacatcagggcgcaaccagctttcaggattgtgaaacacgcgtgcagtgctcacctgggcacttttataatactaccactcaccgatgtatcagatgccccgtaggtacatatcagcctgaattcggcaaaaacaattgcgttagctgccctggaaataccaccacagactttgatggtagcacgaatatcacccagtgcaagaataggcgatgtgggggtgagcttggagactttacaggatatatcgaatctccgaactacccgggaaactaccccgctaacaccgaatgcacatggactattaatcctccacccaaacgtaggatattgattgtggtccctgaaatcttcttgccgatcgaagacgactgcggcgactatctggtcatgcgcaagacgtcaagctccaactctgttacaacgtatgagacatgtcagacttatgagcggccaatcgctttcaccagccggagtaaaaagctgtggattcagtttaagagcaatgaaggcaacagtgctcgaggttttcaagtgccatatgtaacctacgatgaagactatcaggagctgatagaggacattgtcagggacggcaggctgtacgcctcggaaaatcaccaagagattctaaaggataagaagctcatcaaggcactgttcgacgtgttggctcacccccagaattactttaagtatacagcacaagagtcgagagagatgtttcctcggtcatttatccgactgctccgtagcaaagtttccagattcctgagaccctataagtag

SEQ ID NO: 206801 - DNA, 3148 bp, Artificial Sequence
  derived and/or modified sequence
gcacacctccccgcgccgccgccgccaccgcccgcactccgccgcctctgcccgcaaccgctgagccatccatgggggtcgcgggccgcaaccgtcccggggcggcctgggcggtgctgctgctgctgctgctgctgccgccactgctgctgctggcgggggccgtcccgccgggtcggggccgtgccgcggggccgcaggaggatgtagatgagtgtgcccaagggctagatgactgccatgccgacgccctgtgtcagaacacacccacctcctacaagtgctcctgcaagcctggctaccaaggggaaggcaggcagtgtgaggacatcgatgaatgtggaaatgagctcaatggaggctgtgtccatgactgtttgaatattccaggcaattatcgttgcacttgttttgatggcttcatgttggctcatgacggtcataattgtcttgatgtggacgagtgcctggagaacaatggcggctgccagcatacctgtgtcaacgtcatggggagctatgagtgctgctgcaaggaggggtttttcctgagtgacaatcagcacacctgcattcaccgctcggaagagggcctgagctgcatgaataaggatcacggctgtagtcacatctgcaaggaggccccaaggggcagcgtcgcctgtgagtgcaggcctggttttgagctggccaagaaccagagagactgcatcttgacctgtaaccatgggaacggtgggtgccagcactcctgtgacgatacagccgatggcccagagtgcagctgccatccacagtacaagatgcacacagatgggaggagctgccttgagcgagaggacactgtcctggaggtgacagagagcaacaccacatcagtggtggatggggataaacgggtgaaacggcggctgctcatggaaacgtgtgctgtcaacaatggaggctgtgaccgcacctgtaaggatacttcgacaggtgtccactgcagttgtcctgttggattcactctccagttggatgggaagacatgtaaagatattgatgagtgccagacccgcaatggaggttgtgatcatttctgcaaaaacatcgtgggcagttttgactgcggctgcaagaaaggatttaaattattaacagatgagaagtcttgccaagatgtggatgagtgctctttggataggacctgtgaccacagctgcatcaaccaccctggcacatttgcttgtgcttgcaaccgagggtacaccctgtatggcttcacccactgtggagacaccaatgagtgcagcatcaacaacggaggctgtcagcaggtctgtgtgaacacagtgggcagctatgaatgccagtgccaccctgggtacaagctccactggaataaaaaagactgtgtggaagtgaaggggctcctgcccacaagtgtgtcaccccgtgtgtccctgcactgcggtaagagtggtggaggagacgggtgcttcctcagatgtcactctggcattcacctctcttcaggactgcaaggggcctactctgtcacctgtggctcttcctctcctctcaggaacaaacaacaaaaatcaaatgactctgcttttggggatgtcaccaccatcaggacaagtgtaacctttaagctaaatgaaggcaagtgtagtttgaaaaatgctgagctgtttcccgagggtctgcgaccagcactaccagagaagcacagctcagtaaaagagagcttccgctacgtaaaccttacatgcagctctggcaagcaagtcccaggagcccctggccgaccaagcacccctaaggaaatgtttatcactgttgagtttgagcttgaaactaaccaaaaggaggtgacagcttcttgtgacctgagctgcatcgtaaagcgaaccgagaagcggctccgtaaagccatccgcacgctcagaaaggccgtccacagggagcagtttcacctccagctctcaggcatgaacctcgacgtggctaaaaagcctcccagaacatctgaacgccaggcagagtcctgtggagtgggccagggtcatgcagaaaaccaatgtggtctgtgtcaacctggtgaatattctgcagatggctttgcaccttgccatctctgtgccctgggcacgttccagcctgaagctggtcgaacttcctgcttcccctgtggaggaggccttgccaccaaacatcagggagctacttcctttcaggactgtgaaaccagagttcaatgttcacctggacatttctacaacaccaccactcaccgatgtattcgttgcccagtgggaacataccagcctgaatttggaaaaaataattgtgtttcttgcccaggaaatactacgactgactttgatggctccacaaacataacccagtgtaaaaacagaagatgtggaggggagctgggagatttcactgggtacattgaatccccaaactacccaggcaattacccagccaacaccgagtgtacgtggaccatcaacccaccccccaagcgccgcatcctgatcgtggtccctgagatcttcctgcccatagaggacgactgtggggactatctggtgatgcggaaaacctcttcatccaattctgtgacaacatatgaaacctgccagacctacgaacgccccatcgccttcacctccaggtcaaagaagctgtggattcagttcaagtccaatgaagggaacagcgctagagggttccaggtcccatacgtgacatatgatgaggactaccaggaactcattgaagacatagttcgagatggcaggctctatgcatctgagaaccatcaggaaatacttaaggataagaaacttatcaaggctctgtttgatgtcctggcccatccccagaactatttcaagtacacagcccaggagtcccgagagatgtttccaagatcgttcatccgattgctacgttccaaagtgtccaggtttttgagaccttacaaatgactcagcccacgtgccactcaatacaaatgttctgctatagggttggtgggacagagctgtcttccttctgcatgtcagcacagtcgggtattgctgcctcccgtatcagtgactcattagagttcaatttttatagataatacagatattttggtaaattg

SEQ ID NO: 206802 - DNA, 2916 bp, Artificial Sequence
  derived and/or modified sequence
atgggcgtggccggcagaaacagacccggcgccgcctgggccgtgctgctgctgctgctgctgctgccccccctgctgctgctggccggcgccgtgccccccggcagaggcagagccgccggcccccaggaggacgtggacgagtgcgcccagggcctggacgactgccacgccgacgccctgtgccagaacacccccaccagctacaagtgcagctgcaagcccggctaccagggcgagggcagacagtgcgaggacatcgacgagtgcggcaacgagctgaacggcggctgcgtgcacgactgcctgaacatccccggcaactacagatgcacctgcttcgacggcttcatgctggcccacgacggccacaactgcctggacgtggacgagtgcctggagaacaacggcggctgccagcacacctgcgtgaacgtgatgggcagctacgagtgctgctgcaaggagggcttcttcctgagcgacaaccagcacacctgcatccacagaagcgaggagggcctgagctgcatgaacaaggaccacggctgcagccacatctgcaaggaggcccccagaggcagcgtggcctgcgagtgcagacccggcttcgagctggccaagaaccagagagactgcatcctgacctgcaaccacggcaacggcggctgccagcacagctgcgacgacaccgccgacggccccgagtgcagctgccacccccagtacaagatgcacaccgacggcagaagctgcctggagagagaggacaccgtgctggaggtgaccgagagcaacaccaccagcgtggtggacggcgacaagagagtgaagagaagactgctgatggagacctgcgccgtgaacaacggcggctgcgacagaacctgcaaggacaccagcaccggcgtgcactgcagctgccccgtgggcttcaccctgcagctggacggcaagacctgcaaggacatcgacgagtgccagaccagaaacggcggctgcgaccacttctgcaagaacatcgtgggcagcttcgactgcggctgcaagaagggcttcaagctgctgaccgacgagaagagctgccaggacgtggacgagtgcagcctggacagaacctgcgaccacagctgcatcaaccaccccggcaccttcgcctgcgcctgcaacagaggctacaccctgtacggcttcacccactgcggcgacaccaacgagtgcagcatcaacaacggcggctgccagcaggtgtgcgtgaacaccgtgggcagctacgagtgccagtgccaccccggctacaagctgcactggaacaagaaggactgcgtggaggtgaagggcctgctgcccaccagcgtgagccccagagtgagcctgcactgcggcaagagcggcggcggcgacggctgcttcctgagatgccacagcggcatccacctgagcagcggcctgcagggcgcctacagcgtgacctgcggcagcagcagccccctgagaaacaagcagcagaagagcaacgacagcgccttcggcgacgtgaccaccatcagaaccagcgtgaccttcaagctgaacgagggcaagtgcagcctgaagaacgccgagctgttccccgagggcctgagacccgccctgcccgagaagcacagcagcgtgaaggagagcttcagatacgtgaacctgacctgcagcagcggcaagcaggtgcccggcgcccccggcagacccagcacccccaaggagatgttcatcaccgtggagttcgagctggagaccaaccagaaggaggtgaccgccagctgcgacctgagctgcatcgtgaagagaaccgagaagagactgagaaaggccatcagaaccctgagaaaggccgtgcacagagagcagttccacctgcagctgagcggcatgaacctggacgtggccaagaagccccccagaaccagcgagagacaggccgagagctgcggcgtgggccagggccacgccgagaaccagtgcggcctgtgccagcccggcgagtacagcgccgacggcttcgccccctgccacctgtgcgccctgggcaccttccagcccgaggccggcagaaccagctgcttcccctgcggcggcggcctggccaccaagcaccagggcgccaccagcttccaggactgcgagaccagagtgcagtgcagccccggccacttctacaacaccaccacccacagatgcatcagatgccccgtgggcacctaccagcccgagttcggcaagaacaactgcgtgagctgccccggcaacaccaccaccgacttcgacggcagcaccaacatcacccagtgcaagaacagaagatgcggcggcgagctgggcgacttcaccggctacatcgagagccccaactaccccggcaactaccccgccaacaccgagtgcacctggaccatcaaccccccccccaagagaagaatcctgatcgtggtgcccgagatcttcctgcccatcgaggacgactgcggcgactacctggtgatgagaaagaccagcagcagcaacagcgtgaccacctacgagacctgccagacctacgagagacccatcgccttcaccagcagaagcaagaagctgtggatccagttcaagagcaacgagggcaacagcgccagaggcttccaggtgccctacgtgacctacgacgaggactaccaggagctgatcgaggacatcgtgagagacggcagactgtacgccagcgagaaccaccaggagatcctgaaggacaagaagctgatcaaggccctgttcgacgtgctggcccacccccagaactacttcaagtacaccgcccaggagagcagagagatgttccccagaagcttcatcagactgctgagaagcaaggtgagcagattcctgagaccctacaagtag

SEQ ID NO: 206803 - protein, 1114 aa, Artificial Sequence
  derived and/or modified sequence
MAKATSGAAGLRLLLLLLLPLLGKVALGLYFSRDAYWEKLYVDQAAGTPLLYVHALRDAPEEVPSFRLGQHLYGTYRTRLHENNWICIQEDTGLLYLNRSLDHSSWEKLSVRNRGFPLLTVYLKVFLSPTSLREGECQWPGCARVYFSFFNTSFPACSSLKPRELCFPETRPSFRIRENRPPGTFHQFRLLPVQFLCPNISVAYRLLEGEGLPFRCAPDSLEVSTRWALDREQREKYELVAVCTVHAGAREEVVMVPFPVTVYDEDDSAPTFPAGVDTASAVVEFKRKEDTVVATLRVFDADVVPASGELVRRYTSTLLPGDTWAQQTFRVEHWPNETSVQANGSFVRATVHDYRLVLNRNLSISENRTMQLAVLVNDSDFQGPGAGVLLLHFNVSVLPVSLHLPSTYSLSVSRRARRFAQIGKVCVENCQAFSGINVQYKLHSSGANCSTLGVVTSAEDTSGILFVNDTKALRRPKCAELHYMVVATDQQTSRQAQAQLLVTVEGSYVAEEAGCPLSCAVSKRRLECEECGGLGSPTGRCEWRQGDGKGITRNFSTCSPSTKTCPDGHCDVVETQDINICPQDCLRGSIVGGHEPGEPRGIKAGYGTCNCFPEEEKCFCEPEDIQDPLCDELCRTVIAAAVLFSFIVSVLLSAFCIHCYHKFAHKPPISSAEMTFRRPAQAFPVSYSSSGARRPSLDSMENQVSVDAFKILEDPKWEFPRKNLVLGKTLGEGEFGKVVKATAFHLKGRAGYTTVAVKMLKENASPSELRDLLSEFNVLKQVNHPHVIKLYGACSQDGPLLLIVEYAKYGSLRGFLRESRKVGPGYLGSGGSRNSSSLDHPDERALTMGDLISFAWQISQGMQYLAEMKLVHRDLAARNILVAEGRKMKISDFGLSRDVYEEDSYVKRSQGRIPVKWMAIESLFDHIYTTQSDVWSFGVLLWEIVTLGGNPYPGIPPERLFNLLKTGHRMERPDNCSEEMYRLMLQCWKQEPDKRPVFADISKDLEKMMVKRRDYLDLAASTPSDSLIYDDGLSEEETPLVDCNNAPLPRALPSTWIENKLYGMSDPNWPGESPVPLTRADGTNTGFPRYPNDSVYANWMLSPSAAKLMDTFDS

SEQ ID NO: 206804 - DNA, 3345 bp, Artificial Sequence
  derived and/or modified sequence
atggctaaagctacctccggagccgcgggtctgagactgctcctgcttctgctgctcccgttgctgggcaaagtggcattgggcctatacttcagtagggacgcatattgggaaaaactgtacgtcgaccaggcggccgggaccccacttctgtatgtgcatgccttaagagatgcccctgaggaggtccccagcttcaggttggggcagcatctctacggaacgtaccgaacaagactccacgagaacaactggatatgtatccaagaggacaccggcctgctgtacctaaatcggtcactggaccattcatcctgggaaaaactcagcgttaggaatcggggatttcctctcctcaccgtgtatctgaaagtcttcctgagtcccaccagcctgagagagggcgagtgccagtggccgggctgtgcccgcgtgtacttttcgtttttcaatacctctttccctgcttgtagttctttgaagccgagggaactctgctttcccgaaaccagacccagtttccgaatccgtgagaaccgacccccaggcacattccaccagttccggctgctgcctgtccaatttctgtgtcctaatatttcagtagcataccgtctgctcgaaggggaggggttgccattccgatgcgcccctgattctctcgaggtatccacaagatgggctctggatcgagagcagcgcgaaaagtacgagttagtcgccgtctgcacagtccacgctggtgccagagaagaggtggtcatggttcctttccccgtcactgtctacgatgaagatgatagcgccccgacgtttcccgcgggggtggacacagcctcagctgttgtagaatttaagcgcaaggaggacacagtggtggccaccctgcgagtgttcgatgcagatgtcgtccccgcaagcggcgagctggtgcgccgctacacgagcacactcctccccggcgacacctgggcccagcaaacgttccgcgtggagcactggccaaacgaaaccagcgtccaggcaaatgggtctttcgttagagctactgttcacgactaccgcctggtcttaaaccggaacctctccatctcagaaaatcgcacaatgcagctcgctgtcttggtcaatgattctgactttcagggtccaggagccggcgtgctcctattacactttaacgtctcggtgctgcctgtgtcactgcacctgcctagcacatacagcctttctgtcagcaggagagcgcgtagatttgctcaaataggcaaggtatgcgtagaaaattgtcaagccttttccggcattaacgtgcaatataaattgcactcctccggagccaactgtagcacactgggcgtggttacatctgcagaggatacatccggtattctttttgtgaatgatacaaaggctcttcggaggcccaagtgtgcagaactgcactatatggtggttgccactgatcagcagacatcacgacaggcccaggctcaactgcttgtgaccgtcgaaggcagctatgttgcagaagaagccggctgcccgctatcttgcgcagtttccaaaagaagattggagtgtgaggaatgcgggggtcttggctctccaacgggacgttgtgagtggcgccagggagatggaaaggggatcacccgtaacttctccacatgttcaccttcaacgaagacatgccctgacgggcactgtgatgtggtggaaactcaagacatcaacatatgtcctcaggactgcctgcgcggttccattgtcggcggtcacgaaccaggagagccacggggcatcaaagcagggtacggcacatgcaattgtttccctgaggaggaaaaatgtttctgcgagccggaggatatacaggacccactttgtgatgaactctgccggaccgtcatcgcagcagccgtgcttttttccttcattgtgagcgtcctcctgagtgccttttgtatccactgttatcataagttcgctcataaaccccccatttcaagtgcagagatgacgttcaggagaccagcccaggccttccctgtgtcctacagcagctccggcgcccgtaggcctagtcttgacagtatggaaaaccaggtcagcgtagatgcctttaaaatcctcgaagatcccaagtgggaatttccaaggaaaaacctggtgctgggcaaaactcttggcgagggagaattcggtaaggtggtgaaggctaccgcctttcatctgaaagggagagcaggctacactaccgtcgccgtgaaaatgctgaaagagaatgcgagtcctagcgagctccgcgacctcctctccgaatttaacgtgttgaaacaagttaaccatccccacgtaattaagctttacggggcctgtagccaggatggacctctcctgctgatcgttgaatatgccaaatacggaagcttgagggggttcttgcgggaaagccggaaagtcggacccggttacctggggtcgggtggaagcaggaacagttccagcctggaccaccctgatgagcgggcattaactatgggcgacctgatctccttcgcctggcaaatttcccaaggcatgcagtatcttgcagaaatgaaactcgtccatcgtgatttggctgctcggaacattcttgtagctgaggggcgtaaaatgaaaatcagcgatttcggattgtcaagggatgtgtacgaggaggattcttacgtgaagaggtcacaggggcgtatccccgtgaaatggatggccatcgaatcattattcgatcacatatataccacccagtccgacgtgtggtctttcggggtcctgctctgggagattgtgacactgggcggcaacccctaccctggaataccccccgaacgattgtttaatcttctaaaaaccggccacagaatggagcgcccagacaactgtagtgaagagatgtataggttgatgctgcaatgttggaagcaggagccagacaaaaggccagtgttcgccgacatcagtaaagatcttgagaagatgatggtcaagaggagggattacctcgacctggcagcgtccacaccgtcggactccctgatctacgatgacggactgagcgaggaggagacccctctagtggactgtaacaacgccccactgccgagggccctgccttccacgtggatcgagaacaaactgtatggcatgtctgatccaaattggcctggcgaatcgcccgttccactaacaagggcggacgggactaacaccggattccctaggtatcccaatgactcggtgtacgctaattggatgttatctccctctgccgcaaagctgatggacacgttcgattcctag

SEQ ID NO: 206805 - DNA, 3345 bp, Artificial Sequence
  derived and/or modified sequence
atggccaaggccaccagcggggctgctggcctgcggctgctgctgctgctgctgctgcccctgctgggcaaggtggccctgggcctgtacttcagcagagatgcctactgggagaagctgtatgtggaccaggccgccggcacccccctgctgtatgtgcacgccctgagagatgcccctgaggaggtgcccagcttccggctgggccagcacctgtatggcacctaccgcacccggctgcacgagaacaactggatctgcatccaggaggacaccggcctgctgtacctgaacagaagcctggaccacagctcctgggagaagctgtctgtgaggaacagaggcttccccctgctgactgtgtacctgaaggtgttcctgagccccaccagcctgcgggagggggagtgccagtggccaggctgtgcccgggtgtacttctccttcttcaacaccagcttccctgcctgcagcagcctgaagccccgggagctgtgcttccctgagacccggcccagcttccgcatccgggagaacagacctcctggcaccttccaccagttccggctgctgcctgtgcagttcctgtgccccaacatctctgtggcctaccgcctgctggagggggagggcctgcccttccgctgtgccccagacagcctggaggtgtccacccgctgggccctggaccgggagcagcgggagaagtatgagctggtggccgtgtgcaccgtgcatgctggggcccgggaggaggtggtgatggtgcccttccctgtgacagtgtatgatgaagatgacagcgcccccaccttccctgctggggtggacacagccagcgctgtggtggagttcaagaggaaagaagatactgtggtggccaccctgcgggtgtttgatgctgatgtggtgcctgccagcggggagctggtgcggcgctacaccagcaccctgctgcccggggacacctgggcccagcagaccttccgggtggagcactggcccaatgagacctctgtgcaggccaacggcagctttgtgcgggccaccgtgcatgactaccgcctggtgctgaacagaaacctgagcatcagcgagaacagaaccatgcagctggccgtgctggtgaatgacagcgacttccagggccctggggccggcgtgctgctgctgcacttcaacgtgtctgtgctgcctgtgtccctgcacctgcccagcacctacagcctgtctgtgtcccggcgggccaggagatttgcccagatcggcaaggtgtgtgtggagaactgccaggccttcagcggcatcaacgtgcagtacaagctgcacagcagcggggccaactgcagcaccctgggcgtggtgaccagcgctgaggacaccagcggcatcctgtttgtgaatgacaccaaggccctgcggcggcccaagtgtgccgagctgcactacatggtggtggccacagaccagcagaccagccggcaggcccaggcccagctgctggtgacagtggagggcagctatgtggccgaggaggccggctgccccctgagctgtgctgtgtccaagaggcggctggagtgtgaggagtgtggcggcctgggcagccccaccggccgctgtgagtggaggcagggagatggcaagggcatcaccaggaacttcagcacctgcagccccagcaccaagacctgcccagatggccactgtgatgtggtggagacccaggacatcaacatctgcccccaggactgcctgcggggcagcatcgtgggcggccacgagcccggggagccccggggcatcaaggccggctacggcacctgcaactgcttccctgaggaggagaagtgcttctgtgagcctgaggacatccaggaccccctgtgtgatgagctgtgcaggacagtgattgctgctgctgtgctcttctccttcatcgtgtctgtgctgctgagcgccttctgcatccactgctaccacaagtttgcccacaagccacccatcagcagcgctgagatgaccttcagaagacctgcccaggccttccctgtgtcctacagcagcagcggggcccggcggcccagcctggacagcatggagaaccaggtgtctgtggatgccttcaagatcctggaggaccccaagtgggagttccccaggaagaacctggtgctgggcaagaccctgggggagggggagtttgggaaggtggtgaaggccacagccttccacctgaagggccgggccggctacaccaccgtggccgtgaagatgctgaaggaaaatgccagccccagcgagctgcgggacctgctgtctgagttcaacgtgctgaagcaggtgaaccacccccacgtgatcaagctgtatggagcctgcagccaggacggccccctgctgctgattgtggagtatgccaagtatggcagcctgcggggcttcctgcgggagagcaggaaggtgggccctggctacctgggcagcggcggcagcaggaacagcagcagcctggaccacccagatgagcgggccctgaccatgggagacctgatcagctttgcctggcagatcagccagggcatgcagtacctggccgagatgaagctggtgcaccgggacctggccgccaggaacatcctggtggccgagggcaggaagatgaagatcagtgactttggcctgagcagagatgtgtatgaggaggacagctatgtgaagaggagccagggccgcatccctgtgaagtggatggccatcgagagcctgtttgaccacatctacaccacccagagtgatgtgtggagctttggagtgctgctgtgggagatcgtgaccctgggcggcaacccctacccaggcatccccccagagcggctcttcaacctgctgaagacaggccacaggatggagaggccagacaactgcagcgaggagatgtaccgcctgatgctgcagtgctggaagcaggagccagacaagaggcctgtgtttgctgacatcagcaaggacctggagaagatgatggtgaagaggcgggactacctggacctggccgccagcacccccagcgacagcctcatctatgatgatggcctgtctgaggaggagacccccctggtggactgcaacaatgcccccctgccccgggccctgcccagcacctggattgagaacaagctgtatggcatgtctgaccccaactggccaggagagagccctgtgcccctgaccagggcagatggcaccaacacaggcttcccccgctacccaaatgacagcgtgtatgccaactggatgctgagccccagcgctgccaagctgatggacacctttgacagctag

SEQ ID NO: 206806 - DNA, 3345 bp, Artificial Sequence
  derived and/or modified sequence
atggccaaggccaccagcggcgccgccggcctgcggctgctgctgcttctgctgttgccgctcctgggaaaggtcgctctcggactatattttagccgggacgcttactgggagaaattatacgttgaccaggccgcgggtacacccctgctgtacgtacacgctctccgtgacgcccctgaagaagtgcccagtttcagactgggacagcatctgtacgggacatacaggacccggcttcacgagaataattggatttgtatccaggaagataccggcctcctatacctgaacaggagtttggatcattcttcatgggagaagctttctgtgaggaaccgaggctttcccttgctgaccgtttacctcaaggtcttcctctctcctactagcctgcgtgagggggagtgccagtggcctggatgcgcgcgggtatattttagcttcttcaacaccagctttcccgcctgctccagtctgaagccaagagagctttgctttccagagactagacctagcttccgcataagagaaaacagaccgccgggcactttccaccagttcagactgttaccagtgcaattcctgtgccctaacatttccgtggcttaccgattacttgagggagaaggtctgccctttcgctgtgcccctgacagccttgaagtctccacacggtgggcactggacagggagcagcgagagaaatacgagttagtcgccgtgtgcactgtacatgccggagcaagagaggaggttgtgatggtgcccttccccgtcaccgtgtacgacgaggacgacagtgcacctacttttccagctggcgtggataccgcgagtgccgttgtggagttcaaaaggaaggaagataccgtggtcgcgacccttagggtgttcgacgcggacgttgtcccagcatccggtgagctggtaagacgatatacctcaaccctgctgcctggagacacgtgggcccaacagacattcagggtggagcactggccaaacgagacatccgtccaggccaatggcagttttgtccgagctaccgtgcacgactaccgattggtgctgaaccgcaacctgtctatttccgagaaccgcactatgcagcttgccgttctggttaacgactcagatttccagggaccaggcgcaggcgtactactcttgcactttaacgtgagcgtactgcccgtgtcactccatctgccttccacctattccctttccgtatccagaagggcacgaaggttcgcccagatcggcaaagtttgcgtggaaaattgtcaagccttttctggcattaatgttcagtacaagctccatagttctggggcaaactgtagtacgctcggggtagtgactagcgcagaggacactagtggtattttgtttgtgaatgacaccaaggcactgcgtagaccaaagtgcgccgaattgcactatatggtagttgctaccgatcagcaaacctctaggcaggcccaagcccagctcctagtgactgtcgaagggtcctacgtggctgaggaagcgggctgtccactgagctgtgccgtaagtaagcgccgcctagaatgtgaagagtgcgggggattaggatcacctactggccggtgcgaatggcgacagggagatggcaagggcattacacgcaacttctcgacctgcagcccctcaaccaaaacctgcccagatggacactgtgatgtcgtcgaaacgcaggacatcaatatatgcccccaggactgcctgcggggcagtattgtgggaggacacgagcctggtgaacctcgaggcattaaagccggctacggcacctgcaattgcttcccagaagaggaaaaatgcttctgtgagccagaggacatccaggatcccttgtgcgacgagttgtgcaggacagtaattgccgccgccgtcctctttagctttattgtctccgttttactgagcgcattttgtattcactgctatcacaagttcgctcataagccaccgatatcttcggcggagatgacgtttcgccgccctgcacaggccttcccggtctcatactcctccagcggcgcacggagaccctcgcttgattctatggagaatcaggtatccgtggatgcctttaagatccttgaggacccaaagtgggaatttcccagaaagaatctggttctgggcaagacattaggtgaaggggaattcggtaaagttgtgaaggcaacagcttttcacctgaaggggcgggctgggtacactactgtcgcggtcaagatgctgaaggaaaacgccagcccctctgaactgagagacctgctgtccgaatttaacgttttaaagcaggtgaaccacccccacgtgattaaactgtatggcgcgtgctctcaggatggaccgctgctcctgattgtggagtacgccaaatatgggtccttgaggggattcttgcgcgagagtagaaaggtgggacccggctacctgggctccggtggctcacgtaattcttcttccctggaccacccagacgaaagagctctgacgatgggggatctgataagcttcgcatggcaaatatcccaggggatgcagtacctagccgagatgaaactcgtgcaccgggacctcgccgctcgcaatatcctggtggctgagggccgcaagatgaagatttctgatttcggcctgagcagggacgtctacgaagaggacagctatgtcaagaggtcccagggacggattccagtaaagtggatggctattgagtccctgttcgatcatatttatacaacccagagtgacgtttggtcttttggcgtgctcttgtgggagattgtcaccctaggtggcaacccgtaccccgggatcccacctgagagattattcaatctactcaagacgggtcatcggatggagcgacctgacaattgctctgaggaaatgtacagactaatgcttcagtgctggaagcaagagcctgacaaacgacccgtgttcgccgacataagcaaggacctggagaagatgatggtgaaacggcgggattatctggatctggcagcctccaccccgtcagattcactaatctatgacgatggactgtctgaggaagaaacgcctctggtagactgcaataatgcgcctctgccccgcgctttaccctccacatggattgaaaacaagctgtacggcatgtccgaccctaattggcccggtgagtcccctgttcccctcactcgcgcggatggcacgaataccggatttcctcggtatccaaatgacagtgtttacgctaattggatgctgtccccctccgctgcaaagctgatggatacttttgactcatag

SEQ ID NO: 206807 - DNA, 3345 bp, Artificial Sequence
  derived and/or modified sequence
atggccaaagctacctcaggcgctgcgggtctgcgattgctgctgctactgctgctccctctcctcggcaaggtcgcactcggcctgtatttctcccgcgacgcctactgggaaaagctgtatgtggatcaggctgcaggtacccccctgctctacgtccacgcccttcgcgatgctcctgaggaggtgccatcttttagattaggacagcatctttacgggacgtatcgaacccggttacacgaaaacaattggatctgcatccaagaggatacaggcctgctgtatctgaataggagcttggaccattctagctgggaaaaactgtccgtccggaatcggggatttcctttattaacagtttatcttaaagtctttctgtctcccacgtcgcttagggaaggagagtgccagtggcccggatgcgccagggtgtacttctccttttttaacacttccttccccgcttgttcctcactgaaaccacgagagctgtgctttcccgagaccagaccgtccttcaggattcgtgagaatcggccacccggaaccttccatcagtttagactgctgcctgtgcagttcttatgtccaaacattagtgtggcctatcggttgctggagggggaaggtctgcctttccggtgtgcgccagacagcctcgaagtgtcgacccgttgggctctcgatcgagagcagagagagaaatacgagctcgtggcagtctgtacagtacacgcaggcgctagagaagaggtggtgatggtcccgttccccgttacagtatacgacgaagatgacagcgcccctaccttccccgctggtgtcgacactgcctcagccgtcgtggagttcaaaagaaaggaagacactgtggtggccactctgcgcgtgttcgacgccgacgttgttccggcttccggtgagctggtgcgacgttacacttctacattgcttcccggagatacctgggctcagcagactttcagagtggagcattggcctaacgagacctcagtacaggctaacggcagttttgtccgggctacagtgcacgactatagattagtgcttaatcggaatttgagtatcagcgaaaaccgtaccatgcagcttgccgtcctggtcaatgactccgattttcaggggccaggggctggggtgctccttctccatttcaacgtaagtgtcctccccgtgtccctccaccttccttccacttactctttaagcgtgagccggagggcaaggaggttcgcacagattgggaaagtgtgcgttgagaactgccaggccttttccgggataaacgtgcaatataagctccattccagtggggctaactgttcaacgttaggggtggtgacttccgctgaagatacctctggcattctgttcgttaacgataccaaggcactgaggcgaccgaagtgcgcagaactgcactacatggtcgtggccacagaccaacagacatcccggcaggcccaagctcagctcttagtgacagtggaggggagttacgtcgcagaagaagctggttgcccactgtcttgtgccgtgagcaagcggaggttggaatgcgaggagtgcgggggtctgggctcaccaaccggtcgctgtgaatggagacaaggcgatggcaaggggattaccagaaactttagcacctgcagtccctcgaccaaaacttgtcccgacggacattgtgatgtggtagagacccaggacataaacatctgtccgcaagattgtctgaggggcagtattgttggagggcatgaacccggtgaaccccgaggcattaaagccggatacgggacttgcaattgttttcctgaagaggaaaagtgtttctgcgaacctgaggacatacaagatccgctctgtgacgagctctgtaggacagtgatcgctgctgcagtgctattttcattcatcgtgtccgtgctgctgagcgctttctgcattcactgctaccataaatttgcccataaacctcctattagctcggctgaaatgacattccgcagaccagcacaggccttcccagtttcttactcgtcctctggagctcggaggccttccctggacagcatggagaaccaggtgtcggtggatgccttcaagattctagaagatcccaagtgggagttccctcgtaagaacctcgtgcttggaaagaccttaggagaaggggaatttggtaaggtggtcaaagcgaccgcatttcatcttaagggaagggccggatatacaacggtggcggtcaagatgctgaaagagaacgctagcccctcagagctacgcgacttgctgtccgaattcaatgttttgaaacaggtgaatcatcctcacgttatcaagctctacggagcctgtagccaggacgggccactactgctgatcgtggagtatgcaaagtacgggtctttgaggggatttctccgcgaatcccggaaggtcgggcctgggtacctgggcagtgggggaagcaggaattcgtcaagtctcgatcacccagacgaaagggcccttaccatgggcgacctcatctccttcgcatggcagatctcccagggcatgcagtacctggccgaaatgaaactggtgcatcgagacctggccgctcggaacatcctcgtcgctgagggccgaaagatgaagatttctgatttcgggctctcgagggatgtctatgaagaggatagctacgtcaaacgcagccaaggaaggatcccagttaagtggatggctattgagagccttttcgatcacatatacactactcagtccgatgtttggtccttcggcgtgctgctctgggagatcgttacccttgggggaaacccgtaccccggaatacctccagagcgtctcttcaatctgctaaagacagggcatagaatggagcgccctgataactgtagcgaagagatgtatcggctgatgcttcagtgttggaagcaggagccggacaagcggcctgtgttcgctgacatctcgaaagacctcgagaagatgatggttaagagaagggactatctggacctggccgcttctacaccatctgatagtctgatctatgacgatggattgagtgaggaagagacaccgctggttgattgcaataatgctcctctacctagagcgctgccaagcacgtggatcgagaataagctgtacggcatgagtgacccgaattggccaggtgaatcccctgtgccgctcacaagagccgacgggacaaataccgggttcccacgctacccgaatgatagcgtatacgccaattggatgctgtcaccttccgccgctaagctgatggacacctttgacagctag

SEQ ID NO: 206808 - DNA, 5659 bp, Artificial Sequence
  derived and/or modified sequence
ccctacccgctcctccggcgcagccggcgcttacctcgcttcagtcccgcgaccgaagcagggcgcgcagcagcgctgagtgccccggaacgtgcgtcgcgcccccagtgtccgtcgcgtccgccgcgccccgggcggggatggggcggccagactgagcgccgcacccgccatccagacccgccggccctagccgcagtccctccagccgtggccccagcgcgcacgggcgatggcgaaggcgacgtccggtgccgcggggctgcgtctgctgttgctgctgctgctgccgctgctaggcaaagtggcattgggcctctacttctcgagggatgcttactgggagaagctgtatgtggaccaggcagccggcacgcccttgctgtacgtccatgccctgcgggacgcccctgaggaggtgcccagcttccgcctgggccagcatctctacggcacgtaccgcacacggctgcatgagaacaactggatctgcatccaggaggacaccggcctcctctaccttaaccggagcctggaccatagctcctgggagaagctcagtgtccgcaaccgcggctttcccctgctcaccgtctacctcaaggtcttcctgtcacccacatcccttcgtgagggcgagtgccagtggccaggctgtgcccgcgtatacttctccttcttcaacacctcctttccagcctgcagctccctcaagccccgggagctctgcttcccagagacaaggccctccttccgcattcgggagaaccgacccccaggcaccttccaccagttccgcctgctgcctgtgcagttcttgtgccccaacatcagcgtggcctacaggctcctggagggtgagggtctgcccttccgctgcgccccggacagcctggaggtgagcacgcgctgggccctggaccgcgagcagcgggagaagtacgagctggtggccgtgtgcaccgtgcacgccggcgcgcgcgaggaggtggtgatggtgcccttcccggtgaccgtgtacgacgaggacgactcggcgcccaccttccccgcgggcgtcgacaccgccagcgccgtggtggagttcaagcggaaggaggacaccgtggtggccacgctgcgtgtcttcgatgcagacgtggtacctgcatcaggggagctggtgaggcggtacacaagcacgctgctccccggggacacctgggcccagcagaccttccgggtggaacactggcccaacgagacctcggtccaggccaacggcagcttcgtgcgggcgaccgtacatgactataggctggttctcaaccggaacctctccatctcggagaaccgcaccatgcagctggcggtgctggtcaatgactcagacttccagggcccaggagcgggcgtcctcttgctccacttcaacgtgtcggtgctgccggtcagcctgcacctgcccagtacctactccctctccgtgagcaggagggctcgccgatttgcccagatcgggaaagtctgtgtggaaaactgccaggcattcagtggcatcaacgtccagtacaagctgcattcctctggtgccaactgcagcacgctaggggtggtcacctcagccgaggacacctcggggatcctgtttgtgaatgacaccaaggccctgcggcggcccaagtgtgccgaacttcactacatggtggtggccaccgaccagcagacctctaggcaggcccaggcccagctgcttgtaacagtggaggggtcatatgtggccgaggaggcgggctgccccctgtcctgtgcagtcagcaagagacggctggagtgtgaggagtgtggcggcctgggctccccaacaggcaggtgtgagtggaggcaaggagatggcaaagggatcaccaggaacttctccacctgctctcccagcaccaagacctgccccgacggccactgcgatgttgtggagacccaagacatcaacatttgccctcaggactgcctccggggcagcattgttgggggacacgagcctggggagccccgggggattaaagctggctatggcacctgcaactgcttccctgaggaggagaagtgcttctgcgagcccgaagacatccaggatccactgtgcgacgagctgtgccgcacggtgatcgcagccgctgtcctcttctccttcatcgtctcggtgctgctgtctgccttctgcatccactgctaccacaagtttgcccacaagccacccatctcctcagctgagatgaccttccggaggcccgcccaggccttcccggtcagctactcctcttccggtgcccgccggccctcgctggactccatggagaaccaggtctccgtggatgccttcaagatcctggaggatccaaagtgggaattccctcggaagaacttggttcttggaaaaactctaggagaaggcgaatttggaaaagtggtcaaggcaacggccttccatctgaaaggcagagcagggtacaccacggtggccgtgaagatgctgaaagagaacgcctccccgagtgagctgcgagacctgctgtcagagttcaacgtcctgaagcaggtcaaccacccacatgtcatcaaattgtatggggcctgcagccaggatggcccgctcctcctcatcgtggagtacgccaaatacggctccctgcggggcttcctccgcgagagccgcaaagtggggcctggctacctgggcagtggaggcagccgcaactccagctccctggaccacccggatgagcgggccctcaccatgggcgacctcatctcatttgcctggcagatctcacaggggatgcagtatctggccgagatgaagctcgttcatcgggacttggcagccagaaacatcctggtagctgaggggcggaagatgaagatttcggatttcggcttgtcccgagatgtttatgaagaggattcctacgtgaagaggagccagggtcggattccagttaaatggatggcaattgaatccctttttgatcatatctacaccacgcaaagtgatgtatggtcttttggtgtcctgctgtgggagatcgtgaccctagggggaaacccctatcctgggattcctcctgagcggctcttcaaccttctgaagaccggccaccggatggagaggccagacaactgcagcgaggagatgtaccgcctgatgctgcaatgctggaagcaggagccggacaaaaggccggtgtttgcggacatcagcaaagacctggagaagatgatggttaagaggagagactacttggaccttgcggcgtccactccatctgactccctgatttatgacgacggcctctcagaggaggagacaccgctggtggactgtaataatgcccccctccctcgagccctcccttccacatggattgaaaacaaactctatggcatgtcagacccgaactggcctggagagagtcctgtaccactcacgagagctgatggcactaacactgggtttccaagatatccaaatgatagtgtatatgctaactggatgctttcaccctcagcggcaaaattaatggacacgtttgatagttaacatttctttgtgaaaggtaatggactcacaaggggaagaaacatgctgagaatggaaagtctaccggccctttctttgtgaacgtcacattggccgagccgtgttcagttcccaggtggcagactcgtttttggtagtttgttttaacttccaaggtggttttacttctgatagccggtgattttccctcctagcagacatgccacaccgggtaagagctctgagtcttagtggttaagcattcctttctcttcagtgcccagcagcacccagtgttggtctgtgtccatcagtgaccaccaacattctgtgttcacatgtgtgggtccaacacttactacctggtgtatgaaattggacctgaactgttggatttttctagttgccgccaaacaaggcaaaaaaatttaaacatgaagcacacacacaaaaaaggcagtaggaaaaatgctggccctgatgacctgtccttattcagaatgagagactgcggggggggcctgggggtagtgtcaatgcccctccagggctggaggggaagaggggccccgaggatgggcctgggctcagcattcgagatcttgagaatgattttttttaaatcatgcaacctttccttaggaagacatttggttttcatcatgattaagatgattcctagatttagcacaatggagagattccatgccatctttactatgtggatggtggtatcagggaagagggctcacaagacacatttgtcccccgggcccaccacatcatcctcacgtgttcggtactgagcagccactacccctgatgagaacagtatgaagaaagggggctgttggagtcccagaattgctgacagcagaggctttgctgctgtgaatcccacctgccaccagcctgcagcacaccccacagccaagtagaggcgaaagcagtggctcatcctacctgttaggagcaggtagggcttgtactcactttaatttgaatcttatcaacttactcataaagggacaggctagctagctgtgttagaagtagcaatgacaatgaccaaggactgctacacctctgattacaattctgatgtgaaaaagatggtgtttggctcttatagagcctgtgtgaaaggcccatggatcagctcttcctgtgtttgtaatttaatgctgctacaagatgtttctgtttcttagattctgaccatgactcataagcttcttgtcattcttcattgcttgtttgtggtcacagatgcacaacactcctccagtcttgtgggggcagcttttgggaagtctcagcagctcttctggctgtgttgtcagcactgtaacttcgcagaaaagagtcggattaccaaaacactgcctgctcttcagacttaaagcactgataggacttaaaatagtctcattcaaatactgtattttatataggcatttcacaaaaacagcaaaattgtggcattttgtgaggccaaggcttggatgcgtgtgtaatagagccttgtggtgtgtgcgcacacacccagagggagagtttgaaaaatgcttattggacacgtaacctggctctaatttgggctgtttttcagatacactgtgataagttcttttacaaatatctatagacatggtaaacttttggttttcagatatgcttaatgatagtcttactaaatgcagaaataagaataaactttctcaaattattaaaaatgcctacacagtaagtgtgaattgctgcaacaggtttgttctcaggagggtaagaactccaggtctaaacagctgacccagtgatggggaatttatccttgaccaatttatccttgaccaataacctaattgtctattcctgagttataaaagtccccatccttattagctctactggaattttcatacacgtaaatgcagaagttactaagtattaagtattactgagtattaagtagtaatctgtcagttattaaaatttgtaaaatctatttatgaaaggtcattaaaccagatcatgttcctttttttgtaatcaaggtgactaagaaaatcagttgtgtaaataaaatcatgtatcataaaa

SEQ ID NO: 206809 - DNA, 3345 bp, Artificial Sequence
  derived and/or modified sequence
atggccaaggccaccagcggcgccgccggcctgagactgctgctgctgctgctgctgcccctgctgggcaaggtggccctgggcctgtacttcagcagagacgcctactgggagaagctgtacgtggaccaggccgccggcacccccctgctgtacgtgcacgccctgagagacgcccccgaggaggtgcccagcttcagactgggccagcacctgtacggcacctacagaaccagactgcacgagaacaactggatctgcatccaggaggacaccggcctgctgtacctgaacagaagcctggaccacagcagctgggagaagctgagcgtgagaaacagaggcttccccctgctgaccgtgtacctgaaggtgttcctgagccccaccagcctgagagagggcgagtgccagtggcccggctgcgccagagtgtacttcagcttcttcaacaccagcttccccgcctgcagcagcctgaagcccagagagctgtgcttccccgagaccagacccagcttcagaatcagagagaacagaccccccggcaccttccaccagttcagactgctgcccgtgcagttcctgtgccccaacatcagcgtggcctacagactgctggagggcgagggcctgcccttcagatgcgcccccgacagcctggaggtgagcaccagatgggccctggacagagagcagagagagaagtacgagctggtggccgtgtgcaccgtgcacgccggcgccagagaggaggtggtgatggtgcccttccccgtgaccgtgtacgacgaggacgacagcgcccccaccttccccgccggcgtggacaccgccagcgccgtggtggagttcaagagaaaggaggacaccgtggtggccaccctgagagtgttcgacgccgacgtggtgcccgccagcggcgagctggtgagaagatacaccagcaccctgctgcccggcgacacctgggcccagcagaccttcagagtggagcactggcccaacgagaccagcgtgcaggccaacggcagcttcgtgagagccaccgtgcacgactacagactggtgctgaacagaaacctgagcatcagcgagaacagaaccatgcagctggccgtgctggtgaacgacagcgacttccagggccccggcgccggcgtgctgctgctgcacttcaacgtgagcgtgctgcccgtgagcctgcacctgcccagcacctacagcctgagcgtgagcagaagagccagaagattcgcccagatcggcaaggtgtgcgtggagaactgccaggccttcagcggcatcaacgtgcagtacaagctgcacagcagcggcgccaactgcagcaccctgggcgtggtgaccagcgccgaggacaccagcggcatcctgttcgtgaacgacaccaaggccctgagaagacccaagtgcgccgagctgcactacatggtggtggccaccgaccagcagaccagcagacaggcccaggcccagctgctggtgaccgtggagggcagctacgtggccgaggaggccggctgccccctgagctgcgccgtgagcaagagaagactggagtgcgaggagtgcggcggcctgggcagccccaccggcagatgcgagtggagacagggcgacggcaagggcatcaccagaaacttcagcacctgcagccccagcaccaagacctgccccgacggccactgcgacgtggtggagacccaggacatcaacatctgcccccaggactgcctgagaggcagcatcgtgggcggccacgagcccggcgagcccagaggcatcaaggccggctacggcacctgcaactgcttccccgaggaggagaagtgcttctgcgagcccgaggacatccaggaccccctgtgcgacgagctgtgcagaaccgtgatcgccgccgccgtgctgttcagcttcatcgtgagcgtgctgctgagcgccttctgcatccactgctaccacaagttcgcccacaagccccccatcagcagcgccgagatgaccttcagaagacccgcccaggccttccccgtgagctacagcagcagcggcgccagaagacccagcctggacagcatggagaaccaggtgagcgtggacgccttcaagatcctggaggaccccaagtgggagttccccagaaagaacctggtgctgggcaagaccctgggcgagggcgagttcggcaaggtggtgaaggccaccgccttccacctgaagggcagagccggctacaccaccgtggccgtgaagatgctgaaggagaacgccagccccagcgagctgagagacctgctgagcgagttcaacgtgctgaagcaggtgaaccacccccacgtgatcaagctgtacggcgcctgcagccaggacggccccctgctgctgatcgtggagtacgccaagtacggcagcctgagaggcttcctgagagagagcagaaaggtgggccccggctacctgggcagcggcggcagcagaaacagcagcagcctggaccaccccgacgagagagccctgaccatgggcgacctgatcagcttcgcctggcagatcagccagggcatgcagtacctggccgagatgaagctggtgcacagagacctggccgccagaaacatcctggtggccgagggcagaaagatgaagatcagcgacttcggcctgagcagagacgtgtacgaggaggacagctacgtgaagagaagccagggcagaatccccgtgaagtggatggccatcgagagcctgttcgaccacatctacaccacccagagcgacgtgtggagcttcggcgtgctgctgtgggagatcgtgaccctgggcggcaacccctaccccggcatcccccccgagagactgttcaacctgctgaagaccggccacagaatggagagacccgacaactgcagcgaggagatgtacagactgatgctgcagtgctggaagcaggagcccgacaagagacccgtgttcgccgacatcagcaaggacctggagaagatgatggtgaagagaagagactacctggacctggccgccagcacccccagcgacagcctgatctacgacgacggcctgagcgaggaggagacccccctggtggactgcaacaacgcccccctgcccagagccctgcccagcacctggatcgagaacaagctgtacggcatgagcgaccccaactggcccggcgagagccccgtgcccctgaccagagccgacggcaccaacaccggcttccccagataccccaacgacagcgtgtacgccaactggatgctgagccccagcgccgccaagctgatggacaccttcgacagctag

SEQ ID NO: 206810 - protein, 1872 aa, Artificial Sequence
  derived and/or modified sequence
MMNEDAAQKSDSGEKFNGSSQRRKRPKKSDSNASFLRAARAGNLDKVVEYLKGGIDINTCNQNGLNALHLAAKEGHVGLVQELLGRGSSVDSATKKGNTALHIASLAGQAEVVKVLVKEGANINAQSQNGFTPLYMAAQENHIDVVKYLLENGANQSTATEDGFTPLAVALQQGHNQAVAILLENDTKGKVRLPALHIAARKDDTKSAALLLQNDHNADVQSKMMVNRTTESGFTPLHIAAHYGNVNVATLLLNRGAAVDFTARNGITPLHVASKRGNTNMVKLLLDRGGQIDAKTRDGLTPLHCAARSGHDQVVELLLERGAPLLARTKNGLSPLHMAAQGDHVECVKHLLQHKAPVDDVTLDYLTALHVAAHCGHYRVTKLLLDKRANPNARALNGFTPLHIACKKNRIKVMELLVKYGASIQAITESGLTPIHVAAFMGHLNIVLLLLQNGASPDVTNIRGETALHMAARAGQVEVVRCLLRNGALVDARAREEQTPLHIASRLGKTEIVQLLLQHMAHPDAATTNGYTPLHISAREGQVDVASVLLEAGAAHSLATKKGFTPLHVAAKYGSLDVAKLLLQRRAAADSAGKNGLTPLHVAAHYDNQKVALLLLEKGASPHATAKNGYTPLHIAAKKNQMQIASTLLNYGAETNIVTKQGVTPLHLASQEGHTDMVTLLLDKGANIHMSTKSGLTSLHLAAQEDKVNVADILTKHGADQDAHTKLGYTPLIVACHYGNVKMVNFLLKQGANVNAKTKNGYTPLHQAAQQGHTHIINVLLQHGAKPNATTANGNTALAIAKRLGYISVVDTLKVVTEEVTTTTTTITEKHKLNVPETMTEVLDVSDEEGDDTMTGDGGEYLRPEDLKELGDDSLPSSQFLDGMNYLRYSLEGGRSDSLRSFSSDRSHTLSHASYLRDSAVMDDSVVIPSHQVSTLAKEAERNSYRLSWGTENLDNVALSSSPIHSGFLVSFMVDARGGAMRGCRHNGLRIIIPPRKCTAPTRVTCRLVKRHRLATMPPMVEGEGLASRLIEVGPSGAQFLGKLHLPTAPPPLNEGESLVSRILQLGPPGTKFLGPVIVEIPHFAALRGKERELVVLRSENGDSWKEHFCDYTEDELNEILNGMDEVLDSPEDLEKKRICRIITRDFPQYFAVVSRIKQDSNLIGPEGGVLSSTVVPQVQAVFPEGALTKRIRVGLQAQPMHSELVKKILGNKATFSPIVTLEPRRRKFHKPITMTIPVPKASSDVMLNGFGGDAPTLRLLCSITGGTTPAQWEDITGTTPLTFVNECVSFTTNVSARFWLIDCRQIQESVTFASQVYREIICVPYMAKFVVFAKSHDPIEARLRCFCMTDDKVDKTLEQQENFAEVARSRDVEVLEGKPIYVDCFGNLVPLTKSGQHHIFSFFAFKENRLPLFVKVRDTTQEPCGRLSFMKEPKSTRGLVHQAICNLNITLPIYTKESESDQEQEEEIDMTSEKNPQDEQERIEERLAYIADHLGFSWTELARELDFTEEQIHQIRIENPNSLQDQSHALLKYWLERDGKHATDTNLVECLTKINRMDIVHLMETNTEPLQERISHSYAEIEQTITLDHSEGFSVLQEELCTAQHKQKEEQAVSKESETCDHPPIVSEEDISVGYSTFQDGVPKTEGDSSATALFPQTHKEQVQQDFSGKMQDLPEESSLEYQQEYFVTTPGTETSETQKAMIVPSSPSKTPEEVSTPAEEEKLYLQTPTSSERGGSPIIQEPEEPSEHREESSPRKTSLVIVESADNQPETCERLDEDAAFEKGDDMPEIPPETVTEEEYIDEHGHTVVKKVTRKIIRRYVSSEGTEKEEIMVQGMPQEPVNIEEGDGYSKVIKRVVLKSDTEQSEDNNE

SEQ ID NO: 206811 - DNA, 7988 bp, Artificial Sequence
  derived and/or modified sequence
ctcctcctcctgctttcctccagtaagtgcatacccgctagtggtctgtacaggcggcacggtttgatggcagagatattttctttccaaactgttcaaaatgatgaacgaagatgcagctcagaaaagcgacagtggagagaagttcaacggcagtagtcagaggagaaaaagacccaagaagtctgacagcaatgcaagcttcctccgtgctgccagagcaggcaacctggacaaagttgtggaatatctgaaggggggcatagacatcaatacctgcaatcagaatggactcaacgctctccatctggctgccaaggaaggccacgtggggctggtgcaggagctgctgggaagagggtcctctgtggattctgccactaagaagggaaataccgctcttcacattgcatctttggctggacaagcagaagttgtcaaagttcttgttaaggaaggagccaatattaatgcacagtctcagaatggctttactcctttatacatggctgcccaagagaatcacattgatgttgtaaaatatttgctggaaaatggagctaatcagagcactgctacagaggatggctttactcctctagctgtggcactccagcaaggacacaaccaggcggtggccatcctcttggagaatgacaccaaagggaaagtgaggctgccagctctgcatattgccgctaggaaagacgacaccaaatctgccgcacttctgcttcagaatgaccacaatgctgacgtacaatccaagatgatggtgaataggacaactgagagtggttttacccctttgcacatagctgcacattacggaaatgtcaacgtggcaactcttcttctaaaccggggagctgctgtggacttcacagccaggaatggaatcactcctctgcatgtggcttccaaaagaggaaatacaaacatggtgaagctcttactggatcgaggcggtcagatcgatgccaaaactagggatgggttgacaccacttcactgtgctgcacgaagtgggcatgaccaagtggtggaacttctgttggaacggggtgcccccttgctggcaaggactaagaatgggctgtctccactacacatggctgcccagggagaccacgtggaatgtgtgaagcacctgttacagcacaaggcacctgttgatgatgtcaccctagactacctgacagccctccacgttgctgcgcactgtggccactaccgtgtaaccaaactccttttagacaagagagccaatccgaacgccagagccctgaatggttttactccactgcacattgcctgcaagaaaaaccgcatcaaagtcatggaactgctggtgaaatatggggcttcaatccaagctataacagagtctggcctcacaccaatacatgtggctgccttcatgggccacttgaacattgtcctccttctgctgcagaacggagcctctccagatgtcactaacattcgtggtgagacggcactacacatggcagcccgagccgggcaggtggaagtggtccgatgcctcctgagaaatggtgcccttgttgatgccagagccagggaggaacagacacctttacatattgcctcccgcctgggtaagacagaaattgtccagctgcttctacaacatatggctcatccagatgcggccactacaaatgggtacacaccactgcacatctctgcccgggagggccaggtggatgtggcatcagtcctattggaagcaggagcagcccactccttagctaccaagaagggttttactcccctgcatgtagcagccaagtatggaagcctggatgtggcaaaacttctcttgcaacgccgtgctgccgcagattctgcagggaagaacggccttaccccgctccatgttgctgctcattatgacaaccagaaggtggcgctgctgttactggagaagggtgcttcccctcatgccactgccaagaatggctatactccgttacatattgctgccaagaagaatcaaatgcagatagcttccacactcctgaactatggagcagagacaaacattgtgacaaagcaaggagtaactccactccatctggcctcgcaggaggggcacacagatatggttaccttgcttctggataagggagccaatatccacatgtcaactaagagtggactcacatccttacaccttgcagcccaggaagataaagtgaatgttgctgatattctcaccaagcatggagctgatcaggatgctcatacaaagcttggttacacacctttaattgtggcctgtcactatggaaatgtgaaaatggtcaactttcttctgaagcagggagcaaatgttaacgcaaaaaccaagaacggctacacgcctttgcaccaggccgctcagcagggtcacacgcacatcatcaacgtcctgctccagcatggggccaagcccaacgccaccactgcgaatggcaacactgccttggcgattgctaagcgtctgggctacatctccgtggtcgacaccctgaaggttgtgactgaggaggtcaccaccaccaccacaactattacagaaaaacacaaactaaatgtacctgagacgatgactgaggttcttgatgtttctgatgaagagggtgatgacacaatgactggtgatgggggagaataccttaggcctgaggacctaaaagaactgggtgatgactcactacccagcagtcagttcctggatggtatgaattacctgcgatacagcttggagggaggacgatctgacagccttcgatccttcagttccgacaggtctcacactctgagccatgcctcctacctgagggacagtgccgtgatggatgactcagttgtgattcccagtcaccaggtgtcaactctagccaaggaggcagaaaggaattcttatcgcctaagctggggcactgagaacttagacaacgtggctctttcttctagtcctattcattcaggtttcctggttagttttatggtggatgcccgaggtggtgctatgcgaggatgcagacacaatgggctccgaatcattattccacctcggaaatgtactgctccaacgcgagtcacctgccgactggtcaagcgccacagactggcaacaatgcctccaatggtggaaggagaaggcctggccagtcgcctgatcgaagttggaccttctggtgctcagttccttggtaaacttcacctgccaacggctcctcccccacttaatgagggagaaagtttggtcagccgcattcttcagctggggcctcctggaaccaaattccttgggcctgtgatcgtggagatccctcactttgcggcccttcgaggaaaggaaagggaactggtggtcctgcgcagtgagaatggggacagctggaaagagcatttctgtgactacactgaagatgaattgaatgaaattcttaacggcatggatgaagtactggatagcccagaagacctagaaaagaaacgaatctgccgcatcatcacccgagacttcccacagtactttgcagtggtgtctcgtatcaaacaggacagcaatctgattggcccagaaggaggtgtactgagcagcacagtggtgccccaggtgcaggccgtcttcccagagggggcactcaccaagcggatccgcgtaggcctgcaggctcaacctatgcacagtgagctggttaagaagatcctaggcaacaaagctaccttcagccctatagtcactttggaacctagaagaagaaaattccacaaaccaattaccatgaccattcctgtccccaaagcttcaagtgatgtcatgttgaatggttttgggggagatgcaccaaccttaagattactatgcagcataacaggtggaaccacccctgcccagtgggaagatattacaggaactacgccattaacatttgtcaatgaatgtgtttcctttacaacaaacgtgtctgccaggttctggctgatagattgtcgacagatccaggaatccgttacttttgcatcacaagtatacagagaaattatctgcgtaccttatatggccaaatttgtagtgtttgccaaatcacatgaccccattgaagccaggttgaggtgtttctgcatgactgatgataaagtggataagacccttgaacaacaagaaaattttgctgaggtggccagaagcagggatgtggaggtgttagaaggaaaacccatctacgttgattgtttcggcaacttggtaccattaactaaaagtggccagcatcatatattcagtttttttgccttcaaagaaaatagacttcctctatttgtcaaggtacgcgatacgactcaggaaccttgcggacgactatcatttatgaaggagccaaaatccacgagaggcctggtgcatcaagctatttgcaacttaaacatcactttgccgatttatacaaaggaatcagagtcagatcaagaacaggaggaagagatcgatatgacatcagaaaaaaatccacaggatgagcaggaacggatcgaggaaaggctggcttatattgctgatcaccttggcttcagctggacagaattagcaagagaactggatttcactgaggagcaaattcatcaaattcgaattgaaaatcccaactctcttcaagaccagagtcatgcactgttgaagtactggctagagagggatgggaaacatgctacagataccaacctcgttgaatgtctcaccaagatcaaccgaatggatattgttcatctcatggagaccaacacagaacctctccaggagcgcatcagtcatagttatgcagaaattgaacagaccattacactggatcatagtgaagggttctcggtacttcaagaggagttatgcactgcacagcacaagcagaaagaggagcaagctgtttctaaagaaagtgagacctgcgatcaccctcctatcgtctcagaggaagacatttctgttggttattccacttttcaggatggcgtccccaaaactgagggggacagctcagcaacagcactctttccccaaactcacaaggagcaagttcaacaggatttctcagggaaaatgcaagacctgcctgaagagtcatctctggaatatcagcaggaatattttgtgacaactccaggaacagaaacatcagagactcagaaggctatgatagtacccagctctcccagcaagacacctgaggaagttagcacccctgcagaggaggagaagctgtacctccagaccccaacatccagcgagcggggaggctctcccatcatacaagaacccgaagagccctcagagcacagagaggagagctctccgcggaaaaccagcctcgtaatagtggagtctgccgataaccagcctgagacctgtgaaagactcgatgaagatgcagcttttgaaaagggagacgatatgcctgaaatacccccagaaacagtcacagaagaagaatacattgatgagcatggacacaccgtggtaaagaaggttactaggaaaatcattaggcggtatgtatcctctgaaggcacagagaaagaagagattatggtgcagggaatgccacaggaacctgtcaacatcgaggaaggggatggctattccaaagttataaagcgtgttgtattgaagagtgacaccgagcagtcagaggacaacaatgagtaaagccatcacacagaagagggctgtggtgaaggaccagcatggaaaacgcattgacttggagcacctggaggatgtaccagaagcactagaccaggacgacctccagcgcgatctccagcagctccttcggcatttctgcaaggaggacttgaagcaagaggccaagtgaggggctgcccagttctcacaccagaaaccacacattcactcaatatgcagcttcctgtttcagtaggggagtgacctaactggcctaattaatgggataccccgacatttccactgttagcaaatatacggcattttgctttagttttcccccatcctctttaactataaagctaatttgtgaccaaagatggcatccttcatactggatgctgtatccaatactttgttgtgtctgtgctaacctgggaactggccacctccattgttctttgcttctgcacaagatccatgaaaatccattgatcagaagaacttcacctgcagacctcttcaagtgacactatgtaggaatccttccaaggaatatctatgtacaatgtatatagctgaaatgctcagatgaacaacatattaaaattaaaaccactgcctattgtaactacactgggcatcagaataaaaggcctctagaaattgctgaacaatggttaattaagatattgctaacacaatcgagtgataatacagttttactgcaaaagaagcacttcaaacctattatgtccttagaacttccagagtagccactgctcccagttaaaggtgggtcagtagccttgcagaactgtcctgagaagttattgctggtgctggccagccatggcttaggactccaacagccactctgagggaggggagaagggagcagaggccacgcagaatgaaccgatggggtattcagttgctggcagctacattgtgtggcattctagcatcttcaggtctttagatcttggacaagttggcagggtattttaaaagctataactactgtagttttccagttttcattgctgctttagcaaaccacgctgtcttacagtggtactttcttctggccactgcactgtagataattcattggaaacaagatttacccactacataaaaggttaaactccttcagtatgttggagtggtttctttttttttttctttctttcttttttttcttcaggtttatatcttctctaatacctgcatgtggcgtttaaaaatcaagaccacggtcaaacccctcttctaatcacattaattgtttccattctttttaccctgagtgagcacttttcactttccagctaggtctgtttttcagcttgcagacaagattgagaaatccttgaaaatttggttttggttaaaatttttggtttatttatttgaaatccacactcccttggaaactcttaagtgcatttgtgcacttctgtttgtttgtctcaaagaagggactgtaacaatctgagtaatttccatgtcctcttccttattcctctagtggttgaagctgtgtagcattttaacatatatatattcacaaatatattcatataaacagtatacattttgaatcagtcatttgttaaagaaaagtatattcaatgaagatgaaatttaaataaaaaaggacagagtctatcctccagggattgaacattttccaattatctggtcttttcctgttgtgcaaaaatgactcattgctccgaatgtcaaaaacaaatgcgacaaacaatggcacttcatcatttaaagtaatgttgccaagagaaaaaatttcctgggagggaggtttcccacaagccaaatctcctaagcctcaaatgctagcactttttggcagttggataggaaatgagacattctttggcagccaaaataagagaggccgatggtgaaactttttgagacaccctatggccttcttgtcaaaaccttcactggagctcaagaaaagcatttctgttgtgttatttgcagtgcagatgatgtctgtgtaacaacataatggttattcacctttttttgattttgatttttgctgtgttatcaaaaacttgaatactgtgagaagaagtgaattttcagttgacgaatcagcatcttgttcccatggtgataacactaattgaatatatctatgagggcatgtattagttaatggaaaaaaaaatacaacactaacaatacatagctgcaatgtgtacaatggctgatttaattaaataaaatgtacaagtgttaaatgtggcaa

SEQ ID NO: 206812 - DNA, 5619 bp, Artificial Sequence
  derived and/or modified sequence
atgatgaacgaagatgccgcacagaaaagtgacagcggagagaaattcaacggctctagccaaagacgtaagagaccaaagaagtcagattctaacgcctcatttctgagagccgcacgagctgggaatctggacaaggtggtcgagtatttgaaggggggtatcgatatcaacacttgcaatcagaatggcttaaacgctttgcatctggccgccaaagaaggccacgtaggcctcgttcaagaactgctgggccgcggctctagtgtggatagcgctactaaaaaggggaataccgccctacacatcgcctcattagcgggccaggccgaagtcgtgaaggttctagtgaaagaaggggcgaacattaacgctcagtcacagaatggttttacacccctctacatggctgcccaggaaaatcacatcgatgtggtaaaatatctcttggagaacggcgccaaccagtctacggccaccgaagacgggtttacccccctcgcagtggcgctgcagcagggccataatcaggctgtggcgatactgttagagaatgacacgaaagggaaagtgagactgccagctctgcacattgctgcacgaaaggatgatacgaaatcggccgcattactgcttcaaaatgaccacaatgcggacgtgcagagtaagatgatggtgaatcgcacaactgagagtgggttcacccctctgcatatagcagcacactatggaaacgtcaacgtggccaccctgctgctgaacagaggggcagccgtagatttcaccgcccgtaacggcatcacacctctgcacgtagctagcaagagagggaatacgaatatggttaagttgcttctcgatcggggcggacagattgatgccaagacccgtgatggacttacaccgctccactgcgccgcccgatcaggtcatgaccaggttgtggagctgctactggagcgcggtgctcccctgttggcaagaactaagaatggactgtctcccctgcacatggccgcccagggagaccatgtggaatgtgtgaaacacctgctgcagcataaggcgcctgttgatgatgtcacactggactacctcaccgcactgcacgtggcggcccactgtggacactaccgagtgactaaactcctgctggacaagagagccaatccaaatgcccgagccctgaacgggttcacccctcttcacatcgcttgtaagaagaacagaataaaggtcatggagcttctggtgaaatacggagcttccatccaggccataacagaatctggactgacccccatccacgtggcagcttttatgggacacctgaacatcgttctccttcttttgcaaaatggggcctccccggacgtcactaatatccgcggagaaaccgcgctgcacatggccgcccgggccggccaagtcgaggtggtgcgctgtctcttgagaaatggagcgctggtggacgcccgagcaagagaggaacagacaccgctgcatattgcctctcgtctgggaaagaccgagatcgtccagttgttattgcagcacatggcacacccggatgcagccacaaccaacggatacaccccattgcatatttcagcacgggaagggcaggtggacgtcgccagtgttctcctcgaggctggagccgcgcattctctggcaacgaagaagggcttcactcctttgcacgttgcggccaaatacggcagcttggatgtcgcgaagctgctgttgcagagaagggcagcagccgactctgcaggtaagaatggcctcaccccccttcatgtagccgcccactacgacaaccaaaaggtagccctgctgctgttggaaaagggcgcatctccccatgccacggccaagaatggctacaccccactgcacatcgctgcaaaaaagaatcagatgcagattgcctcgactttgctcaactacggagctgagactaatattgttaccaaacagggagtaacgcctctccatctggcctcacaagagggacacacagatatggtgactctgctactggataaaggtgcaaatatccatatgtccactaaatctggactgactagtctacacctcgcagcccaggaagataaggtcaatgtcgctgacattctcactaagcacggtgcagatcaggatgcgcacactaaactgggatatacgccactgattgtggcctgccactatgggaacgtgaaaatggtcaactttctcctcaagcagggagcgaatgtgaacgccaaaactaaaaatggatatacaccactgcaccaggccgcccagcaaggacacacacacattatcaatgtgctgttacagcatggagctaaaccaaacgcaacaaccgctaatggcaacactgcccttgcaatcgccaaaaggctcggttatatctctgttgtggacacactcaaagtagtgacagaagaagtgaccacgaccactactaccataaccgaaaagcataaattaaatgtacccgagacaatgacagaggtgctcgatgtatcagacgaagagggagacgatactatgacaggcgacgggggcgaatacctgcggccagaggacctgaaggagttgggagacgattcactgccatcaagtcagtttctggatgggatgaactaccttcggtacagtttggaggggggacgctccgacagccttcgtagtttctcttccgaccgttcacataccctaagtcacgcttcctatctgagagatagcgcagtgatggacgacagcgttgtcatccctagccaccaagttagtacactggccaaggaggcagagcgaaattcatatcggctatcttgggggaccgaaaatctggacaatgtggccttgtcttccagtccaatccactctggattccttgttagctttatggtggacgccaggggtggagccatgcgcggatgtcgtcacaacggactgcgaattatcatacctcctcgcaaatgtactgcccccacacgcgtgacatgcaggttggtgaagaggcacagactcgccaccatgcctccgatggtcgagggcgaaggactcgctagtcgcttgatcgaggtgggtccttccggcgctcagtttctagggaagctccatctgcctacagcccccccaccactcaacgaaggcgagtcactcgtgagccgaattttgcagctgggaccccctggtactaaattcctcggccctgtgatcgtcgaaattccgcacttcgctgcactgcgcggtaaagagcgggagctagtcgtgctccggtcagagaacggcgattcatggaaagagcatttttgtgattataccgaagatgaactgaatgaaatactgaacggcatggacgaggtgctggacagccccgaagatcttgaaaaaaaacggatctgtagaataatcactagagattttccccagtacttcgctgtggtgtcccggataaaacaggactcaaatctgatcgggcctgaagggggcgttttgtcatccacggtagtgccacaagtccaggccgtcttccctgaaggtgccttaaccaagaggatccgcgtgggcctgcaggctcaacccatgcacagtgaacttgttaagaagattctgggcaataaggccacctttagcccaatcgtcactctggaaccgcgccggcggaaatttcataaaccaatcacaatgaccatccctgtacccaaggcgtcttctgacgtgatgctcaacgggttcggtggggacgcccctacgttgcgcctactctgtagcataacaggtggcacaacccctgcccaatgggaggacatcacaggcaccacaccgttgacttttgtaaatgaatgtgtctcgttcacgacaaatgtgagcgcgaggttctggctgattgattgtcgccaaattcaggaaagtgtgacatttgcgtctcaagtgtacagagaaatcatctgcgtcccctatatggccaagttcgtggttttcgcgaaatctcacgatccgatcgaggctcggctcaggtgcttttgtatgactgacgacaaggtggacaagacactggagcagcaggaaaattttgctgaagtggcaaggtccagggacgtggaggtgctggaagggaaacctatctatgtggactgcttcggcaatttagtcccattaactaaaagcggacagcatcatattttcagtttttttgcgttcaaagagaatcgtctccctctcttcgtgaaggtcagagacaccactcaggagccctgtgggcgtctctcttttatgaaagaacccaaatccacccgggggctggttcaccaggccatatgtaacctgaacatcacattgcctatttatacaaaagagtccgagtctgatcaggaacaggaagaggagatcgacatgacttcggaaaaaaacccacaggatgagcaggaacggatagaagaaaggctagcctacatcgccgatcatctgggcttcagctggactgagctggctagagagctggattttaccgaagagcagattcaccagatcaggatcgagaatcccaacagtctccaggatcagagccatgccttgctcaagtactggctggaaagagacggaaagcatgccacagacaccaacctcgtcgagtgcctgaccaaaataaacaggatggatatcgtgcaccttatggaaacaaacacagaacctcttcaagaaagaatttcccattcctacgccgaaatcgaacagactattacactggatcattctgaaggattcagcgtcctccaggaggagctgtgcaccgcacagcacaagcaaaaagaggagcaggccgtgagcaaggagagcgaaacatgcgatcacccaccgatagtctccgaggaggacatcagtgtgggttacagtactttccaggacggagtgcctaagactgagggtgactcttctgctaccgcgttgttccctcagacacataaagagcaggtccaacaagacttttcaggaaagatgcaggacctgcccgaggaaagcagcctcgaataccagcaggaatattttgtgactacacctgggactgaaacctcggagacccagaaggcaatgatcgttcctagcagcccatctaaaacacctgaagaggtctctacccccgctgaggaggagaagctctatctgcagacccccacctcatcagagaggggcggttctcctatcatccaggagccagaggaaccttcagagcaccgggaagagtcttccccccgaaagaccagcttagtcatcgtggagtccgcagacaaccaaccagaaacatgtgagaggcttgacgaggatgccgcattcgagaagggcgacgacatgcctgagatccccccagagacagtaactgaagaagagtacattgatgagcacggacacacagtcgtcaagaaggtgactcgcaagattatacggcgctacgtgtcctcagagggcactgagaaagaggagataatggtccagggtatgccgcaagagccggtgaatattgaagaaggcgacggctattcaaaagtgatcaagcgggtcgtgttgaagagtgacacagagcagagcgaggataataatgagtag

SEQ ID NO: 206813 - DNA, 5619 bp, Artificial Sequence
  derived and/or modified sequence
atgatgaatgaagatgctgcccagaagagtgacagcggggagaagttcaacggcagcagccagaggaggaagaggcccaagaagagtgacagcaatgccagcttcctgcgggccgcccgggccggcaacctggacaaggtggtggagtacctgaagggcggcatcgacatcaacacctgcaaccagaatggcctgaatgccctgcacctggccgccaaggagggccacgtgggcctggtgcaggagctgctgggccggggcagctctgtggacagcgccaccaagaagggcaacacagccctgcacatcgccagcctggccggccaggccgaggtggtgaaggtgctggtgaaggagggcgccaacatcaatgcccagagccagaatggcttcacccccctgtacatggccgcccaggagaaccacattgatgtggtgaagtacctgctggagaatggagccaaccagagcacagccacagaagatggcttcacccccctggccgtggccctgcagcagggccacaaccaggccgtggccatcctgctggagaatgacaccaagggcaaggtgcggctgcctgccctgcacatcgccgccaggaaggatgacaccaagtctgctgccctgctgctgcagaatgaccacaatgctgatgtgcagagcaagatgatggtgaacagaaccacagagagcggcttcacccccctgcacatcgccgcccactatggaaatgtgaatgtggccaccctgctgctgaacagaggagctgctgtggacttcaccgccagaaatggcatcacccccctgcacgtggccagcaagaggggcaacaccaacatggtgaagctgctgctggacagaggaggccagattgatgccaagaccagagatggcctgacccccctgcactgtgccgcccggagcggccatgaccaggtggtggagctgctgctggagcggggggcccccctgctggcccggaccaagaatggcctgagccccctgcacatggccgcccagggcgaccacgtggagtgtgtgaagcacctgctgcagcacaaggcccctgtggatgatgtgaccctggactacctgacagccctgcacgtggccgcccactgcggccactacagagtgaccaagctgctgctggacaagagggccaaccccaatgcccgggccctgaatggcttcacccccctgcacatcgcctgcaagaagaaccgcatcaaggtgatggagctgctggtgaagtacggggccagcatccaggccatcacagagagcggcctgacccccatccacgtggccgccttcatgggccacctgaacatcgtgctgctgctgctgcagaatggagccagcccagatgtgaccaacatccggggggagacagccctgcacatggccgcccgggccggccaggtggaggtggtgcgctgcctgctgagaaatggagccctggtggatgcccgggcccgggaggagcagacccccctgcacatcgccagccggctgggcaagacagagatcgtgcagctgctgctgcagcacatggcccacccagatgctgccaccaccaacggctacacccccctgcacatcagcgcccgggagggccaggtggatgtggcctctgtgctgctggaggccggggccgcccacagcctggccaccaagaagggcttcacccccctgcacgtggccgccaagtatggcagcctggatgtggccaagctgctgctgcagaggagagctgctgctgacagcgctgggaagaatggcctgacccccctgcacgtggccgcccactatgacaaccagaaggtggccctgctgctgctggagaagggggccagcccccacgccacagccaagaatggctacacccccctgcacatcgccgccaagaagaaccagatgcagatcgccagcaccctgctgaactatggagctgagaccaacatcgtgaccaagcagggcgtgacccccctgcacctggccagccaggagggccacacagacatggtgaccctgctgctggacaagggggccaacatccacatgagcaccaagagcggcctgaccagcctgcacctggccgcccaggaggacaaggtgaatgtggccgacatcctgaccaagcatggagctgaccaggatgcccacaccaagctgggctacacccccctgattgtggcctgccactatggaaatgtgaagatggtgaacttcctgctgaagcagggcgccaacgtgaatgccaagaccaagaatggctacacccccctgcaccaggccgcccagcagggccacacccacatcatcaacgtgctgctgcagcacggggccaagcccaatgccaccacagccaatggaaacacagccctggccatcgccaagaggctgggctacatctctgtggtggacaccctgaaggtggtgacagaggaggtgaccaccaccaccaccaccatcacagagaagcacaagctgaatgtgcctgagaccatgacagaggtgctggatgtgtctgatgaggagggagatgacaccatgactggagatggaggagagtacctgcggcctgaggacctgaaggagctgggagatgacagcctgcccagcagccagttcctggatggcatgaactacctgcgctacagcctggagggcggccgcagtgacagcctgcgctccttcagcagtgacaggagccacaccctgagccacgccagctacctgcgggacagcgctgtgatggatgattctgtggtgatccccagccaccaggtgtccaccctggccaaggaggccgagaggaacagctaccgcctgtcctggggcacagagaacctggacaacgtggccctgagcagcagccccatccacagcggcttcctggtgtccttcatggtggatgcccggggcggggccatgaggggctgccgccacaacggcctgcgcatcatcatcccccccaggaaatgtacagcccccaccagggtgacctgccgcctggtgaagaggcaccggctggccaccatgccacccatggtggagggggagggcctggccagccggctgattgaggtgggccccagcggggcccagttcctgggcaagctgcacctgcccacagcccccccacccctgaatgaaggagagagcctggtgagccgcatcctgcagctgggccccccaggcaccaagttcctgggccctgtgattgtggagatcccccactttgctgccctgcggggcaaggagcgggagctggtggtgctgcggagtgaaaatggagacagctggaaggagcacttctgtgactacacagaagatgagctgaatgagatcctgaatggcatggatgaggtgctggacagccctgaggacctggagaagaagaggatctgccgcatcatcacccgggacttcccccagtactttgctgtggtgagccgcatcaagcaggacagcaacctgattggccctgagggcggcgtgctgagcagcacagtggtgccccaggtgcaggccgtgtttcctgagggcgccctgaccaagaggatccgggtgggcctgcaggcccagcccatgcacagcgagctggtgaagaagatcctgggcaacaaggccaccttcagccccatcgtgaccctggagcccaggaggaggaagttccacaagcccatcaccatgaccatccctgtgcccaaggccagcagtgatgtgatgctgaatggatttggaggagatgcccccaccctgcggctgctgtgcagcatcactggaggcaccaccccagcccagtgggaggacatcaccggcaccacccccctgacctttgtgaatgaatgtgtgtccttcaccaccaacgtgtctgcccgcttctggctgattgactgccggcagatccaggagagcgtgacctttgccagccaggtgtaccgggagatcatctgtgtgccctacatggccaagtttgtggtgtttgccaagagccatgaccccatcgaggcccggctgcgctgcttctgcatgacagatgacaaggtggacaagaccctggagcagcaggagaactttgctgaggtggcccggagcagagatgtggaggtgctggagggcaagcccatctacgtggactgcttcggcaacctggtgcccctgaccaagagcggccagcaccacatcttctccttctttgccttcaaggagaaccggctgcccctgtttgtgaaggtgcgggacaccacccaggagccctgtggccgcctgtccttcatgaaggagcccaagagcacccggggcctggtgcaccaggccatctgcaacctgaacatcaccctgcccatctacaccaaggagagcgagagtgaccaggagcaggaggaggagattgacatgaccagcgagaagaacccccaggatgagcaggagcgcatcgaggagcggctggcctacatcgctgaccacctgggcttctcctggacagagctggcccgggagctggacttcacagaggagcagatccaccagatcagaattgagaaccccaacagcctgcaggaccagagccacgccctgctgaagtactggctggagagagatggcaagcacgccacagacaccaacctggtggagtgcctgaccaagatcaacaggatggacatcgtgcacctgatggagaccaacacagagcccctgcaggagcgcatcagccacagctatgcagaaattgagcagaccatcaccctggaccacagcgagggcttctctgtgctgcaggaggagctgtgcacagcccagcacaagcagaaggaggagcaggccgtgtccaaggagagcgagacctgtgaccacccccccatcgtgtctgaggaggacatctctgtgggctacagcaccttccaggatggagtgcccaagacagaaggagacagcagcgccacagccctcttcccccagacccacaaggagcaggtgcagcaggacttcagcggcaagatgcaggacctgcctgaggagagcagcctggagtaccagcaggagtactttgtgaccaccccaggcacagagaccagcgagacccagaaggccatgattgtgcccagcagccccagcaagaccccagaggaggtgtccaccccagctgaggaggagaagctgtacctgcagacccccaccagcagcgagcggggcggcagccccatcatccaggagcctgaggagcccagcgagcaccgggaggagagcagccccaggaagaccagcctggtgattgtggagagcgctgacaaccagcctgagacctgtgagcggctggatgaagatgctgcctttgagaagggagatgacatgcctgagatccccccagagaccgtgacagaggaggagtacattgatgagcacggccacacagtggtgaagaaggtgaccaggaagatcatccgccgctacgtgtcctctgagggcacagagaaggaggagatcatggtgcagggcatgccccaggagcctgtgaacatcgaggagggagatggctacagcaaggtgatcaagagggtggtgctgaagagtgacacagagcagagcgaggacaacaatgaatag

SEQ ID NO: 206814 - DNA, 5619 bp, Artificial Sequence
  derived and/or modified sequence
atgatgaacgaggacgccgcccagaagagcgacagcggcgagaagttcaatgggtcaagccaacgtcggaagaggcccaagaagagcgattccaatgcttcctttctcagggccgccagagccggcaacttggacaaggtggttgagtatctaaagggtggcatcgatattaatacatgcaaccaaaatggtttgaacgcccttcaccttgcagcaaaggaaggccatgtcggcctcgtgcaagaactgttgggaagggggagctcagtggactccgccacaaagaagggaaataccgctttgcacatcgcatctctcgccggacaggctgaagtggtcaaagttcttgtcaaagagggcgccaatattaacgcacaaagccaaaacggatttacacctctttacatggccgcccaagagaaccacatcgacgtggtgaagtaccttctcgagaatggtgctaatcagtcaacagccactgaggacggcttcacccccctcgctgtggcgttgcaacagggacataaccaagcagtggcaatactgttggaaaacgatacaaagggcaaggtgagactgcccgccttacatattgccgcgcggaaagacgacactaagtcagccgctctgcttctgcagaatgaccacaatgcggatgtccagagcaaaatgatggtgaacaggaccaccgaaagcgggtttacaccactacatatcgctgcgcactatggcaatgtcaacgtcgcaaccttgctcctaaaccggggcgcggccgtcgatttcactgcgcgcaatggaatcacccccctgcacgtggcaagcaaacgcggaaataccaacatggttaagctcctgctcgacaggggaggtcaaatcgacgctaagacacgcgatgggttaacaccattacactgtgcagcacggtccggccacgatcaagtggtggagctgctcttggagagaggtgctcccttattggcgcggaccaaaaatggtctcagtccattgcacatggccgcccagggcgaccatgtggagtgcgtcaaacacctcctgcagcataaagctccggtcgacgacgttaccctggactacctgaccgctctccacgttgcggcccactgcggccattatagggtaaccaaattactcctcgacaaaagagcgaatccaaacgcccgggctctcaatggcttcacacccctccatattgcctgcaagaagaatagaattaaggtgatggagttgcttgtgaagtacggagctagcatccaagccatcactgagtccggcctgaccccgattcacgttgccgctttcatggggcacctgaatatagtcctgctactacttcaaaatggggcctccccagacgttaccaacatcaggggcgagaccgccctgcacatggctgctcgcgcagggcaggtcgaggtcgtgagatgcctgctgaggaatggcgccctcgtcgatgcacgggcccgcgaggaacagactccccttcacattgcaagccggttaggcaagactgagatcgttcagctgctgttgcaacacatggcacatcccgatgccgctactacaaatgggtacactcccttgcacatctcggcacgagaagggcaggtggacgtggcatcagtcctgcttgaggccggggcagcacatagcctagcgacgaagaaaggatttactcctttgcatgtggcagcaaaatatggatctctggatgtcgctaaactgctgctgcaaaggagggcggccgccgactccgcgggtaagaatggtctgacacctctgcatgtggccgcacactatgacaaccaaaaggtggctttgctgctgctggaaaagggcgcttcaccgcatgcgaccgccaagaacggctacacacccttgcatattgctgccaagaaaaaccagatgcagatagccagtacactccttaactacggcgccgaaacaaatattgtgacgaagcagggtgtgaccccactgcatctcgcctcacaagaagggcacactgacatggttacactcctactggataagggcgctaacatccacatgtccacgaagagcgggctaaccagtctgcatctggctgcccaggaggacaaagtcaatgtggcagatatcctgactaagcacggcgccgaccaggatgcccacacaaaactgggctatacacctctaatcgtggcatgccactacggcaacgtgaagatggtgaatttcttacttaaacagggggccaatgttaatgccaaaacaaagaatggctacaccccactgcaccaggctgcacaacaaggtcatacgcacattatcaatgtactattacaacacggagctaaacctaacgccaccacagctaatgggaacacagctctggctatcgcgaagagactgggctatatctcagtggttgacaccctcaaggtcgtgactgaagaggtcacgacgacaactactacgatcacagaaaaacacaaacttaatgtacccgaaaccatgacagaggtccttgatgtctccgatgaagagggcgacgatacaatgactggggatgggggggagtacctccggcccgaagacctcaaagaattaggcgacgactctctgcccagctcgcaattcctggatgggatgaactatctgaggtacagtctagaaggtgggaggagtgacagcctgcgatcattcagttcagatagaagccacactctttcccacgcttcctacctgcgagactccgccgtgatggacgattccgtggtcatcccttcccatcaggtgtctaccttagccaaggaggcagagagaaattcctatcggctttcttggggcaccgaaaatcttgacaatgttgctctctctagtagccccatccactccggattcctggtctcttttatggtggatgcaaggggcggggccatgcgtggctgccgccacaacggactccggattatcatacctcctcgcaagtgtacagccccgacccgggtcacttgccggttggttaagcgacatagacttgcaaccatgccaccaatggtagagggcgaagggctggcgtcccgtctcatcgaagtcggcccttcaggagcccaattcttagggaagctacacctccccaccgcgccgcccccgctgaacgagggcgaatctctcgtgtctaggatccttcagctggggcccccgggaaccaaatttctggggccagttatcgtggagatccctcacttcgctgctttgaggggaaaagaacgcgagctggttgtgctacgaagcgagaacggggactcatggaaagagcacttttgcgactatacagaggatgaattaaatgagattttgaatggaatggatgaagtgcttgactcaccggaggacctcgagaagaagcggatttgtcgaatcattaccagggactttcctcagtactttgccgtggtgagtaggattaagcaagactccaacctcatcggtcccgaaggtggtgtcttatctagcactgtggtgcctcaggtgcaggcagtgtttccggaaggcgctctgacgaagaggatcagagttgggctgcaggctcagccaatgcactccgagctggtgaagaaaattttagggaataaggcaacctttagtcccattgtgaccctggaacctagaagacgcaagtttcataaacctatcacgatgaccataccagtcccaaaggcatccagtgatgtaatgctaaacggtttcggaggcgatgcacccaccctccgactactatgttctatcacaggcgggaccactccagcacagtgggaagatatcaccggcaccaccccactgaccttcgtaaacgagtgtgtctcctttactactaacgtctcagccagattctggctgatcgactgccggcagattcaagagagtgtgacctttgcatctcaggtataccgcgaaataatctgcgtgccctatatggcaaaatttgtggtattcgctaagagtcatgatcccatcgaggcacggctgagatgtttctgcatgaccgacgacaaagtggacaagaccctagagcagcaagagaactttgccgaagtcgctcggagtcgggatgtcgaggtgctggagggaaagcctatttatgtggactgttttggcaatctggtccccctaaccaaatccggccagcatcatatattttccttcttcgcatttaaggagaacagactgcccctgtttgtgaaggtacgggatacgacccaagaaccatgtggacggttgtcttttatgaaggagcctaagagcactagaggattggtgcaccaagccatctgtaatctgaacattaccctaccaatttacaccaaagagagcgaaagtgaccaggagcaggaggaagagatcgacatgacgtccgaaaagaatccacaggatgaacaagaaaggatcgaagagagactagcctatattgccgatcacctggggtttagctggaccgaactcgcccgtgagctcgacttcacagaggagcagatccatcaaattcggattgaaaatcctaattctttgcaggatcagtcacatgccttgcttaaatactggctcgaacgggatggcaaacacgcaaccgatactaatttggtggaatgtctcacgaaaattaacaggatggatatcgtgcaccttatggaaactaatacagaaccactgcaggaacgaatcagtcatagctacgcagagattgaacagacaatcactctggaccactctgaagggttctcagttctgcaggaggaactgtgcaccgcgcagcacaaacagaaagaggagcaggccgtgtcaaaggaatcagaaacatgcgatcacccgccgattgtgagcgaggaggacataagcgttggttactccactttccaggacggcgtccccaagaccgagggcgatagctccgccacagccctctttccgcagacgcacaaggagcaggttcagcaggacttttccggaaagatgcaggacctgcctgaagagtcttcactggaatatcagcaggaatacttcgttaccaccccgggcactgagaccagcgagacacagaaagccatgattgtgcctagcagcccaagcaaaaccccagaggaggtgtccacacccgctgaagaggagaagctctacctgcaaaccccaacctcttcggaacgcggcggttccccaattatccaggagccagaggagccgtcggagcatagagaggaaagctctccgcgtaagacctccctggtcatcgttgagtcagccgacaatcagcccgaaacctgcgagcggctggacgaggacgccgcctttgagaagggcgatgacatgcccgaaatcccaccagagaccgtgaccgaggaagaatacatcgacgagcacggccacaccgtggtgaaaaaggtcacccgaaaaatcatccgacggtacgtcagctccgaaggcaccgagaaggaagagatcatggtccaggggatgcctcaggagcctgttaacattgaggaaggggatggctacagcaaagtgatcaaaagggtggtgttgaagtctgatacagagcaaagtgaagataataacgagtag

SEQ ID NO: 206815 - DNA, 6313 bp, Artificial Sequence
  derived and/or modified sequence
gtacaggcggcacggtttgatggcagagatattttctttccaaactgttcaaaatgatgaacgaagatgcagctcagaaaagcgacagtggagagaagttcaacggcagtagtcagaggagaaaaagacccaagaagtctgacagcaatgcaagcttcctccgtgctgccagagcaggcaacctggacaaagttgtggaatatctgaaggggggcatagacatcaatacctgcaatcagaatggactcaacgctctccatctggctgccaaggaaggccacgtggggctggtgcaggagctgctgggaagagggtcctctgtggattctgccactaagaagggaaataccgctcttcacattgcatctttggctggacaagcagaagttgtcaaagttcttgttaaggaaggagccaatattaatgcacagtctcagaatggctttactcctttatacatggctgcccaagagaatcacattgatgttgtaaaatatttgctggaaaatggagctaatcagagcactgctacagaggatggctttactcctctagctgtggcactccagcaaggacacaaccaggcggtggccatcctcttggagaatgacaccaaagggaaagtgaggctgccagctctgcatattgccgctaggaaagacgacaccaaatctgccgcacttctgcttcagaatgaccacaatgctgacgtacaatccaagatgatggtgaataggacaactgagagtggttttacccctttgcacatagctgcacattacggaaatgtcaacgtggcaactcttcttctaaaccggggagctgctgtggacttcacagccaggaatggaatcactcctctgcatgtggcttccaaaagaggaaatacaaacatggtgaagctcttactggatcgaggcggtcagatcgatgccaaaactagggatgggttgacaccacttcactgtgctgcacgaagtgggcatgaccaagtggtggaacttctgttggaacggggtgcccccttgctggcaaggactaagaatgggctgtctccactacacatggctgcccagggagaccacgtggaatgtgtgaagcacctgttacagcacaaggcacctgttgatgatgtcaccctagactacctgacagccctccacgttgctgcgcactgtggccactaccgtgtaaccaaactccttttagacaagagagccaatccgaacgccagagccctgaatggttttactccactgcacattgcctgcaagaaaaaccgcatcaaagtcatggaactgctggtgaaatatggggcttcaatccaagctataacagagtctggcctcacaccaatacatgtggctgccttcatgggccacttgaacattgtcctccttctgctgcagaacggagcctctccagatgtcactaacattcgtggtgagacggcactacacatggcagcccgagccgggcaggtggaagtggtccgatgcctcctgagaaatggtgcccttgttgatgccagagccagggaggaacagacacctttacatattgcctcccgcctgggtaagacagaaattgtccagctgcttctacaacatatggctcatccagatgcggccactacaaatgggtacacaccactgcacatctctgcccgggagggccaggtggatgtggcatcagtcctattggaagcaggagcagcccactccttagctaccaagaagggttttactcccctgcatgtagcagccaagtatggaagcctggatgtggcaaaacttctcttgcaacgccgtgctgccgcagattctgcagggaagaacggccttaccccgctccatgttgctgctcattatgacaaccagaaggtggcgctgctgttactggagaagggtgcttcccctcatgccactgccaagaatggctatactccgttacatattgctgccaagaagaatcaaatgcagatagcttccacactcctgaactatggagcagagacaaacattgtgacaaagcaaggagtaactccactccatctggcctcgcaggaggggcacacagatatggttaccttgcttctggataagggagccaatatccacatgtcaactaagagtggactcacatccttacaccttgcagcccaggaagataaagtgaatgttgctgatattctcaccaagcatggagctgatcaggatgctcatacaaagcttggttacacacctttaattgtggcctgtcactatggaaatgtgaaaatggtcaactttcttctgaagcagggagcaaatgttaacgcaaaaaccaagaacggctacacgcctttgcaccaggccgctcagcagggtcacacgcacatcatcaacgtcctgctccagcatggggccaagcccaacgccaccactgcgaatggcaacactgccttggcgattgctaagcgtctgggctacatctccgtggtcgacaccctgaaggttgtgactgaggaggtcaccaccaccaccacaactattacagaaaaacacaaactaaatgtacctgagacgatgactgaggttcttgatgtttctgatgaagagggtgatgacacaatgactggtgatgggggagaataccttaggcctgaggacctaaaagaactgggtgatgactcactacccagcagtcagttcctggatggtatgaattacctgcgatacagcttggagggaggacgatctgacagccttcgatccttcagttccgacaggtctcacactctgagccatgcctcctacctgagggacagtgccgtgatggatgactcagttgtgattcccagtcaccaggtgtcaactctagccaaggaggcagaaaggaattcttatcgcctaagctggggcactgagaacttagacaacgtggctctttcttctagtcctattcattcaggtttcctggttagttttatggtggatgcccgaggtggtgctatgcgaggatgcagacacaatgggctccgaatcattattccacctcggaaatgtactgctccaacgcgagtcacctgccgactggtcaagcgccacagactggcaacaatgcctccaatggtggaaggagaaggcctggccagtcgcctgatcgaagttggaccttctggtgctcagttccttggtaaacttcacctgccaacggctcctcccccacttaatgagggagaaagtttggtcagccgcattcttcagctggggcctcctggaaccaaattccttgggcctgtgatcgtggagatccctcactttgcggcccttcgaggaaaggaaagggaactggtggtcctgcgcagtgagaatggggacagctggaaagagcatttctgtgactacactgaagatgaattgaatgaaattcttaacggcatggatgaagtactggatagcccagaagacctagaaaagaaacgaatctgccgcatcatcacccgagacttcccacagtactttgcagtggtgtctcgtatcaaacaggacagcaatctgattggcccagaaggaggtgtactgagcagcacagtggtgccccaggtgcaggccgtcttcccagagggggcactcaccaagcggatccgcgtaggcctgcaggctcaacctatgcacagtgagctggttaagaagatcctaggcaacaaagctaccttcagccctatagtcactttggaacctagaagaagaaaattccacaaaccaattaccatgaccattcctgtccccaaagcttcaagtgatgtcatgttgaatggttttgggggagatgcaccaaccttaagattactatgcagcataacaggtggaaccacccctgcccagtgggaagatattacaggaactacgccattaacatttgtcaatgaatgtgtttcctttacaacaaacgtgtctgccaggttctggctgatagattgtcgacagatccaggaatccgttacttttgcatcacaagtatacagagaaattatctgcgtaccttatatggccaaatttgtagtgtttgccaaatcacatgaccccattgaagccaggttgaggtgtttctgcatgactgatgataaagtggataagacccttgaacaacaagaaaattttgctgaggtggccagaagcagggatgtggaggtgttagaaggaaaacccatctacgttgattgtttcggcaacttggtaccattaactaaaagtggccagcatcatatattcagtttttttgccttcaaagaaaatagacttcctctatttgtcaaggtacgcgatacgactcaggaaccttgcggacgactatcatttatgaaggagccaaaatccacgagaggcctggtgcatcaagctatttgcaacttaaacatcactttgccgatttatacaaaggaatcagagtcagatcaagaacaggaggaagagatcgatatgacatcagaaaaaaatccacaggatgagcaggaacggatcgaggaaaggctggcttatattgctgatcaccttggcttcagctggacagaattagcaagagaactggatttcactgaggagcaaattcatcaaattcgaattgaaaatcccaactctcttcaagaccagagtcatgcactgttgaagtactggctagagagggatgggaaacatgctacagataccaacctcgttgaatgtctcaccaagatcaaccgaatggatattgttcatctcatggagaccaacacagaacctctccaggagcgcatcagtcatagttatgcagaaattgaacagaccattacactggatcatagtgaagggttctcggtacttcaagaggagttatgcactgcacagcacaagcagaaagaggagcaagctgtttctaaagaaagtgagacctgcgatcaccctcctatcgtctcagaggaagacatttctgttggttattccacttttcaggatggcgtccccaaaactgagggggacagctcagcaacagcactctttccccaaactcacaaggagcaagttcaacaggatttctcagggaaaatgcaagacctgcctgaagagtcatctctggaatatcagcaggaatattttgtgacaactccaggaacagaaacatcagagactcagaaggctatgatagtacccagctctcccagcaagacacctgaggaagttagcacccctgcagaggaggagaagctgtacctccagaccccaacatccagcgagcggggaggctctcccatcatacaagaacccgaagagccctcagagcacagagaggagagctctccgcggaaaaccagcctcgtaatagtggagtctgccgataaccagcctgagacctgtgaaagactcgatgaagatgcagcttttgaaaagggagacgatatgcctgaaatacccccagaaacagtcacagaagaagaatacattgatgagcatggacacaccgtggtaaagaaggttactaggaaaatcattaggcggtatgtatcctctgaaggcacagagaaagaagagattatggtgcagggaatgccacaggaacctgtcaacatcgaggaaggggatggctattccaaagttataaagcgtgttgtattgaagagtgacaccgagcagtcagaggacaacaatgagtaaagccatcacacagaagagggctgtggtgaaggaccagcatggaaaacgcattgacttggagcacctggaggatgtaccagaagcactagaccaggacgacctccagcgcgatctccagcagctccttcggcatttctgcaaggaggacttgaagcaagaggccaagtgaggggctgcccagttctcacaccagaaaccacacattcactcaatatgcagcttcctgtttcagtaggggagtgacctaactggcctaattaatgggataccccgacatttccactgttagcaaatatacggcattttgctttagttttcccccatcctctttaactataaagctaatttgtgaccaaagatggcatccttcatactggatgctgtatccaatactttgttgtgtctgtgctaacctgggaactggccacctccattgttctttgcttctgcacaagatccatgaaaatccattgatcagaagaacttcacctgcagacctcttcaagtgacactatgtaggaatccttccaaggaatatctatgtacaatgtatatagctgaaatgctcagatgaacaacatattaaaattaaaaccactgcctattgtaactacactgggcatcagaataaaaggcctcta

SEQ ID NO: 206816 - DNA, 5618 bp, Artificial Sequence
  derived and/or modified sequence
atgatgaacgaggacgcggctcagaagagtgactccggtgagaagttcaatggaagttcccagaggcgtaaacgcccaaaaaaatctgactccaacgcctcctttctccgggctgcgagagccggaaatttggataaggtggtggaatatttaaaaggaggcattgacataaatacctgtaatcaaaacggtcttaatgcactccatctagccgctaaagaagggcacgtgggacttgtccaagaacttttgggcaggggaagttcggttgatagcgctacgaaaaaggggaatacagccctccatatcgcatctctggccggtcaggccgaggtcgtcaaggtcttggtgaaggagggcgctaacattaacgcacagtcacagaacggcttcacccctctgtacatggccgcacaggaaaatcacatcgacgtggtgaaatatctgctggagaacggagccaaccagtctacagctacagaggatgggttcacgcctctggcagtggccctgcaacagggacataaccaggccgtggccatcctactggaaaacgacactaagggcaaagtccggctacctgcgctgcacatcgcagcgagaaaagatgacaccaagtcagccgctctactgctgcagaacgatcacaacgcagatgtccagagtaaaatgatggtcaaccggacgacagaatccgggtttaccccgttgcatatcgcagcccactacggcaatgtgaacgtggcaacattgctgctgaatagaggcgcagccgtagacttcactgccaggaatgggatcacccccctacacgtggcaagcaaaaggggcaacactaacatggtgaagctattgctggaccgcggtgggcaaatcgatgccaagacaagagacggattgacgcccctgcactgcgccgcaaggagcgggcacgaccaggtcgtagagctgttgctggagcggggtgcccctctgctggcccgaacgaaaaacggattgtctcctctgcacatggcggcacagggggatcacgtggagtgtgtgaaacatttgctccagcacaaagcccctgtggatgacgtcaccctcgactatcttaccgccctgcacgttgctgcccattgtggccattaccgtgtgacaaaactgctcctcgataagagggcaaatccaaatgccagggctctcaacggttttacccccttacacatagcttgcaagaagaacaggatcaaggtgatggagctgctggtgaaatacggcgcaagtattcaggctattacagaaagtgggctcacacctattcacgtggctgcctttatggggcacttgaacatcgtgctcctgctgctgcagaacggagcaagtcctgacgtcacaaacatacgaggagagaccgccctacacatggcggcaagagccggtcaagtagaagtggtgcgttgcctgttgcgtaatggcgcacttgtagacgccagggctcgggaggaacagacccctctacacatcgcatcgaggctgggcaaaactgagatagttcagctgttgctgcaacatatggcacaccccgacgcggcaactacaaacgggtacacccctctgcacatatctgcaagggaagggcaagtggatgtggccagtgtcctgctcgaggctggcgctgctcactctctggctaccaagaagggttttactcctctacatgtggccgcaaagtatggtagcctggacgtggcaaagctgctgttgcaaagaagagcagccgcagatagtgcaggaaagaatgggctgacgccactgcacgtcgctgctcattatgacaatcagaaggtggccttacttctgctggaaaaaggagcttcccctcacgcgacggcaaagaatggatatacccccctgcacatcgccgctaagaagaatcaaatgcaaatagcatctacgctacttaactacggggcagagactaacattgttactaaacaaggcgtaactccgttacatctggcatcacaggagggccacacggatatggtaacactgttgctcgataagggcgcaaacattcacatgtctaccaaatctggcctgacatcactccatctggctgcacaggaggataaggttaacgtagccgatatcctgaccaagcatggagcagaccaggatgcgcacacgaaactaggctacactccacttatcgtagcctgtcactacggtaatgtgaaaatggtgaacttcctccttaagcagggggcaaatgtcaatgccaaaaccaagaacggctacacgcctctacaccaggcagcgcagcagggtcacactcacatcattaatgtgctgttgcagcatggcgctaagccgaatgcaacgaccgcaaatgggaacacagcactggctattgccaagcgtctgggctatatctctgttgtagacacactcaaagtagtcactgaagaggtaaccactacaactactaccatcacggaaaagcacaagttgaacgtcccagagaccatgacagaggtgctggacgtgtcagacgaggagggggatgacaccatgacgggcgacggaggcgaatacctccgacctgaggaccttaaagagctcggggatgactctcttccatcctcacagttcctggacgggatgaactacctcagatatagcctggaaggcggaagatccgatagtctccgttcatttagctcagaccggtcccataccctctcccatgcctcctacctgagggattctgccgtgatggacgattcagtcgttatcccgtctcaccaggtgtccaccttagcaaaggaagccgaacggaactcctaccgactgtcttgggggactgagaatctcgataatgttgccctgagctcttctcctatccatagcggtttcctggtgtcatttatggtggacgctcggggtggagctatgaggggttgcagacacaacggtctccggattatcatcccccctcgaaagtgcaccgcacctacgcgtgtgacatgtagactcgtaaaacgccacaggctggcgactatgcccccaatggtcgagggggagggccttgcgtcccgcctcatcgaagtggggccaagcggcgctcagtttctcggtaaacttcatcttcccactgccccacctcccctcaacgagggcgaaagcctcgtgagcagaatcctgcagctgggccctcccggaaccaagttcctgggccctgtgattgtggagattcctcacttcgctgcactgagggggaaggagagagagctagtggtgctgcgctccgaaaacggggacagctggaaagaacatttctgtgactacacggaagacgagttgaatgaaatcctgaacggtatggatgaggttctggatagccccgaggaccttgaaaagaaaagaatttgtcgcatcatcactcgggatttcccccaatacttcgcggttgtttcccgcattaaacaggattctaatcttatcggaccagaaggcggagtgctgtcctccaccgtagtgcctcaggtgcaagctgttttccctgagggggctttgaccaagagaattagggtcggcctacaggctcaacccatgcactctgaactcgtcaagaaaattttgggcaataaagccacttttagccccattgtcaccttagaaccaagaagaagaaaatttcacaaaccaatcacgatgaccattcctgttcctaaggctagcagcgatgtcatgctgaatggatttggcggtgacgccccaacacttcggctgctgtgttctattacaggcggaaccacaccagcccagtgggaggacattacaggaacaacaccactaaccttcgtgaacgagtgtgtgtcatttactacaaatgtgtctgcacggttctggctgattgattgtcgacagatccaagagagtgtgacattcgcctctcaggtgtatcgcgaaattatctgtgtaccgtatatggcgaagtttgtagtcttcgccaagagtcatgaccccatcgaagcccgactcagatgtttttgcatgacagacgacaaagttgacaagaccttggagcagcaggagaacttcgcagaggtcgctcgttcccgggacgtcgaggtgctggaaggtaagcctatctacgtggattgcttcggcaacctggtgccacttaccaaaagtggccagcaccacatcttcagcttttttgcctttaaggagaacagactgccactgtttgttaaagtgagagataccacccaggagccatgcggcagactgtcatttatgaaagagcctaagtccacccggggacttgtgcaccaggctatctgcaacctgaatatcacgctgcctatctatacgaaggagtcagagagcgatcaagagcaggaggaagaaatcgacatgacgagtgagaagaacccacaagacgagcaagagcgtattgaagaacgcctggcatacattgctgatcacctgggtttcagttggaccgagctggccagggaactggattttacagaagaacagatccatcagattaggattgaaaatcctaactcgctccaggatcaaagtcatgcactgctgaagtactggctcgagcgcgacggtaagcacgccactgatacgaatctcgttgaatgcttaacaaaaataaatcgtatggacattgtgcatctaatggaaacaaatacggagccactccaagagcgcatctcccacagctacgccgagattgagcagactatcacattagatcactccgaaggcttctcagtattacaggaggagttgtgcaccgcacagcacaagcagaaagaggagcaagccgtaagcaaggagagcgaaacctgcgatcatccaccaatcgttagcgaagaggacatcagtgtgggatacagcacattccaggatggggtacccaagactgaaggtgatagttctgctacggccctgtttcctcagacccacaaagaacaagttcagcaggacttcagcggtaagatgcaggatctgcccgaagagtcatctctggaatatcagcaggagtacttcgtgaccacccctggtaccgaaacttcagagacacagaaagcaatgattgtacctagctccccttctaagacccccgaggaagttagcacgcctgcggaagaggagaaactgtatctgcaaacaccgacctccagcgaaagggggggatctccaatcatccaggagcccgaagaaccaagcgagcatagggaggaatcaagccctcgtaagacatccctggtcattgtggaatccgccgataatcaacctgaaacctgcgagagactagacgaagatgctgcatttgagaagggcgatgatatgccagagattccacccgagactgtgacagaggaagagtacatcgacgaacatggccacaccgtcgtgaagaaggtcacacgaaaaattatcaggcggtatgtttcctccgagggaacggagaaggaagagattatggtccagggaatgccacaagaaccagtgaacatcgaggagggcgatgggtatagtaaagtgattaaaagggttgtgctgaaaagcgacaccgaacagtcagaggacaacaacgagta

SEQ ID NO: 206817 - DNA, 5619 bp, Artificial Sequence
  derived and/or modified sequence
atgatgaacgaggacgccgcccagaagagcgacagcggcgagaagttcaacggcagcagccagagaagaaagagacccaagaagagcgacagcaacgccagcttcctgagagccgccagagccggcaacctggacaaggtggtggagtacctgaagggcggcatcgacatcaacacctgcaaccagaacggcctgaacgccctgcacctggccgccaaggagggccacgtgggcctggtgcaggagctgctgggcagaggcagcagcgtggacagcgccaccaagaagggcaacaccgccctgcacatcgccagcctggccggccaggccgaggtggtgaaggtgctggtgaaggagggcgccaacatcaacgcccagagccagaacggcttcacccccctgtacatggccgcccaggagaaccacatcgacgtggtgaagtacctgctggagaacggcgccaaccagagcaccgccaccgaggacggcttcacccccctggccgtggccctgcagcagggccacaaccaggccgtggccatcctgctggagaacgacaccaagggcaaggtgagactgcccgccctgcacatcgccgccagaaaggacgacaccaagagcgccgccctgctgctgcagaacgaccacaacgccgacgtgcagagcaagatgatggtgaacagaaccaccgagagcggcttcacccccctgcacatcgccgcccactacggcaacgtgaacgtggccaccctgctgctgaacagaggcgccgccgtggacttcaccgccagaaacggcatcacccccctgcacgtggccagcaagagaggcaacaccaacatggtgaagctgctgctggacagaggcggccagatcgacgccaagaccagagacggcctgacccccctgcactgcgccgccagaagcggccacgaccaggtggtggagctgctgctggagagaggcgcccccctgctggccagaaccaagaacggcctgagccccctgcacatggccgcccagggcgaccacgtggagtgcgtgaagcacctgctgcagcacaaggcccccgtggacgacgtgaccctggactacctgaccgccctgcacgtggccgcccactgcggccactacagagtgaccaagctgctgctggacaagagagccaaccccaacgccagagccctgaacggcttcacccccctgcacatcgcctgcaagaagaacagaatcaaggtgatggagctgctggtgaagtacggcgccagcatccaggccatcaccgagagcggcctgacccccatccacgtggccgccttcatgggccacctgaacatcgtgctgctgctgctgcagaacggcgccagccccgacgtgaccaacatcagaggcgagaccgccctgcacatggccgccagagccggccaggtggaggtggtgagatgcctgctgagaaacggcgccctggtggacgccagagccagagaggagcagacccccctgcacatcgccagcagactgggcaagaccgagatcgtgcagctgctgctgcagcacatggcccaccccgacgccgccaccaccaacggctacacccccctgcacatcagcgccagagagggccaggtggacgtggccagcgtgctgctggaggccggcgccgcccacagcctggccaccaagaagggcttcacccccctgcacgtggccgccaagtacggcagcctggacgtggccaagctgctgctgcagagaagagccgccgccgacagcgccggcaagaacggcctgacccccctgcacgtggccgcccactacgacaaccagaaggtggccctgctgctgctggagaagggcgccagcccccacgccaccgccaagaacggctacacccccctgcacatcgccgccaagaagaaccagatgcagatcgccagcaccctgctgaactacggcgccgagaccaacatcgtgaccaagcagggcgtgacccccctgcacctggccagccaggagggccacaccgacatggtgaccctgctgctggacaagggcgccaacatccacatgagcaccaagagcggcctgaccagcctgcacctggccgcccaggaggacaaggtgaacgtggccgacatcctgaccaagcacggcgccgaccaggacgcccacaccaagctgggctacacccccctgatcgtggcctgccactacggcaacgtgaagatggtgaacttcctgctgaagcagggcgccaacgtgaacgccaagaccaagaacggctacacccccctgcaccaggccgcccagcagggccacacccacatcatcaacgtgctgctgcagcacggcgccaagcccaacgccaccaccgccaacggcaacaccgccctggccatcgccaagagactgggctacatcagcgtggtggacaccctgaaggtggtgaccgaggaggtgaccaccaccaccaccaccatcaccgagaagcacaagctgaacgtgcccgagaccatgaccgaggtgctggacgtgagcgacgaggagggcgacgacaccatgaccggcgacggcggcgagtacctgagacccgaggacctgaaggagctgggcgacgacagcctgcccagcagccagttcctggacggcatgaactacctgagatacagcctggagggcggcagaagcgacagcctgagaagcttcagcagcgacagaagccacaccctgagccacgccagctacctgagagacagcgccgtgatggacgacagcgtggtgatccccagccaccaggtgagcaccctggccaaggaggccgagagaaacagctacagactgagctggggcaccgagaacctggacaacgtggccctgagcagcagccccatccacagcggcttcctggtgagcttcatggtggacgccagaggcggcgccatgagaggctgcagacacaacggcctgagaatcatcatcccccccagaaagtgcaccgcccccaccagagtgacctgcagactggtgaagagacacagactggccaccatgccccccatggtggagggcgagggcctggccagcagactgatcgaggtgggccccagcggcgcccagttcctgggcaagctgcacctgcccaccgcccccccccccctgaacgagggcgagagcctggtgagcagaatcctgcagctgggcccccccggcaccaagttcctgggccccgtgatcgtggagatcccccacttcgccgccctgagaggcaaggagagagagctggtggtgctgagaagcgagaacggcgacagctggaaggagcacttctgcgactacaccgaggacgagctgaacgagatcctgaacggcatggacgaggtgctggacagccccgaggacctggagaagaagagaatctgcagaatcatcaccagagacttcccccagtacttcgccgtggtgagcagaatcaagcaggacagcaacctgatcggccccgagggcggcgtgctgagcagcaccgtggtgccccaggtgcaggccgtgttccccgagggcgccctgaccaagagaatcagagtgggcctgcaggcccagcccatgcacagcgagctggtgaagaagatcctgggcaacaaggccaccttcagccccatcgtgaccctggagcccagaagaagaaagttccacaagcccatcaccatgaccatccccgtgcccaaggccagcagcgacgtgatgctgaacggcttcggcggcgacgcccccaccctgagactgctgtgcagcatcaccggcggcaccacccccgcccagtgggaggacatcaccggcaccacccccctgaccttcgtgaacgagtgcgtgagcttcaccaccaacgtgagcgccagattctggctgatcgactgcagacagatccaggagagcgtgaccttcgccagccaggtgtacagagagatcatctgcgtgccctacatggccaagttcgtggtgttcgccaagagccacgaccccatcgaggccagactgagatgcttctgcatgaccgacgacaaggtggacaagaccctggagcagcaggagaacttcgccgaggtggccagaagcagagacgtggaggtgctggagggcaagcccatctacgtggactgcttcggcaacctggtgcccctgaccaagagcggccagcaccacatcttcagcttcttcgccttcaaggagaacagactgcccctgttcgtgaaggtgagagacaccacccaggagccctgcggcagactgagcttcatgaaggagcccaagagcaccagaggcctggtgcaccaggccatctgcaacctgaacatcaccctgcccatctacaccaaggagagcgagagcgaccaggagcaggaggaggagatcgacatgaccagcgagaagaacccccaggacgagcaggagagaatcgaggagagactggcctacatcgccgaccacctgggcttcagctggaccgagctggccagagagctggacttcaccgaggagcagatccaccagatcagaatcgagaaccccaacagcctgcaggaccagagccacgccctgctgaagtactggctggagagagacggcaagcacgccaccgacaccaacctggtggagtgcctgaccaagatcaacagaatggacatcgtgcacctgatggagaccaacaccgagcccctgcaggagagaatcagccacagctacgccgagatcgagcagaccatcaccctggaccacagcgagggcttcagcgtgctgcaggaggagctgtgcaccgcccagcacaagcagaaggaggagcaggccgtgagcaaggagagcgagacctgcgaccacccccccatcgtgagcgaggaggacatcagcgtgggctacagcaccttccaggacggcgtgcccaagaccgagggcgacagcagcgccaccgccctgttcccccagacccacaaggagcaggtgcagcaggacttcagcggcaagatgcaggacctgcccgaggagagcagcctggagtaccagcaggagtacttcgtgaccacccccggcaccgagaccagcgagacccagaaggccatgatcgtgcccagcagccccagcaagacccccgaggaggtgagcacccccgccgaggaggagaagctgtacctgcagacccccaccagcagcgagagaggcggcagccccatcatccaggagcccgaggagcccagcgagcacagagaggagagcagccccagaaagaccagcctggtgatcgtggagagcgccgacaaccagcccgagacctgcgagagactggacgaggacgccgccttcgagaagggcgacgacatgcccgagatcccccccgagaccgtgaccgaggaggagtacatcgacgagcacggccacaccgtggtgaagaaggtgaccagaaagatcatcagaagatacgtgagcagcgagggcaccgagaaggaggagatcatggtgcagggcatgccccaggagcccgtgaacatcgaggagggcgacggctacagcaaggtgatcaagagagtggtgctgaagagcgacaccgagcagagcgaggacaacaacgagtag

SEQ ID NO: 206818 - protein, 671 aa, Artificial Sequence
  derived and/or modified sequence
MDPSYCPAHGFPSQDALWPLSSQQWSSAHYSEPAAGGCDGTEAMNGAGPGPAAAAPVPVPVPVPDWRQFCELHAQAAAVDFAHKFCRFLRDNPAYDTPDAGASFSRHFAANFLDVFGEEVRRVLVAGPTTRGAAVSAEAMEPELADTSALKAAPYGHSRSSEDVSTHAATKARVRKGFSLRNMSLCVVDGVRDMWHRRASPEPDAAAAPRTAEPRDKWTRRLRLSRTLAAKVELVDIQREGALRFMVADDAAAGSGGSAQWQKCRLLLRRAVAEERFRLEFFVPPKASRPKVSIPLSAIIEVRTTMPLEMPEKDNTFVLKVENGAEYILETIDSLQKHSWVADIQGCVDPGLWPGDLEGSWTRSCLHPKRASEHWELGRDGSESPKGWGPGAVAHICWSRTPDLKRHLSSHIYLFVPLSPSPHVPHTVIPTSGEQGAETDPEAEPELELSDYPWFHGTLSRVKAAQLVLAGGPRNHGLFVIRQSETRPGEYVLTFNFQGKAKASHLRLSLNGHGQCHVQHLWFQSVLDMLRHFHTHPIPLESGGSADITLRSYVRAQDPPPEPGPTPPAAPASPACWSDSPGQHYFSSLAAAACPPASPSDAAGASSSSASSSSAASGPAPPRPVEGQLSARSRSNSAERLLEAVAATAAEEPPEAAPGRARAVENQYSFY

SEQ ID NO: 206819 - DNA, 2016 bp, Artificial Sequence
  derived and/or modified sequence
atggaccccagctactgccccgcccacggcttccccagccaggacgccctgtggcccctgagcagccagcagtggagcagcgcccactacagcgagcccgccgccggcggctgcgacggcaccgaggccatgaacggcgccggccccggccccgccgccgccgcccccgtgcccgtgcccgtgcccgtgcccgactggagacagttctgcgagctgcacgcccaggccgccgccgtggacttcgcccacaagttctgcagattcctgagagacaaccccgcctacgacacccccgacgccggcgccagcttcagcagacacttcgccgccaacttcctggacgtgttcggcgaggaggtgagaagagtgctggtggccggccccaccaccagaggcgccgccgtgagcgccgaggccatggagcccgagctggccgacaccagcgccctgaaggccgccccctacggccacagcagaagcagcgaggacgtgagcacccacgccgccaccaaggccagagtgagaaagggcttcagcctgagaaacatgagcctgtgcgtggtggacggcgtgagagacatgtggcacagaagagccagccccgagcccgacgccgccgccgcccccagaaccgccgagcccagagacaagtggaccagaagactgagactgagcagaaccctggccgccaaggtggagctggtggacatccagagagagggcgccctgagattcatggtggccgacgacgccgccgccggcagcggcggcagcgcccagtggcagaagtgcagactgctgctgagaagagccgtggccgaggagagattcagactggagttcttcgtgccccccaaggccagcagacccaaggtgagcatccccctgagcgccatcatcgaggtgagaaccaccatgcccctggagatgcccgagaaggacaacaccttcgtgctgaaggtggagaacggcgccgagtacatcctggagaccatcgacagcctgcagaagcacagctgggtggccgacatccagggctgcgtggaccccggcctgtggcccggcgacctggagggcagctggaccagaagctgcctgcaccccaagagagccagcgagcactgggagctgggcagagacggcagcgagagccccaagggctggggccccggcgccgtggcccacatctgctggagcagaacccccgacctgaagagacacctgagcagccacatctacctgttcgtgcccctgagccccagcccccacgtgccccacaccgtgatccccaccagcggcgagcagggcgccgagaccgaccccgaggccgagcccgagctggagctgagcgactacccctggttccacggcaccctgagcagagtgaaggccgcccagctggtgctggccggcggccccagaaaccacggcctgttcgtgatcagacagagcgagaccagacccggcgagtacgtgctgaccttcaacttccagggcaaggccaaggccagccacctgagactgagcctgaacggccacggccagtgccacgtgcagcacctgtggttccagagcgtgctggacatgctgagacacttccacacccaccccatccccctggagagcggcggcagcgccgacatcaccctgagaagctacgtgagagcccaggaccccccccccgagcccggccccaccccccccgccgcccccgccagccccgcctgctggagcgacagccccggccagcactacttcagcagcctggccgccgccgcctgcccccccgccagccccagcgacgccgccggcgccagcagcagcagcgccagcagcagcagcgccgccagcggccccgccccccccagacccgtggagggccagctgagcgccagaagcagaagcaacagcgccgagagactgctggaggccgtggccgccaccgccgccgaggagccccccgaggccgcccccggcagagccagagccgtggagaaccagtacagcttctactag

SEQ ID NO: 206820 - DNA, 1899 bp, Artificial Sequence
  derived and/or modified sequence
atgaacggcgccggccccggccccgccgccgccgcccccgtgcccgtgcccgtgcccgtgcccgactggagacagttctgcgagctgcacgcccaggccgccgccgtggacttcgcccacaagttctgcagattcctgagagacaaccccgcctacgacacccccgacgccggcgccagcttcagcagacacttcgccgccaacttcctggacgtgttcggcgaggaggtgagaagagtgctggtggccggccccaccaccagaggcgccgccgtgagcgccgaggccatggagcccgagctggccgacaccagcgccctgaaggccgccccctacggccacagcagaagcagcgaggacgtgagcacccacgccgccaccaaggccagagtgagaaagggcttcagcctgagaaacatgagcctgtgcgtggtggacggcgtgagagacatgtggcacagaagagccagccccgagcccgacgccgccgccgcccccagaaccgccgagcccagagacaagtggaccagaagactgagactgagcagaaccctggccgccaaggtggagctggtggacatccagagagagggcgccctgagattcatggtggccgacgacgccgccgccggcagcggcggcagcgcccagtggcagaagtgcagactgctgctgagaagagccgtggccgaggagagattcagactggagttcttcgtgccccccaaggccagcagacccaaggtgagcatccccctgagcgccatcatcgaggtgagaaccaccatgcccctggagatgcccgagaaggacaacaccttcgtgctgaaggtggagaacggcgccgagtacatcctggagaccatcgacagcctgcagaagcacagctgggtggccgacatccagggctgcgtggaccccggcgacagcgaggaggacaccgagctgagctgcaccagaggcggctgcctggccagcagagtggccagctgcagctgcgagctgctgaccgacgccgtggacctgcccagaccccccgagaccaccgccgtgggcgccgtggtgaccgccccccacagcagaggcagagacgccgtgagagagagcctgatccacgtgcccctggagaccttcctgcagaccctggagagccccggcggcagcggcagcgacagcaacaacaccggcgagcagggcgccgagaccgaccccgaggccgagcccgagctggagctgagcgactacccctggttccacggcaccctgagcagagtgaaggccgcccagctggtgctggccggcggccccagaaaccacggcctgttcgtgatcagacagagcgagaccagacccggcgagtacgtgctgaccttcaacttccagggcaaggccaagcacctgagactgagcctgaacggccacggccagtgccacgtgcagcacctgtggttccagagcgtgctggacatgctgagacacttccacacccaccccatccccctggagagcggcggcagcgccgacatcaccctgagaagctacgtgagagcccaggaccccccccccgagcccggccccaccccccccgccgcccccgccagccccgcctgctggagcgacagccccggccagcactacttcagcagcctggccgccgccgcctgcccccccgccagccccagcgacgccgccggcgccagcagcagcagcgccagcagcagcagcgccgccagcggccccgccccccccagacccgtggagggccagctgagcgccagaagcagaagcaacagcgccgagagactgctggaggccgtggccgccaccgccgccgaggagccccccgaggccgcccccggcagagccagagccgtggagaaccagtacagcttctactag

SEQ ID NO: 206821 - DNA, 2016 bp, Artificial Sequence
  derived and/or modified sequence
atggacccttcatactgccctgcacatggattccctagccaagatgctttgtggcccttatccagccagcagtggtcatcagcccattactctgaacccgccgctggaggatgtgatggtactgaagcaatgaacggagctgggcccggcccggcggccgctgcacccgttcctgtgcctgtgcccgttcctgattggcggcagttctgtgagctccacgctcaggcagctgcagtggactttgcccataaattttgtcgcttcttgagagataacccggcttacgacacaccagatgcaggggccagcttttcgaggcactttgccgccaacttccttgacgtgtttggagaggaagtgcggcgagtgctggtcgccggccccacaacaagaggggctgctgtgtcagctgaagctatggagcccgagttggcggacacatccgcccttaaggctgccccttatggacacagccggagctcagaagatgttagtactcacgcagctacaaaagcccgggtgaggaaaggcttctccctacggaatatgtctctatgcgtcgtggacggcgttcgagatatgtggcatagaagggcatccccggaacctgacgcagccgcagcaccccgcaccgccgagccaagagacaagtggaccaggagactacgcttaagtcgtactctcgctgctaaggttgaactcgtagatatccagcgggaaggcgcgctacggtttatggttgctgacgacgccgccgcagggagtggcggttcagcccaatggcagaagtgcaggttattgctgcgacgtgccgtggcggaagagagattccggttggagtttttcgtgcctccaaaagcctctcgaccaaaggtatcaattccactatctgccataatcgaggtgcgtacaactatgcccctggagatgccggagaaggacaacacattcgtgctgaaggtggaaaacggcgctgaatacattctggagaccattgactccctgcaaaaacactcttgggtagccgatatacagggttgtgtcgatccaggattatggccaggagacctggaagggtcctggacacggtcatgcctgcatcctaaaagggcttccgagcactgggagttgggccgcgatggctcagagtcacccaaggggtggggtcccggggccgtcgcacacatttgctggtcccggacaccagacttaaagaggcatctgagctcgcatatctatctgtttgtaccactgagcccttcacctcatgtcccacatacagtgattcctacttccggagaacagggtgcagagacagatccggaggccgaacccgaattagagctgagtgactacccatggttccacgggactctctctagggttaaagcggcccaactggtcctcgctggaggtccccgaaaccacggcttgtttgtgatacggcagtctgagacgaggccaggcgagtacgttctgactttcaatttccaggggaaagctaaagcgagccacctcagactgagtctgaacgggcatggacagtgtcacgtgcagcatttgtggtttcagagcgttttggacatgctgaggcacttccatacccatccaatccccctcgaaagcggcggttctgccgatataacactccggagttatgtgcgggcccaggatcctccaccagagccagggccaactcccccggccgcccctgctagcccggcatgttggtctgatagtcctggccagcattactttagcagcctggcagccgcagcgtgtcccccagcctcaccatccgacgctgcaggggccagttccagcagcgcaagctccagtagtgccgcgtccggcccggccccccctagacccgtcgagggccaactgagtgctcggtcccgcagcaactctgccgagcggctgctggaagctgtagctgcgacggctgccgaagaaccacctgaggccgcccccggccgcgccagggcagtcgaaaatcagtattccttctattag

SEQ ID NO: 206822 - DNA, 1899 bp, Artificial Sequence
  derived and/or modified sequence
atgaacggcgctggcccaggccccgcagctgcggctcccgtacccgttcccgtgcccgtccccgactggcgtcagttttgtgagctgcatgcgcaggccgctgcggtggacttcgctcataagttctgtcggttcctgcgcgacaatcctgcctatgacacccctgatgccggggcctcttttagccggcatttcgctgcgaacttccttgatgtgtttggggaggaggtaagaagggtgctagttgccggacctactactaggggcgctgctgtctccgcagaggctatggagcccgaactggcagacacaagtgcactcaaagccgcaccatacggtcatagccggagctcggaggacgtctccacccacgcagcgacaaaagccagagttcgtaaggggtttagccttaggaacatgtcattatgcgttgtggatggcgttagggatatgtggcataggcgcgcttctcctgaacccgatgcagcagctgcacctcgtaccgctgaacctagagacaaatggacacgtcggctgagactgtcacggacactggctgcaaaggtcgagctggttgacattcagagggagggtgccctgcggttcatggtcgcagacgatgcagcggccggtagtggaggaagtgcccagtggcagaagtgccgcctgctgcttaggagggcagtggcggaagagcgattcaggctggaattctttgtgcctccgaaagcatcccgcccaaaggttagtattcccctttcggccattatcgaagtgcgcacaaccatgcccctagaaatgcccgaaaaggacaacacattcgttctgaaggtggagaatggggcggaatatattctggagaccattgatagcttgcagaagcattcctgggtggccgatatacaaggctgtgtcgacccgggcgatagtgaggaagatacagaattatcttgcacccgcgggggatgtctggcatcaagggtggccagctgcagctgtgaattgttgacagacgccgtggaccttcccaggccccctgagacaacagctgtaggggctgtggttaccgctccacattcacggggccgtgacgctgtgagggagagcctaattcacgtccccctggagaccttcctccagacccttgagagcccaggggggtctggttctgattctaacaatactggagagcaaggcgctgaaaccgacccagaggccgagccagagttagaacttagcgactacccatggtttcacggcactttatcacgggtgaaggcggcccagctggtactggccgggggaccacggaaccacggactattcgtgattagacagtctgagacccgccctggcgagtacgtgctgacatttaattttcagggcaaggctaagcacctgcgactgtcactgaatggccacggtcagtgccatgtccagcacctctggtttcaatccgtgctggatatgctgcggcacttccacacgcacccgataccgctggagagcggtggctcggctgacattacactgcggtcctacgtgagagcacaagacccaccccccgagccagggcccacaccccccgccgccccagcgtccccagcttgctggtccgactcacccggccagcactatttcagcagcctggctgctgccgcatgcccaccagcctctccgtctgatgcagccggcgcctcatctagctcggccagcagttctagcgcagcctctggaccggctcccccacggcccgtcgaggggcagctgtcagctcgaagccgctcaaatagcgcagaacgccttttagaagccgtggctgcaactgcggcagaggaacctcccgaagccgccccggggcgcgctcgggcggtggagaatcagtatagcttctactag

SEQ ID NO: 206823 - DNA, 2016 bp, Artificial Sequence
  derived and/or modified sequence
atggaccccagctactgcccagcccacggcttccccagccaggatgccctgtggcccctgagcagccagcagtggagcagcgcccactacagcgagcctgctgctgggggctgtgatggaacagaggccatgaatggagctggccctggccctgctgctgctgcccctgtgcctgtgcctgtgcctgtgcctgactggaggcagttctgtgagctgcacgcccaggccgctgctgtggactttgcccacaagttctgccgcttcctgcgggacaacccagcctatgacaccccagatgctggggccagcttcagccgccactttgctgccaacttcctggatgtgtttggagaggaggtgagaagagtgctggtggccggccccaccaccagaggagctgctgtgtctgctgaggccatggagcctgagctggccgacaccagcgccctgaaggccgccccctacggccacagccgcagcagtgaagatgtgtccacccacgccgccaccaaggcccgggtgaggaagggcttcagcctgaggaacatgagcctgtgtgtggtggatggagtgcgggacatgtggcacagaagagccagccctgagccagatgctgctgctgcccccaggacagctgagccccgggacaagtggacccggcggctgcggctgagcaggaccctggccgccaaggtggagctggtggacatccagcgggagggcgccctgcgcttcatggtggctgatgatgctgctgctggcagcggcggcagcgcccagtggcagaagtgccgcctgctgctgcggcgggctgtggccgaggagcgcttccggctggagttctttgtgccccccaaggccagccggcccaaggtgtccatccccctgagcgccatcatcgaggtgaggaccaccatgcccctggagatgcctgagaaggacaacacctttgtgctgaaggtggagaatggagctgagtacatcctggagaccatcgacagcctgcagaagcacagctgggtggccgacatccagggctgtgtggaccccggcctgtggccaggggacctggagggctcctggaccaggagctgcctgcaccccaagagggccagcgagcactgggagctgggcagagatggcagcgagagccccaagggctggggccctggagctgtggcccacatctgctggagcaggaccccagacctgaagaggcacctgagcagccacatctacctgtttgtgcccctgagccccagcccccacgtgccccacacagtcatccccaccagcggggagcagggcgctgagacagatcctgaggccgagcctgagctggagctgagtgactacccctggttccacggcaccctgagccgggtgaaggccgcccagctggtgctggccggcggccccaggaaccacggcctgtttgtgatccggcagagcgagaccaggcctggagaatatgtgctgaccttcaacttccagggcaaggccaaggccagccacctgcggctgagcctgaatggacatggccagtgccacgtgcagcacctgtggttccagagcgtgctggacatgctgcggcacttccacacccaccccatccccctggagagcggcggcagcgctgacatcaccctgcggagctatgtgcgggcccaggaccccccacctgagcccggccccaccccacctgctgccccagccagccctgcctgctggagcgacagccctggccagcactacttcagcagcctggccgccgccgcctgccccccagccagccccagtgatgctgctggggccagcagcagcagcgccagcagcagcagcgctgccagcggccctgccccacccaggcctgtggagggccagctgagcgcccggagccgcagcaacagcgctgagcggctgctggaggccgtggccgccacagctgctgaggagcccccagaggccgcccctggccgggcccgggctgtggagaaccagtacagcttctactag

SEQ ID NO: 206824 - DNA, 1899 bp, Artificial Sequence
  derived and/or modified sequence
atgaatggagctggccctggccctgctgctgctgcccctgtgcctgtgcctgtgcctgtgcctgactggaggcagttctgtgagctgcacgcccaggccgctgctgtggactttgcccacaagttctgccgcttcctgcgggacaacccagcctatgacaccccagatgctggggccagcttcagccgccactttgctgccaacttcctggatgtgtttggagaggaggtgcggcgggtgctggtggccggccccaccaccagaggagctgctgtgtctgctgaggccatggagcctgagctggccgacaccagcgccctgaaggccgccccctacggccacagccgcagcagtgaagatgtgtccacccatgctgccaccaaggcccgggtgaggaagggcttcagcctgaggaacatgagcctgtgtgtggtggatggagtgcgggacatgtggcaccggcgggccagccctgagccagatgctgctgctgcccccaggacagctgagccccgggacaagtggacccggcggctgcggctgagcaggaccctggccgccaaggtggagctggtggacatccagcgggagggcgccctgcgcttcatggtggctgatgatgctgctgctggcagcggcggcagcgcccagtggcagaagtgccgcctgctgctgcggcgggctgtggccgaggagcgcttccggctggagttctttgtgccccccaaggccagccggcccaaggtgtccatccccctgagcgccatcatcgaggtgaggaccaccatgcccctggagatgcctgagaaggacaacacctttgtgctgaaggtggagaatggagctgagtacatcctggagaccatcgacagcctgcagaagcacagctgggtggccgacatccagggctgtgtggaccccggggacagcgaggaggacacagagctgagctgcacccggggcggctgcctggccagccgggtggccagctgcagctgtgagctgctgacagatgctgtggacctgcccaggcctcctgagaccacagctgtgggcgctgtggtgacagccccccacagccggggcagagatgctgtgcgggagagcctcatccacgtgcccctggagaccttcctgcagaccctggagagccctgggggcagcggcagtgacagcaacaacacaggagagcagggcgctgagacagatcctgaggccgagcctgagctggagctgagtgactacccctggttccacggcaccctgagccgggtgaaggccgcccagctggtgctggccggcggccccagaaatcatggcctcttcgtcatccggcagagcgagaccaggcctggagaatatgtgctgaccttcaacttccagggcaaggccaagcacctgcggctgagcctgaatggccacggccagtgccacgtgcagcacctgtggttccagagcgtgctggacatgctgcggcacttccacacccaccccatccccctggagagcggcggcagcgctgacatcaccctgcggagctatgtgcgggcccaggaccccccacctgagcccggccccaccccacctgctgccccagccagccctgcctgctggagcgacagccctggccagcactacttcagcagcctggccgctgctgcctgccccccagccagccccagtgatgctgctggggccagcagcagcagcgccagcagcagcagcgctgccagcggccctgccccacccaggcctgtggagggccagctgagcgcccggagccgcagcaacagcgctgagcggctgctggaggccgtggccgccacagctgctgaggagcccccagaggccgcccctggccgggcccgggctgtggagaaccagtacagcttctactag

SEQ ID NO: 206825 - DNA, 2016 bp, Artificial Sequence
  derived and/or modified sequence
atggaccccagctactgccccgcccacggcttccccagccaggacgccttgtggcccctcagcagccaacagtggagtagcgcacattactctgagcccgccgctgggggctgtgacggcactgaggcaatgaacggtgcgggtcctggacccgcagccgcagccccggttccagtgcctgtacctgtccctgactggaggcagttttgcgaactgcatgcccaagccgccgccgtcgactttgcccacaagttctgccgtttcctcagagataaccccgcctatgatacccccgatgcaggggcatcctttagccgccacttcgccgcaaactttctcgatgtattcggtgaggaggtgcgcagggtgctcgttgccggccccaccacgcggggagcagcagtttctgccgaggccatggagcccgagctggccgacacatccgctctaaaggctgccccgtacgggcactctcggtccagtgaggatgtgtccacgcacgcagcaacaaaggcacgggtgcggaaggggttctcactcagaaacatgtctctgtgtgtggtggatggggttcgggatatgtggcatcggagggcctcacctgaacccgatgccgctgcggccccgcgcacagccgagccgagggataaatggactcggaggctccgcttatcccggacactggctgcaaaagtggagctggtagatatccaacgtgaaggggcccttagatttatggtggcagacgacgccgccgcgggatctggcgggtcggctcagtggcagaagtgccggctgctactgcgccgcgcagtggctgaggagagatttagattagagttcttcgtccctcctaaagcctcaagaccaaaagtatctatcccgctgtcagcaatcatcgaggtgagaaccacgatgcccttggagatgcccgaaaaggacaataccttcgtgctgaaagtcgagaatggcgccgaatacatcctagagaccatagactccctgcagaagcactcctgggttgcagacatccaaggctgcgtagatcctggcctgtggccaggagatctcgagggatcttggacacggagctgcctgcacccgaaaagggcaagcgagcactgggagcttggacgggacgggagcgaatcccctaaaggatgggggcctggagccgttgcacatatttgttggagtcgcactcctgatttaaagagacatctgagcagccacatctacctgttcgtgccgctgagcccatccccgcatgtgcctcataccgtgatacctacttctggagaacagggtgccgagaccgatccagaagccgagcctgagctggaacttagcgattacccctggtttcacggaaccttatccagagttaaggcggctcagctggtgctggccggcggaccacggaaccacgggctgttcgtgatacgccagagcgagaccaggcccggcgaatatgtacttaccttcaacttccaaggcaaagctaaggcttcacacctgcggctgtcactgaacggccatggccagtgtcacgtgcaacacttatggttccagagcgtgctcgatatgctgcgccattttcacactcaccccattccactggagtctggcggttctgctgatataactttgaggagttacgtccgcgcccaggacccaccacccgaacctggaccgacgccacccgcggcacccgcatcccccgcctgctggagtgatagccctggccagcactatttctcgtctctggctgcggccgcttgcccccctgcctcccccagcgacgccgcgggcgccagcagttcaagtgcctcgagctcttccgcggcctccggccccgctcccccacgccctgtagaaggacagttgtctgcacgttcccggtcgaatagcgccgaaagactgctcgaggcagttgctgccacagcagccgaagagccgccggaagcagcgcccggaagggcccgggcagtcgaaaatcaatactctttttattag

SEQ ID NO: 206826 - DNA, 1899 bp, Artificial Sequence
  derived and/or modified sequence
atgaacggcgccggccccggccccgccgccgccgcccccgtgcccgtgccagtgccggtccctgattggcggcagttttgcgagctccacgcacaggctgctgccgtcgacttcgcacataagttctgccggttcctgagagacaacccagcttacgatacacctgacgcgggcgcttcattcagcagacactttgccgcgaatttcctcgatgtgttcggcgaggaggtgcgtcgtgttcttgtggctggacccactaccagaggtgcagccgtgtcagccgaagccatggagcccgaactggctgatacatctgcgctgaaggcagccccttatgggcactctaggtcttctgaggatgtctccacccatgccgccactaaagcacgcgtgaggaagggattttctttgaggaacatgagcctgtgtgtggtggatggtgtgcgcgatatgtggcataggagagcctcacctgaaccagacgctgctgccgcccctcgcaccgcggaacctcgagataagtggactcgcagactgagactcagtaggacactggcggccaaagttgagctggttgatatccagagagagggagctttgagatttatggtagccgacgatgccgccgctggtagcgggggctccgcacaatggcagaagtgccggttgcttctacgccgtgcagtcgccgaagagcgcttcaggcttgagtttttcgtcccgccgaaggcaagtagaccaaaggtcagtatacccttgagtgccataattgaagtaaggactaccatgcccctcgagatgcctgaaaaggataatactttcgttctgaaggtggaaaacggagccgaatacatcctggagactattgacagcttacagaagcattcttgggtagccgatattcagggatgtgtggatcccggtgattcggaggaggacactgagctgtcatgcactcggggtggttgcttagcgtcacgtgtggcgtcctgttcttgtgagctgctaaccgacgcggtggacctgccgcggcctccggagaccactgctgttggcgcggtggttacggccccacactcaaggggtcgggatgctgtccgggagagcctaattcacgtgcctctggaaacttttcttcagaccctggaatcacccgggggaagtggctccgattcaaacaataccggggagcaaggtgccgagaccgatcccgaggccgagcccgagctcgagttgtccgactacccttggtttcacggaacccttagccgtgttaaagcagctcagctggtcctagccggaggcccccggaaccatggactgttcgtcattcggcagtccgagactaggcctggagaatatgttctgacattcaatttccaagggaaggccaaacatctgcgtttgagcttgaatgggcatggccagtgtcatgtgcagcacctgtggttccagtcagtcctagacatgctgaggcacttccacacccacccgattcctctcgaaagtgggggatcagccgacattactctcaggagttatgtgagagcacaggacccgccccctgaacctggccccaccccaccagcagcccccgcctcccccgcctgttggagtgatagcccaggtcagcattatttctcatccttggccgcggcggcctgtcctccggcaagcccttctgacgctgctggcgcatcatcctccagcgcttccagttccagcgccgcctcagggcccgccccacctagaccagtcgaaggccagttgtctgccagatcacgctccaacagcgcagaacgtctgctcgaagccgttgccgcaaccgccgccgaggagccccctgaggctgcacccggacgagctagggcagtcgagaatcagtatagcttctattag

SEQ ID NO: 206827 - DNA, 2016 bp, Artificial Sequence
  derived and/or modified sequence
atggatccaagctactgtccagcccatgggtttccaagtcaggacgcgttatggccgctcagcagtcaacagtggagcagcgcccactactctgaacccgcagcaggaggctgcgatggaacggaagcaatgaatggtgccggacctggcccagccgcagccgcaccagtccctgtgcccgtcccagtgccggattggcgccagttctgcgagttgcacgcccaagctgcagcggtggatttcgcccacaaattctgccggttcctacgcgacaaccccgcatacgacacccctgatgccggagcaagtttttctcgccactttgccgcaaatttcctggacgtgtttggggaggaggttcggagagtccttgtggccggaccgaccacccggggagccgcagtcagtgccgaggctatggaacccgagctggcagatacctccgctctgaaggctgccccttacgggcatagtaggagtagcgaggacgtgtccactcacgccgcaacaaaagctagagtacggaaggggttctcactccgcaatatgagtctgtgtgtggtggacggagtacgcgatatgtggcaccggagagcctcgcccgagcctgacgccgctgcggcacctaggactgctgagccacgggataagtggacgcgaaggctgagactctctaggacactggccgcaaaagtcgagctcgtggacatacagagagagggtgcgctgagattcatggtcgccgacgatgcagctgcagggagcggaggatctgctcagtggcagaagtgtcgattactgctccggcgtgccgtggctgaggagaggtttcgacttgaatttttcgtgccaccaaaggccagtagacccaaagtgtccatccccctctcagcaattatcgaggtccgaaccaccatgcctttagaaatgccagagaaagacaacacatttgtgctgaaagtcgagaatggggcagagtatattttagagaccattgactccttgcagaagcatagctgggtggccgacattcagggatgcgtggaccctggtctgtggccaggcgatcttgaaggttcctggacaaggtcatgtctgcaccctaagcgggctagcgagcactgggagttgggtagggatgggagtgagagcccaaaaggctgggggccaggagccgtggcccacatttgttggagccgaacccctgatctgaagaggcatctgagctcccacatttacctgttcgtgcccttaagcccctccccccatgtgcctcacaccgtcattcctacgtctggggagcagggggctgagaccgatccagaggcggaacccgaactggaactgagcgactacccctggtttcatggcaccctgtctagagtgaaggcagcgcaactggtcctcgcaggcggtccaaggaaccacgggctcttcgttataagacagtctgaaactcgcccaggtgaatacgtgctcacctttaattttcagggaaaagccaaggcaagccatctgaggttgtccctgaacggtcacgggcagtgccatgtacagcacttgtggttccagtccgtcctcgatatgctgcgccactttcacacgcaccctatacctttggagagcgggggaagtgccgatatcacccttagaagttacgtccgcgctcaagatccgccacccgaacctggtcccacacctccagcagcccctgccagtcctgcttgctggtcggactcacctggacaacactatttcagttctctggccgcagctgcctgccccccagcctctccctctgatgctgccggtgcaagcagctcctccgcttctagtagcagcgccgcatccggcccagcccctcctcgacccgtggaggggcaattgtcagccaggtcaagatctaattccgccgaacgactgttagaggcagtagctgcgacagccgcagaagagccaccagaagccgctccaggtcgagcaagagctgttgagaaccagtactcattctactag

SEQ ID NO: 206828 - DNA, 1899 bp, Artificial Sequence
  derived and/or modified sequence
atgaatggcgcaggaccaggtccagccgctgccgcaccagttcccgtgccagttccagtgcccgactggaggcagttctgtgagttgcacgcccaggccgcagcggtagactttgcgcacaaattttgccgattccttcgcgacaaccctgcctacgatactcctgacgcaggtgcctcattctctaggcatttcgccgcaaattttctggacgtatttggtgaggaggtcagacgagtgctcgtcgccggacccacaactcggggtgctgccgtctcagctgaagcgatggagcccgagctggccgatacaagcgcactaaaagccgctccgtatggacacagtcgtagctctgaagatgtatccacccatgccgctacaaaagccagggtgaggaagggattttccctcagaaatatgtctttatgcgtcgtcgatggcgtccgcgatatgtggcatagacgggcatctccagagcccgacgcagcagctgcaccacggacagcggagccgcgagataagtggactaggcgactgcgactctcacggacactggcagccaaagtggagctggttgacattcaaagagagggcgcactcaggtttatggttgcagatgacgccgctgccggatccggaggatccgcccagtggcaaaagtgcagactgttattaagacgcgcagtcgccgaagagcgcttcaggctggagttcttcgtgcctcccaaggcaagtaggcccaaggtttccatacccctgagcgcgattatagaagtgaggaccaccatgccgctggaaatgcccgagaaggacaatacttttgtcctcaaggtggaaaacggagccgaatacatactcgagactatagattccctccagaaacacagttgggtagccgacatccaaggttgcgtggaccctggagacagcgaagaggacacagaactgtcctgtaccaggggcggatgcctggcatctagagttgcgtcatgcagttgcgaactactgaccgacgctgtggatttgcctcgcccacccgagacaaccgctgtgggggcagtggtcacggccccacactcaaggggtcgcgatgctgtaagggaaagccttattcatgtgccgctcgaaaccttcctgcagaccctggaaagcccaggaggcagtgggagtgatagcaataatacgggcgaacagggcgctgaaaccgatccagaggcggagccggagctggagctatccgactatccttggttccatggcaccctctctagggtaaaagccgcacaattagttctagctggaggacccaggaaccacggcttgttcgtgatccgccaatccgaaactagacctggcgagtatgttttgacgttcaattttcagggaaaggcaaagcatttgcggctatctcttaacggacatggccagtgccacgtccagcacctttggtttcagtccgttttggacatgctgcgccattttcatacacatcctataccattggaaagcgggggatctgcagacattacgttgaggtcatacgtcagagcacaggaccctcccccagagccagggccaacccccccagctgctccagcttcacccgcatgttggagcgacagtccaggccagcattacttcagttctctggcagccgcagcctgcccacctgcaagcccatctgacgctgctggagcctccagctcaagcgcttctagcagcagtgcggcatctggtccggcacctcccagacccgtcgagggacagttgtcggctcgctctaggtctaattccgcagaacggcttcttgaggctgtggccgctacagcagcagaggagcctccagaagcggctccgggtcgagccagggcggtggagaaccagtacagcttctattag

SEQ ID NO: 206829 - DNA, 2061 bp, Artificial Sequence
  derived and/or modified sequence
gaggcgctctgccgccggcccctcctcacttcttcctccctggggatggatccaagctattgtcctgcccatggcttcccatctcaggacgctctctggccgctatcatcccagcagtggagttcagcccactactctgaaccagccgcaggtggctgcgatgggacggaagccatgaatggtgccggccctggccccgccgcagccgccccggtcccagtcccggtcccggtcccggactggcggcagttctgcgagctgcatgcgcaggcggccgccgtggactttgcgcacaagttctgccgtttcctgcgggacaacccagcttacgacacgcccgacgccggcgcctccttctcccgccacttcgccgccaacttcctggacgtcttcggcgaggaggtgcgccgcgtgctggtggctgggccgacgactcggggcgcggccgtgagcgcagaggccatggagccggagctcgcggacacctctgcactcaaggcggcgccctacggccactcgcggagctcggaggacgtgtccacgcacgcggccaccaaggcccgcgttcgcaagggcttctcgctgcgcaacatgagcctgtgcgtggtggacggcgtgcgcgacatgtggcaccggcgcgcctcgcccgagcccgacgcggcagctgccccgcgcaccgccgagccccgcgacaagtggacgcggcgcctgaggctgtcgcggacgctggctgccaaggtggagctggtggacattcaacgcgagggggcgctgcgcttcatggtggccgacgacgcggccgcgggctccgggggctcggctcagtggcagaagtgccgcctgctcctgcgcagggctgtggccgaggaacgcttccgcctggagttcttcgtgccgcccaaagcctccaggcccaaggtcagcatcccactgtcagccatcattgaggtccgcaccaccatgcccctggaaatgccagagaaggataacacattcgtcctcaaggtagagaatggagccgaatacatcttggagaccatcgactctctgcagaagcactcgtgggtagctgacatccagggctgcgtggaccccggactctggcctggggacctggaaggaagttggaccaggtcttgtcttcaccccaagagagcctcagagcactgggagttgggcagagatggcagtgagtccccaaagggctgggggcctggtgcagtggctcacatctgctggtctcgaactccagacctcaaacgtcacctctcttctcacatttatttatttgtccccctttctccttccccccatgttcctcacactgtcatccccacctcaggggaacagggtgcagagacggatcccgaggctgaacccgagctggagctatccgactacccatggttccacgggacactgtcccgggtcaaggctgctcaactggttctggcaggggggccccggaaccacggcctcttcgtgatccgccaaagtgagactcggcctggggagtacgtgctgaccttcaacttccagggcaaggccaaggcaagtcacctgcgcctgtccctgaacggccacggccagtgtcacgtacagcatctgtggttccagtctgtgcttgacatgctccgccacttccacacacaccccatcccactggagtcagggggctcggccgacatcacccttcgcagctatgtgcgggcccaggaccccccaccagagccgggccccacgccccctgccgcgcccgcgtccccggcctgctggagcgactcgcccggccagcactacttctccagcctcgccgcggccgcctgcccgcctgcctcgccctccgacgccgccggcgcctcctcgtcttccgcctcgtcgtcctctgccgcgtcggggcccgcccccccgcgccccgtcgagggccagctcagcgcgcggagccgcagcaacagcgccgagcgcctgctggaggccgtggccgccaccgccgccgaggagcccccggaggccgcgcccggccgcgcgcgcgccgtggagaaccagtactccttctactag

SEQ ID NO: 206830 - DNA, 2107 bp, Artificial Sequence
  derived and/or modified sequence
ggatccaagctattgtcctgcccatggcttcccatctcaggaccctctctggccgctatcatcccagcagtggagttcagcccactactctgaaccagccgcaggtggctgcgatgggacggaagccatgaatggtgccggccctggccccgccgcagccgccccggtcccagtcccggtcccggtcccggactggcggcagttctgcgagctgcatgcgcaggcggccgccgtggactttgcgcacaagttctgccgtttcctgcgggacaacccagcttacgacacgcccgacgccggcgcctccttctcccgccacttcgccgccaacttcctggacgtcttcggcgaggaggtgcgccgcgtgctggtggctgggccgacgactcggggcgcggccgtgagcgcagaggccatggagccggagctcgcggacacctctgcactcaaggcggcgccctacggccactcgcggagctcggaggacgtgtccacgcacgcggccaccaaggcccgcgttcgcaagggcttctcgctgcgcaacatgagcctgtgcgtggtggacggcgtgcgcgacatgtggcaccggcgcgcctcgcccgagcccgacgcggcagctgccccgcgcaccgccgagccccgcgacaagtggacgcggcgcctgaggctgtcgcggacgctggctgccaaggtggagctggtggacattcaacgcgagggggcgctgcgcttcatggtggccgacgacgcggccgcgggctccgggggctcggctcagtggcagaagtgccgcctgctcctgcgcagggctgtggccgaggaacgcttccgcctggagttcttcgtgccgcccaaagcctccaggcccaaggtcagcatcccactgtcagccatcattgaggtccgcaccaccatgcccctggaaatgccagagaaggataacacattcgtcctcaaggtagagaatggagccgaatacatcttggagaccatcgactctctgcagaagcactcgtgggtagctgacatccagggctgcgtggaccccggtgacagtgaggaagacaccgagctctcctgtacccgaggaggctgtctggccagccgcgtggcctcctgcagctgtgagctcctgactgatgcagtcgacctgccccgccccccagagacgacagccgtgggtgcagtggtgacagccccccacagccgaggtcgagatgccgtcagagaatccctgatccacgtcccgctagagacctttctgcagaccctggaatccccgggcggcagcggcagtgacagcaataacacaggggaacagggtgcagagacggatcccgaggctgaacccgagctggagctatccgactacccatggttccacgggacactgtcccgggtcaaggctgctcaactggttctggcaggggggccccggaaccacggcctcttcgtgatccgccaaagtgagactcggcctggggagtacgtgctgaccttcaacttccagggcaaggccaagcacctgcgcctgtccctgaacggccacggccagtgtcacgtacagcatctgtggttccagtctgtgcttgacatgctccgccacttccacacacaccccatcccactggagtcagggggctcggccgacatcacccttcgcagctatgtgcgggcccaggaccccccaccagagccgggccccacgccccctgccgcgcccgcgtccccggcctgctggagcgactcgcccggccagcactacttctccagcctcgccgcggccgcctgcccgcctgcctcgccctccgacgccgccggcgcctcctcgtcttccgcctcgtcgtcctctgccgcgtcggggcccgcccccccgcgccccgtcgagggccagctcagcgcgcggagccgcagcaacagcgccgagcgcctgctggaggccgtggccgccaccgccgccgaggagcccccggaggccgcgcccggccgcgcgcgcgccgtggagaaccagtactccttctactagcccgcggcgccgcccgggtgggacacgccaagctcttcagtgaagacacgatgttattaaaagcctgttttagggactgca

SEQ ID NO: 206831 - protein, 295 aa, Artificial Sequence
  derived and/or modified sequence
MQPEGAEKGKSFKQRLVLKSSLAKETLSEFLGTFILIVLGCGCVAQAILSRGRFGGVITINVGFSMAVAMAIYVAGGVSGGHINPAVSLAMCLFGRMKWFKLPFYVGAQFLGAFVGAATVFGIYYDGLMSFAGGKLLIVGENATAHIFATYPAPYLSLANAFADQVVATMILLIIVFAIFDSRNLGAPRGLEPIAIGLLIIVIASSLGLNSGCAMNPARDLSPRLFTALAGWGFEVFRAGNNFWWIPVVGPLVGAVIGGLIYVLVIEIHHPEPDSVFKTEQSEDKPEKYELSVIM

SEQ ID NO: 206832 - DNA, 888 bp, Artificial Sequence
  derived and/or modified sequence
atgcagcccgaaggagcagaaaaaggtaagagcttcaaacaaagactggtgctgaaatccagtctggctaaagagacgctgtccgagttcttgggcacctttattctgattgtgttgggctgtggctgcgttgcccaggccatcttatcacggggacgcttcgggggggttattaccataaacgtcggctttagtatggccgtggcaatggcaatttacgtggctggcggggtttcagggggtcatatcaacccagcggtatctttagctatgtgcctgttcgggagaatgaagtggtttaaactgccattctacgtcggtgcgcaatttcttggagcattcgtgggcgccgctaccgtattcggaatctattatgatggtctgatgtcctttgccggtgggaaattactgatagtgggtgagaatgccaccgcgcacattttcgccacatatcctgcaccgtacctgtctttagctaatgcatttgccgatcaggtggttgctactatgatcctgctcattatcgttttcgctatttttgacagtagaaacctgggggcacctcgcggcctggaacctattgctatcgggctgctcatcatagttattgcttcaagccttggtcttaacagtggctgcgccatgaacccagcccgcgatctcagcccgcggctatttactgcgctggcaggttggggcttcgaggtgttccgcgcaggcaataacttctggtggattccagtggtgggacccctcgttggtgctgtgatcggcgggcttatctacgtgttggttatcgagatccaccatcccgagcctgatagcgtcttcaaaaccgagcaaagcgaagacaaacctgagaaatatgagctgtctgtgattatgtag

SEQ ID NO: 206833 - DNA, 888 bp, Artificial Sequence
  derived and/or modified sequence
atgcaacccgaaggcgctgagaaaggtaagtcgtttaaacagaggttggtgctgaagtctagcttagccaaggagactctttcagagttcctaggaacattcatcttgatcgtgcttggctgcggatgtgtggcacaggctatcctgagtcgaggacgattcggaggggtgatcactattaacgtgggtttcagcatggctgtcgcgatggccatttatgtagccggcggcgtgagcggcggccacatcaacccagcggtgtctctagccatgtgcctgttcggaagaatgaagtggttcaaactgccattttacgtaggcgcccagtttctgggggccttcgtgggcgccgcaaccgtgtttggaatctactatgacgggctgatgagtttcgcagggggaaagctactgatcgtaggcgagaacgccactgctcatatttttgccacttaccccgctccatacctttcccttgcaaacgcgtttgccgatcaggtcgtggccactatgatcctgcttatcatagtgttcgctatcttcgactcccgaaacctgggtgcccctaggggacttgagcctatcgccataggtcttctcatcattgtcattgcctcttccctcggcctgaactccggctgcgctatgaaccccgcccgcgatctgagtcctcgcctgtttacagccctggccggatggggcttcgaggttttccgggcgggcaataacttctggtggataccagttgtgggcccgttggttggagcagtgattgggggcctcatatacgtgctggtgattgaaattcaccatccagaacccgacagcgtcttcaaaacagagcagagcgaggacaagcctgaaaaatatgagctgagcgtgataatgtag

SEQ ID NO: 206834 - DNA, 888 bp, Artificial Sequence
  derived and/or modified sequence
atgcagcctgagggcgctgagaagggcaagagcttcaagcagaggctggtgctgaagagcagcctggccaaggagaccctgtctgagttcctgggcaccttcatcctgattgtgctgggctgcggctgtgtggcccaggccatcctgagccggggccgctttggaggagtcatcaccatcaacgtgggcttctccatggctgtggccatggccatctacgtggccggcggcgtgtctgggggccacatcaacccagctgtgtccctggccatgtgcctgtttggccgcatgaagtggttcaagctgcccttctacgtgggcgcccagttcctgggcgcctttgtgggcgccgccaccgtgtttggcatctactatgatggcctgatgagctttgctgggggcaagctgctgattgtgggagaaaatgccacagcccacatctttgccacctacccagccccctacctgagcctggccaatgcctttgctgaccaggtggtggccaccatgatcctgctgatcatcgtgtttgccatctttgacagcaggaacctgggcgccccccggggcctggagcccatcgccatcggcctgctgatcatcgtgattgccagcagcctgggcctgaacagcggctgtgccatgaacccagcccgggacctgagccccaggctcttcaccgccctggccggctggggctttgaggtgttccgggccggcaacaacttctggtggatccctgtggtgggccccctggtgggcgctgtgattggaggcctcatctacgtgctggtgattgagatccaccaccctgagccagattctgtgttcaagacagagcagagcgaggacaagccagagaagtatgagctgagcgtcatcatgtag

SEQ ID NO: 206835 - DNA, 888 bp, Artificial Sequence
  derived and/or modified sequence
atgcagcccgagggcgccgagaagggcaagagcttcaagcagcggttggtgttgaagagctccttggccaaagagactctgtccgagttcctcgggacatttatccttatcgtgcttgggtgcggatgcgtggcacaggcaatccttagccggggtcgcttcggcggtgttatcaccatcaacgtgggcttttctatggctgtagcaatggccatctatgtcgctggaggcgtgtctggaggccacattaaccctgccgtgtcactcgctatgtgtctgtttgggaggatgaagtggtttaaattgcctttctacgtgggcgcccagttcctcggcgcattcgtgggcgcagcaacagtttttggtatatactatgatggcttaatgagctttgcagggggtaaattgctaattgtgggagagaacgcaaccgctcacatcttcgctacctacccggctccatatctcagtttggcaaacgcattcgcggatcaggtggtcgcaacaatgatcctccttattatcgtgtttgccatttttgatagcagaaatctcggggcacctcgagggctggagccgatagcaattgggctgctcattatagtaatcgcctctagtctgggcctaaactcaggatgtgcaatgaatccagcgcgtgatcttagccctcggctcttcactgccctggcaggctggggatttgaagtgttccgggccggtaacaatttctggtggatcccagtcgtggggccactggtgggtgccgtcattggcggactgatctacgtgctggtcattgagatccaccaccccgagccggattctgtttttaagacagaacaaagtgaagataagcctgaaaagtatgagctctccgtcattatgtag

SEQ ID NO: 206836 - DNA, 888 bp, Artificial Sequence
  derived and/or modified sequence
atgcagcccgagggcgccgagaagggcaagagcttcaagcagcggttggtcctcaaatcatccttggccaaagagacactgtccgaattcctgggaacatttatcctgatcgtcctcggctgcgggtgtgtggcccaggctatcctttcacgcgggaggttcggtggtgttattacaattaacgtaggcttttctatggcagtcgcaatggccatatacgtggctggaggcgtttccgggggacacattaacccagcagttagcttggccatgtgcctgttcgggcggatgaagtggttcaaactccctttctatgtaggtgcccagtttctcggtgctttcgtgggagcagcaactgtcttcggcatatattatgacgggctcatgtcttttgccggtggtaagctcctaattgtgggcgaaaacgccacagcccacatcttcgcaacttatcccgccccttacctgagtctcgccaacgcttttgcagaccaagtcgttgctacgatgattctgctgataatcgtattcgctatctttgactcccggaacctgggggcgccacgcggactagaacctatcgctattggactcctgatcatcgtaatcgccagcagtctcggacttaacagcgggtgcgccatgaacccagcacgagatctcagtcctaggctgtttaccgctctggccggctgggggttcgaagtgtttagggcaggcaataacttttggtggatccccgtggtcggtcctctagtcggcgcggtgattggcggactgatctacgtgcttgttattgagatccatcacccagagcctgactccgtgttcaaaaccgagcagtccgaggacaagcccgagaaatacgagctctccgttattatgtag

SEQ ID NO: 206837 - DNA, 888 bp, Artificial Sequence
  derived and/or modified sequence
atgcagccagagggtgctgagaaaggcaaatctttcaagcagagactcgtcttgaaaagctctctggcaaaagaaacattgagtgaatttctggggactttcatactcatcgtactcgggtgtggctgtgtggcacaggccattctgagtagaggcaggtttggaggtgttattaccataaacgtaggcttttcaatggcagtcgcaatggccatctatgtggccggtggagtgagcgggggtcacataaatcccgcagtgagccttgcaatgtgtctgttcggccgaatgaagtggttcaagctgcccttctacgtgggcgcacagttcctcggcgcatttgtgggggcagcaactgtgttcggaatttactatgatggtctgatgagctttgcaggtggcaagctgctaatagtgggcgagaatgcaactgcccatatctttgcgacctatccagcaccctatctgtccctggctaacgctttcgcagaccaggtcgtagccaccatgatcctactgatcatcgtgtttgccatttttgatagtagaaatctaggcgcaccacgaggcttagagccaatcgcgattggactcctcataatcgtcatcgcctcttctcttggactcaacagcggatgcgcaatgaatccagccagggacctcagcccacgcctattcacagcactggctggatggggcttcgaagtttttagagccggaaacaacttctggtggatcccggtggtgggaccccttgtgggggctgtaattggaggtttgatttacgtgctcgtgattgaaatccatcatcccgagcctgacagtgtgtttaagacagagcagtctgaggacaagcctgaaaagtacgagctgtcggtgatcatgtag

SEQ ID NO: 206838 - DNA, 888 bp, Artificial Sequence
  derived and/or modified sequence
atgcagccagagggggcagaaaagggcaagtcattcaagcagcggctggtccttaaatcaagtctagccaaggagacccttagcgaattcttaggcaccttcatcctaatagtgctcgggtgtggatgtgttgcgcaagccattctgtcacgcggtcgttttggaggagtcataactatcaacgtgggtttttcgatggccgtggccatggcaatttacgtcgctggtggcgtgtccggcggacatatcaatccagctgtgtccttggcaatgtgtctgttcggccgtatgaaatggtttaagctgcccttttacgtgggcgctcagtttcttggggcttttgttggagccgcaacggtgtttgggatttattacgacggtctgatgagcttcgccggaggcaagctgctcattgtcggagaaaatgccactgctcacattttcgccacgtatccagccccatatctatcactggcgaacgctttcgccgatcaggtcgtcgccaccatgatcctgcttatcattgtctttgctatattcgactcacggaacttgggcgctcccagaggactggaaccaattgccatagggctgctgataatcgtgatcgcttcctctctgggcttgaacagcggctgtgcaatgaacccagcacgagatctgtccccccgtttgttcacggccctcgccggatgggggtttgaggtattcagggccggtaacaacttctggtggattccagtcgtggggcctctggtcggagctgtgatcggtggtctaatttatgtgctcgtgatagaaatccaccatccagagccagattctgtcttcaagaccgaacagtccgaggacaagcccgagaagtacgaactgtctgtaatcatgtag

SEQ ID NO: 206839 - DNA, 3034 bp, Artificial Sequence
  derived and/or modified sequence
actgtgatttggcaacacaactggcacatctcttttctcatctcttgaaaaaaaccaacagagaaaaaagtaccttgagaataaaggtaatgattaatctgtcaggcacaaaagggattgttttggggatttcgggttctaagtcgcagattcaaacaaatagcagcgaacagggaatgacagttccaccagaagacgattaagccacagcctctaattggaacggcatttgtacagtcagagactcttaccagacatctccaggaatctgtgagccattgtcaaaacgtccattttcatctggctgtgaaagtgaggaccacaacaggtaggtattggtagaaacaggagtcctcagagaagccccaagatgcagcctgagggagcagaaaagggaaaaagcttcaagcagagactggtcttgaagagcagcttagcgaaagaaaccctctctgagttcttgggcacgttcatcttgattgtccttggatgtggctgtgttgcccaagctattctcagtcgaggacgttttggaggggtcatcactatcaatgttggattttcaatggcagttgcaatggccatttatgtggctggcggtgtctctggtggtcacatcaacccagctgtgtctttagcaatgtgtctctttggacggatgaaatggttcaaattgccattttatgtgggagcccagttcttgggagcctttgtgggggctgcaaccgtctttggcatttactatgatggacttatgtcctttgctggtggaaaactgctgatcgtgggagaaaatgcaacagcacacatttttgcaacatacccagctccgtatctatctctggcgaacgcatttgcagatcaagtggtggccaccatgatactcctcataatcgtctttgccatctttgactccagaaacttgggagcccccagaggcctagagcccattgccatcggcctcctgattattgtcattgcttcctccctgggactgaacagtggctgtgccatgaacccagctcgagacctgagtcccagacttttcactgccttggcaggctgggggtttgaagtcttcagagctggaaacaacttctggtggattcctgtagtgggccctttggttggtgctgtcattggaggcctcatctatgttcttgtcattgaaatccaccatccagagcctgactcagtctttaagacagaacaatctgaggacaaaccagagaaatatgaactcagtgtcatcatgtagtggcatgctcagctctggatttgcagtcagtttgggattctcttcagaaagatggcatctaagtgtctgtgttcttgtaagcctgaggtggaatccacccagttttgtctgctagccatatgggacatctaattggaaaagcatctgcataaaagtttggaaacaatgaccacttctctaccattgtcccccacccccaccccccagaataacgctgactgtcccctgaaacagccttctctcctgccctgtttatttcatcctcgatgggaattcttgctaggtaagcactaataactcggcatcttgacgatagtcccatttgggtggtttcagctgcactatctgtatgaaatggtgtcaccaaaacccttttcttcagtatcgacaaagattacattctgagtaccaaccaaaccctaaattgaaagacaaaactatggtttcagtcaacatattcatgaattagggagctaatgggttaagcttccagttcccgctatgctactggatttgtataaatactgatattctccaaacctagtggtgtagggagcaagagaatgcagctggaaggcacaaggggaggacattgtggcattcagaaactgcaggagacaagatgaatttgagaagccaaatggaatttttaatggaaaccatttatcagattaatctcttgctctcctgcattttagaggacaccaattaatttcctggtctttagtatataataacctaaaataccattgtaacctcagtcatgaaaaatacatcactctgtctttttagctcaaatgtattttcctaattgcccacttgagaacagacatttgacaagttatatcaacgactgtgcttgtccattattttacacatgccctagaagccaaaactgaaagccactggatcctggtctagctgaatcttcagagtgggaggtctccaaaaagatattaccttattgggcttaacaattcacaaggcactttcacacccattatctaatttaatcctcataatgactatgtgaggcaaatgccacattgcccatttttcagataaagaaacaaaatcttagggaagataagttgagttgtccaagagcacactgaaagttgaatgttatctaatgcattcctctacctttcagaagatcagtagctggctgacaatctttgccaaatcttccttgctagccagaagtggaattggcagcttctagaatatgtacacctctggacaaaatgttcctcaatcttaagatacaaagaccctcattgtctgggtctattcccacacttactgagtacagatgaaggaaagtggtagcaatttaatcataactttcatttgctgaaaaacattatgagaaggcctcccttcctaagccacctctggtcttgctaagtcttgatcttgcttcctgccagcaccaaacattacattcaggggatttcctctggctcagtcttttccccttgaagttctctaatagatgttacttttgacaaaagatcgcctatgagttacaagcaccaggggatgctctacatcaagggatgcaccttcagtcaaactgtcaaaaagcccagaattcccaaaggcattaggtttcccaactgctttgtgctgatatcagaacagcagaaattaaatgtgaaatgtttctgatgacttatgttctacaatctatggacatacgggatttttttttcttgctttgaagctacctggatatttcctatttgaaataaaattgttcggtcattgttg

SEQ ID NO: 206840 - DNA, 2803 bp, Artificial Sequence
  derived and/or modified sequence
ccaccagaagacgattaagccacagcctctaattggaacggcatttgtacagtcagagactcttaccagacatctccaggaatctgtgagccattgtcaaaacgtccattttcatctggctgtgaaagtgaggaccacaacaggtaggtattggtagaaacaggagtcctcagagaagccccaagatgcagcctgagggagcagaaaagggaaaaagcttcaagcagagactggtcttgaagagcagcttagcgaaagaaaccctctctgagttcttgggcacgttcatcttgattgtccttggatgtggctgtgttgcccaagctattctcagtcgaggacgttttggaggggtcatcactatcaatgttggattttcaatggcagttgcaatggccatttatgtggctggcggtgtctctggtggtcacatcaacccagctgtgtctttagcaatgtgtctctttggacggatgaaatggttcaaattgccattttatgtgggagcccagttcttgggagcctttgtgggggctgcaaccgtctttggcatttactatgatggacttatgtcctttgctggtggaaaactgctgatcgtgggagaaaatgcaacagcacacatttttgcaacatacccagctccgtatctatctctggcgaacgcatttgcagatcaagtggtggccaccatgatactcctcataatcgtctttgccatctttgactccagaaacttgggagcccccagaggcctagagcccattgccatcggcctcctgattattgtcattgcttcctccctgggactgaacagtggctgtgccatgaacccagctcgagacctgagtcccagacttttcactgccttggcaggctgggggtttgaagtcttcagagctggaaacaacttctggtggattcctgtagtgggccctttggttggtgctgtcattggaggcctcatctatgttcttgtcattgaaatccaccatccagagcctgactcagtctttaagacagaacaatctgaggacaaaccagagaaatatgaactcagtgtcatcatgtagtggcatgctcagctctggatttgcagtcagtttgggattctcttcagaaagatggcatctaagtgtctgtgttcttgtaagcctgaggtggaatccacccagttttgtctgctagccatatgggacatctaattggaaaagcatctgcataaaagtttggaaacaatgaccacttctctaccattgtcccccacccccaccccccagaataacgctgactgtcccctgaaacagccttctctcctgccctgtttatttcatcctcgatgggaattcttgctaggtaagcactaataactcggcatgaaatggtgtcaccaaaacccttttcttcagtatcgacaaagattacattctgagtaccaaccaaaccctaaattgaaagacaaaactatggtttcagtcaacatattcatgaattagggagctaatgggttaagcttccagttcccgctatgctactggatttgtataaatactgatattctccaaacctagtggtgtagggagcaagagaatgcagctggaaggcacaaggggaggacattgtggcattcagaaactgcaggagacaagatgaatttgagaagccaaatggaatttttaatggaaaccatttatcagattaatctcttgctctcctgcattttagaggacaccaattaatttcctggtctttagtatataataacctaaaataccattgtaacctcagtcatgaaaaatacatcactctgtctttttagctcaaatgtattttcctaattgcccacttgagaacagacatttgacaagttatatcaacgactgtgcttgtccattattttacacatgccctagaagccaaaactgaaagccactggatcctggtctagctgaatcttcagagtgggaggtctccaaaaagatattaccttattgggcttaacaattcacaaggcactttcacacccattatctaatttaatcctcataatgactatgtgaggcaaatgccacattgcccatttttcagataaagaaacaaaatcttagggaagataagttgagttgtccaagagcacactgaaagttgaatgttatctaatgcattcctctacctttcagaagatcagtagctggctgacaatctttgccaaatcttccttgctagccagaagtggaattggcagcttctagaatatgtacacctctggacaaaatgttcctcaatcttaagatacaaagaccctcattgtctgggtctattcccacacttactgagtacagatgaaggaaagtggtagcaatttaatcataactttcatttgctgaaaaacattatgagaaggcctcccttcctaagccacctctggtcttgctaagtcttgatcttgcttcctgccagcaccaaacattacattcaggggatttcctctggctcagtcttttccccttgaagttctctaatagatgttacttttgacaaaagatcgcctatgagttacaagcaccaggggatgctctacatcaagggatgcaccttcagtcaaactgtcaaaaagcccagaattcccaaaggcattaggtttcccaactgctttgtgctgatatcagaacagcagaaattaaatgtgaaatgtttctgatgacttatgttctacaatctatggacatacgggatttttttttcttgctttgaagctacctggatatttcctatttgaaataaaattgttcggtcattgttg

SEQ ID NO: 206841 - DNA, 888 bp, Artificial Sequence
  derived and/or modified sequence
atgcagcccgagggcgccgagaagggcaagagcttcaagcagagactggtgctgaagagcagcctggccaaggagaccctgagcgagttcctgggcaccttcatcctgatcgtgctgggctgcggctgcgtggcccaggccatcctgagcagaggcagattcggcggcgtgatcaccatcaacgtgggcttcagcatggccgtggccatggccatctacgtggccggcggcgtgagcggcggccacatcaaccccgccgtgagcctggccatgtgcctgttcggcagaatgaagtggttcaagctgcccttctacgtgggcgcccagttcctgggcgccttcgtgggcgccgccaccgtgttcggcatctactacgacggcctgatgagcttcgccggcggcaagctgctgatcgtgggcgagaacgccaccgcccacatcttcgccacctaccccgccccctacctgagcctggccaacgccttcgccgaccaggtggtggccaccatgatcctgctgatcatcgtgttcgccatcttcgacagcagaaacctgggcgcccccagaggcctggagcccatcgccatcggcctgctgatcatcgtgatcgccagcagcctgggcctgaacagcggctgcgccatgaaccccgccagagacctgagccccagactgttcaccgccctggccggctggggcttcgaggtgttcagagccggcaacaacttctggtggatccccgtggtgggccccctggtgggcgccgtgatcggcggcctgatctacgtgctggtgatcgagatccaccaccccgagcccgacagcgtgttcaagaccgagcagagcgaggacaagcccgagaagtacgagctgagcgtgatcatgtag

SEQ ID NO: 206842 - protein, 217 aa, Artificial Sequence
  derived and/or modified sequence
MASTGLELLGMTLAVLGWLGTLVSCALPLWKVTAFIGNSIVVAQVVWEGLWMSCVVQSTGQMQCKVYDSLLALPQDLQAARALCVIALLLALLGLLVAITGAQCTTCVEDEGAKARIVLTAGVILLLAGILVLIPVCWTAHAIIQDFYNPLVAEALKRELGASLYLGWAAAALLMLGGGLLCCTCPPPQVERPRGPRLGYSIPSRSGASGLDKRDYV

SEQ ID NO: 206843 - DNA, 2050 bp, Artificial Sequence
  derived and/or modified sequence
cagattccagagagtcccaggcgggcgggagtgtgcgatactcggggagctggggcatgtttgcatcacgaaactcggctgggggagagcagaggcagctggggaggggctgcggaaggaggaggctcaggaaggcaagccgacgccccctgtgtgtgtttctgtcctgagcctgttacttttttgacccccgatccgtctcttcttcctcagcttgtcctccatcttcccctcctttacccttggttcccacatgcacagatgctacggacgcttttcctcccctgtccccactcagccgcagcatcccccgctggcccccaggcccctcatccatccgctgcccacgaacccccagccccgcaccctccccgtggctcaggtctcccctatcccggcctccctgcacttcactctgctcctcccctgcctgggccttaaaaccccgcctgcagccgagagcccgcagagtccccaggtggcactgtcagagtcgctcagtgggaacctgcgccagccggcaggagacgtggctgtcctcagcctggcagtgcgtctggagggcctgtgcgagctcagcccaggtgtgacagcggggtggtaagagcagcagcaccctcagggcatccgatgggcggaggcccctcgaggtgacacccaccactcagccgagcgggactacgagtctgctttgtgctccgcgaggaccagaaacacctgcaagaggcacggagaggaggcgcctttcaagaggcgcctttcatggaactgaggactggcctggcttggggacaccaacaagccttccccctcctgctggacacagagacacccacccagcacaccagacacaccctctgagtcacctaggccgcctggggctgagaagacctaaccgaggggccagatggcttcgaccggcttagaactgctgggcatgaccctggctgtgctgggctggctggggaccctggtgtcctgcgccctgcccctgtggaaggtgaccgccttcatcggcaacagcatcgtggtggcccaggtggtgtgggagggcctgtggatgtcctgcgtggtgcagagcacgggccagatgcagtgcaaggtgtacgactcactgctggctctgccgcaggacctgcaggccgcacgtgccctctgtgtcattgccctcctgctggccctgcttggcctcctggtggccatcacaggtgcccagtgtaccacgtgtgtggaggacgaaggtgccaaggcccgtatcgtgctcaccgcgggggtcatcctcctcctcgccggcatcctggtgctcatccctgtgtgctggacggcgcacgccatcatccaggacttctacaaccccctggtggctgaggccctcaagcgggagctgggggcctccctctacctgggctgggcggcggctgcactgcttatgctgggcggggggctcctctgctgcacgtgccccccgccccaggtcgagcggccccgcggacctcggctgggctactccatcccctcccgctcgggtgcatctggactggacaagagggactacgtgtgaggcggaggtttcccctgggagcccactgctccccactgccccgccctttcgaccttggcctgatgaccagatgccctgctccatcacaacctccttccccaggaaaacccactttccaaaagcccaagctacacctggctgcagggctgggtcagctggcctggctgagctcttctcagtggggtcccctttgatgttctcccccaagttgggcagcctagaggtgttgggaaccctggcctgcccccacctccccagtaattgtttccttccgttgcccaggacactggctggccttccttctcttctgagccctcccctgccccaggaaccctggcctcaccaaaacagcagcagctcgttggctccaaaaccagggagcagaccatgccctcccaaccctggagttgtcagggagggcctgcccatcacctccctctccccaacatccccaccctcgagttggaaataaagagcatttgtaactgg

SEQ ID NO: 206844 - DNA, 654 bp, Artificial Sequence
  derived and/or modified sequence
atggccagcaccggcctggagctgctgggcatgaccctggccgtgctgggctggctgggcaccctggtgagctgcgccctgcccctgtggaaggtgaccgccttcatcggcaacagcatcgtggtggcccaggtggtgtgggagggcctgtggatgagctgcgtggtgcagagcaccggccagatgcagtgcaaggtgtacgacagcctgctggccctgccccaggacctgcaggccgccagagccctgtgcgtgatcgccctgctgctggccctgctgggcctgctggtggccatcaccggcgcccagtgcaccacctgcgtggaggacgagggcgccaaggccagaatcgtgctgaccgccggcgtgatcctgctgctggccggcatcctggtgctgatccccgtgtgctggaccgcccacgccatcatccaggacttctacaaccccctggtggccgaggccctgaagagagagctgggcgccagcctgtacctgggctgggccgccgccgccctgctgatgctgggcggcggcctgctgtgctgcacctgcccccccccccaggtggagagacccagaggccccagactgggctacagcatccccagcagaagcggcgccagcggcctggacaagagagactacgtgtag

SEQ ID NO: 206845 - DNA, 654 bp, Artificial Sequence
  derived and/or modified sequence
atggcttcgactggtctggagctgttgggtatgactttggccgtgctcggatggctcggcacattagtgtcatgtgcactgcctttatggaaagtgactgctttcattggtaactccatcgttgtggcacaggttgtttgggaaggtctgtggatgtcctgcgttgtgcagtctactgggcagatgcaatgcaaagtttacgacagtctgttggctctccctcaggacctgcaagccgcacgtgcattatgtgttattgcactgttactcgccctgctgggattgctagtggctatcaccggagcacaatgtactacctgtgtggaggatgagggggctaaggcgcgcattgttctcacggctggggtcattttattgctggctggaatactggtgcttatccccgtgtgttggaccgctcatgccatcatacaggatttctacaacccgctcgtcgctgaggcgttaaagagggagctgggagccagcttgtacctcgggtgggccgccgccgcactgctcatgctcggtggggggctactgtgttgcacctgtccaccaccccaagtcgaacgacctcgcggaccaagactcggttatagcattccaagcaggtccggggcctcaggtctcgacaagcgggactacgtatag

SEQ ID NO: 206846 - DNA, 654 bp, Artificial Sequence
  derived and/or modified sequence
atggccagcacaggcctggagctgctgggcatgaccctggccgtgctgggctggctgggcaccctggtgtcctgtgccctgcccctgtggaaggtgacagccttcatcggcaacagcatcgtggtggcccaggtggtgtgggagggcctgtggatgagctgtgtggtgcagagcacaggccagatgcagtgcaaggtgtatgacagcctgctggccctgccccaggacctgcaggccgcccgggccctgtgtgtgattgccctgctgctggccctgctgggcctgctggtggccatcaccggggcccagtgcaccacctgtgtggaggatgagggcgccaaggccagaattgtgctgacagctggggtcatcctgctgctggccggcatcctggtgctgatccctgtgtgctggacagcccacgccatcatccaggacttctacaaccccctggtggccgaggccctgaagcgggagctgggcgccagcctgtacctgggctgggccgctgctgccctgctgatgctgggcggcggcctgctgtgctgcacctgccccccaccccaggtggagcggccccggggcccccggctgggctacagcatccccagccgcagcggggccagcggcctggacaagagggactatgtgtag

SEQ ID NO: 206847 - DNA, 654 bp, Artificial Sequence
  derived and/or modified sequence
atggccagcaccggcctggagctgctgggcatgaccctggccgtgctgggctggctgggcactctggtgtcttgtgcactgccgctctggaaggtcaccgcatttattgggaactccatcgttgttgcacaggtcgtgtgggagggcctgtggatgtcatgcgtagtacagagtacagggcagatgcagtgcaaagtatacgacagtttactggccttgcctcaggacttacaggccgccagagccctctgcgtgatagccttgttgttggctctgctgggtttactggtggcgattactggcgcccagtgtaccacatgtgtggaagacgagggggctaaagcacgtatagtgttgaccgccggagttatcctgctcttagccggaatcctggtcctcataccagtatgttggacagcacacgcgattatacaggacttttacaacccactcgtcgccgaagccctcaagagggagctgggtgcctctctttacttagggtgggcagccgccgctctgttgatgttaggaggtggcctcctgtgttgtacctgccctccgccgcaagtagaaagaccaagaggtccacgcttggggtattccataccttcaagaagcggagcatctggccttgataaaagggactacgtttag

SEQ ID NO: 206848 - DNA, 654 bp, Artificial Sequence
  derived and/or modified sequence
atggcatccactggcctagagctgctcggaatgaccctggccgttttagggtggctcggtacactggtaagttgcgccctgcctctgtggaaagtgacagcatttattggcaactcaatcgtcgtagcccaggtagtgtgggagggactttggatgtcatgcgtggtgcagagcacagggcaaatgcaatgcaaggtttacgacagcctgctagccttgccccaagacttgcaagcagcaagagccctttgcgtcatcgctctcttactcgctttactgggccttctggtggctattacaggagcccagtgtaccacatgcgtcgaggacgagggcgctaaggcaagaattgtcctgaccgctggcgtgatactgttactcgccggtattcttgtcttgatccccgtctgctggacagcccatgcgattatccaggacttctataatccacttgtcgccgaggccctaaaacgcgagctgggggcttcactgtatctcggatgggccgctgctgccttactcatgttaggcggaggtctgctgtgctgcacctgtcctccaccacaggttgagaggcccaggggcccacgcctgggatacagcattcctagccgttctggcgcatctggattggataagagagactacgtttag

SEQ ID NO: 206849 - protein, 4377 aa, Artificial Sequence
  derived and/or modified sequence
MAHAASQLKKNRDLEINAEEEPEKKRKHRKRSRDRKKKSDANASYLRAARAGHLEKALDYIKNGVDINICNQNGLNALHLASKEGHVEVVSELLQREANVDAATKKGNTALHIASLAGQAEVVKVLVTNGANVNAQSQNGFTPLYMAAQENHLEVVKFLLDNGASQSLATEDGFTPLAVALQQGHDQVVSLLLENDTKGKVRLPALHIAARKDDTKAAALLLQNDNNADVESKSGFTPLHIAAHYGNINVATLLLNRAAAVDFTARNDITPLHVASKRGNANMVKLLLDRGAKIDAKTRDGLTPLHCGARSGHEQVVEMLLDRAAPILSKTKNGLSPLHMATQGDHLNCVQLLLQHNVPVDDVTNDYLTALHVAAHCGHYKVAKVLLDKKANPNAKALNGFTPLHIACKKNRIKVMELLLKHGASIQAVTESGLTPIHVAAFMGHVNIVSQLMHHGASPNTTNVRGETALHMAARSGQAEVVRYLVQDGAQVEAKAKDDQTPLHISARLGKADIVQQLLQQGASPNAATTSGYTPLHLSAREGHEDVAAFLLDHGASLSITTKKGFTPLHVAAKYGKLEVANLLLQKSASPDAAGKSGLTPLHVAAHYDNQKVALLLLDQGASPHAAAKNGYTPLHIAAKKNQMDIATTLLEYGADANAVTRQGIASVHLAAQEGHVDMVSLLLGRNANVNLSNKSGLTPLHLAAQEDRVNVAEVLVNQGAHVDAQTKMGYTPLHVGCHYGNIKIVNFLLQHSAKVNAKTKNGYTPLHQAAQQGHTHIINVLLQNNASPNELTVNGNTALGIARRLGYISVVDTLKIVTEETMTTTTVTEKHKMNVPETMNEVLDMSDDEVRKANAPEMLSDGEYISDVEEGEDAMTGDTDKYLGPQDLKELGDDSLPAEGYMGFSLGARSASLRSFSSDRSYTLNRSSYARDSMMIEELLVPSKEQHLTFTREFDSDSLRHYSWAADTLDNVNLVSSPIHSGFLVSFMVDARGGSMRGSRHHGMRIIIPPRKCTAPTRITCRLVKRHKLANPPPMVEGEGLASRLVEMGPAGAQFLGPVIVEIPHFGSMRGKERELIVLRSENGETWKEHQFDSKNEDLTELLNGMDEELDSPEELGKKRICRIITKDFPQYFAVVSRIKQESNQIGPEGGILSSTTVPLVQASFPEGALTKRIRVGLQAQPVPDEIVKKILGNKATFSPIVTVEPRRRKFHKPITMTIPVPPPSGEGVSNGYKGDTTPNLRLLCSITGGTSPAQWEDITGTTPLTFIKDCVSFTTNVSARFWLADCHQVLETVGLATQLYRELICVPYMAKFVVFAKMNDPVESSLRCFCMTDDKVDKTLEQQENFEEVARSKDIEVLEGKPIYVDCYGNLAPLTKGGQQLVFNFYSFKENRLPFSIKIRDTSQEPCGRLSFLKEPKTTKGLPQTAVCNLNITLPAHKKETESDQDDEIEKTDRRQSFASLALRKRYSYLTEPGMIERSTGATRSLPTTYSYKPFFSTRPYQSWTTAPITVPGPAKSGFTSLSSSSSNTPSASPLKSIWSVSTPSPIKSTLGASTTSSVKSISDVASPIRSFRTMSSPIKTVVSQSPYNIQVSSGTLARAPAVTEATPLKGLASNSTFSSRTSPVTTAGSLLERSSITMTPPASPKSNINMYSSSLPFKSIITSAAPLISSPLKSVVSPVKSAVDVISSAKITMASSLSSPVKQMPGHAEVALVNGSISPLKYPSSSTLINGCKATATLQEKISSATNSVSSVVSAATDTVEKVFSTTTAMPFSPLRSYVSAAPSAFQSLRTPSASALYTSLGSSISATTSSVTSSIITVPVYSVVNVLPEPALKKLPDSNSFTKSAAALLSPIKTLTTETHPQPHFSRTSSPVKSSLFLAPSALKLSTPSSLSSSQEILKDVAEMKEDLMRMTAILQTDVPEEKPFQPELPKEGRIDDEEPFKIVEKVKEDLVKVSEILKKDVCVDNKGSPKSPKSDKGHSPEDDWIEFSSEEIREARQQAAASQSPSLPERVQVKAKAASEKDYNLTKVIDYLTNDIGSSSLTNLKYKFEDAKKDGEERQKRVLKPAIALQEHKLKMPPASMRTSTSEKELCKMADSFFGTDTILESPDDFSQHDQDKSPLSDSGFETRSEKTPSAPQSAESTGPKPLFHEVPIPPVITETRTEVVHVIRSYDPSAGDVPQTQPEEPVSPKPSPTFMELEPKPTTSSIKEKVKAFQMKASSEEDDHNRVLSKGMRVKEETHITTTTRMVYHSPPGGEGASERIEETMSVHDIMKAFQSGRDPSKELAGLFEHKSAVSPDVHKSAAETSAQHAEKDNQMKPKLERIIEVHIEKGNQAEPTEVIIRETKKHPEKEMYVYQKDLSRGDINLKDFLPEKHDAFPCSEEQGQQEEEELTAEESLPSYLESSRVNTPVSQEEDSRPSSAQLISDDSYKTLKLLSQHSIEYHDDELSELRGESYRFAEKMLLSEKLDVSHSDTEESVTDHAGPPSSELQGSDKRSREKIATAPKKEILSKIYKDVSENGVGKVSKDEHFDKVTVLHYSGNVSSPKHAMWMRFTEDRLDRGREKLIYEDRVDRTVKEAEEKLTEVSQFFRDKTEKLNDELQSPEKKARPKNGKEYSSQSPTSSSPEKVLLTELLASNDEWVKARQHGPDGQGFPKAEEKAPSLPSSPEKMVLSQQTEDSKSTVEAKGSISQSKAPDGPQSGFQLKQSKLSSIRLKFEQGTHAKSKDMSQEDRKSDGQSRIPVKKIQESKLPVYQVFAREKQQKAIDLPDESVSVQKDFMVLKTKDEHAQSNEIVVNDSGSDNVKKQRTEMSSKAMPDSFSEQQAKDLACHITSDLATRGPWDKKVFRTWESSGATNNKSQKEKLSHVLVHDVRENHIGHPESKSVDQKNEFMSVTERERKLLTNGSLSEIKEMTVKSPSKKVLYREYVVKEGDHPGGLLDQPSRRSESSAVSHIPVRVADERRMLSSNIPDGFCEQSAFPKHELSQKLSQSSMSKETVETQHFNSIEDEKVTYSEISKVSKHQSYVGLCPPLEETETSPTKSPDSLEFSPGKESPSSDVFDHSPIDGLEKLAPLAQTEGGKEIKTLPVYVSFVQVGKQYEKEIQQGGVKKIISQECKTVQETRGTFYTTRQQKQPPSPQGSPEDDTLEQVSFLDSSGKSPLTPETPSSEEVSYEFTSKTPDSLIAYIPGKPSPIPEVSEESEEEEQAKSTSLKQTTVEETAVEREMPNDVSKDSNQRPKNNRVAYIEFPPPPPLDADQIESDKKHHYLPEKEVDMIEVNLQDEHDKYQLAEPVIRVQPPSPVPPGADVSDSSDDESIYQPVPVKKYTFKLKEVDDEQKEKPKASAEKASNQKELESNGSGKDNEFGLGLDSPQNEIAQNGNNDQSITECSIATTAEFSHDTDATEIDSLDGYDLQDEDDGLTESDSKLPIQAMEIKKDIWNTEGILKPADRSFSQSKLEVIEEEGKVGPDEDKPPSKSSSSEKTPDKTDQKSGAQFFTLEGRHPDRSVFPDTYFSYKVDEEFATPFKTVATKGLDFDPWSNNRGDDEVFDSKSREDETKPFGLAVEDRSPATTPDTTPARTPTDESTPTSEPNPFPFHEGKMFEMTRSGAIDMSKRDFVEERLQFFQIGEHTSEGKSGDQGEGDKSMVTATPQPQSGDTTVETNLERNVETPTVEPNPSIPTSGECQEGTSSSGSLEKSAAATNTSKVDPKLRTPIKMGISASTMTMKKEGPGEITDKIEAVMTSCQGLENETITMISNTANSQMGVRPHEKHDFQKDNFNNNNNLDSSTIQTDNIMSNIVLTEHSAPTCTTEKDNPVKVSSGKKTGVLQGHCVRDKQKVLGEQQKTKELIGIRQKSKLPIKATSPKDTFPPNHMSNTKASKMKQVSQSEKTKALTTSSCVDVKSRIPVKNTHRDNIIAVRKACATQKQGQPEKGKAKQLPSKLPVKVRSTCVTTTTTTATTTTTTTTTTTTSCTVKVRKSQLKEVCKHSIEYFKGISGETLKLVDRLSEEEKKMQSELSDEEESTSRNTSLSETSRGGQPSVTTKSARDKKTEAAPLKSKSEKAGSEKRSSRRTGPQSPCERTDIRMAIVADHLGLSWTELARELNFSVDEINQIRVENPNSLISQSFMLLKKWVTRDGKNATTDALTSVLTKINRIDIVTLLEGPIFDYGNISGTRSFADENNVFHDPVDGWQNETSSGNLESCAQARRVTGGLLDRLDDSPDQCRDSITSYLKGEAGKFEANGSHTEITPEAKTKSYFPESQNDVGKQSTKETLKPKIHGSGHVEEPASPLAAYQKSLEETSKLIIEETKPCVPVSMKKMSRTSPADGKPRLSLHEEEGSSGSEQKQGEGFKVKTKKEIRHVEKKSHS

SEQ ID NO: 206850 - protein, 1128 aa, Artificial Sequence
  derived and/or modified sequence
MATQGDHLNCVQLLLQHNVPVDDVTNDYLTALHVAAHCGHYKVAKVLLDKKANPNAKALNGFTPLHIACKKNRIKVMELLLKHGASIQAVTESGLTPIHVAAFMGHVNIVSQLMHHGASPNTTNVRGETALHMAARSGQAEVVRYLVQDGAQVEAKAKDDQTPLHISARLGKADIVQQLLQQGASPNAATTSGYTPLHLSAREGHEDVAAFLLDHGASLSITTKKGFTPLHVAAKYGKLEVANLLLQKSASPDAAGKSGLTPLHVAAHYDNQKVALLLLDQGASPHAAAKNGYTPLHIAAKKNQMDIATTLLEYGADANAVTRQGIASVHLAAQEGHVDMVSLLLGRNANVNLSNKSGLTPLHLAAQEDRVNVAEVLVNQGAHVDAQTKMGYTPLHVGCHYGNIKIVNFLLQHSAKVNAKTKNGYTPLHQAAQQGHTHIINVLLQNNASPNELTVNGNTALGIARRLGYISVVDTLKIVTEETMTTTTVTEKHKMNVPETMNEVLDMSDDEGEDAMTGDTDKYLGPQDLKELGDDSLPAEGYMGFSLGARSASSDRSYTLNRSSYARDSMMIEELLVPSKEQHLTFTREFDSDSLRHYSWAADTLDNVNLVSSPIHSGFLVSFMVDARGGSMRGSRHHGMRIIIPPRKCTAPTRITCRLVKRHKLANPPPMVEGEGLASRLVEMGPAGAQFLGPVIVEIPHFGSMRGKERELIVLRSENGETWKEHQFDSKNEDLTELLNGMDEELDSPEELGKKRICRIITKDFPQYFAVVSRIKQESNQIGPEGGILSSTTVPLVQASFPEGALTKRIRVGLQAQPVPDEIVKKILGNKATFSPIVTVEPRRRKFHKPITMTIPVPPPSGEGVSNGYKGDTTPNLRLLCSITGGTSPAQWEDITGTTPLTFIKDCVSFTTNVSARFWLADCHQVLETVGLATQLYRELICVPYMAKFVVFAKMNDPVESSLRCFCMTDDKVDKTLEQQENFEEVARSKDIEVLEGKPIYVDCYGNLAPLTKGGQQLVFNFYSFKENRLPFSIKIRDTSQEPCGRLSFLKEPKTTKGLPQTAVCNLNITLPAHKKIEKTDRRQSFASLALRKRYSYLTEPGMSEFPNTFTNTWIFIRRDIFSIQTKF

SEQ ID NO: 206851 - protein, 1117 aa, Artificial Sequence
  derived and/or modified sequence
MATQGDHLNCVQLLLQHNVPVDDVTNDYLTALHVAAHCGHYKVAKVLLDKKANPNAKALNGFTPLHIACKKNRIKVMELLLKHGASIQAVTESGLTPIHVAAFMGHVNIVSQLMHHGASPNTTNVRGETALHMAARSGQAEVVRYLVQDGAQVEAKAKDDQTPLHISARLGKADIVQQLLQQGASPNAATTSGYTPLHLSAREGHEDVAAFLLDHGASLSITTKKGFTPLHVAAKYGKLEVANLLLQKSASPDAAGKSGLTPLHVAAHYDNQKVALLLLDQGASPHAAAKNGYTPLHIAAKKNQMDIATTLLEYGADANAVTRQGIASVHLAAQEGHVDMVSLLLGRNANDSGLTPLHLAAQEDRVNVAEVLVNQGAHVDAQTKMGYTPLHVGCHYGNIKIVNFLLQHSAKVNAKTKNGYTPLHQAAQQGHTHIINVLLQNNASPNELTVNGNTALGIARRLGYISVVDTLKIVTEETMTTTTVTEKHKMNVPETMNEVLDMSDDEGEDAMTGDTDKYLGPQDLKELGDDSLPAEGYMGFSLGARSASLRSFSSDRSYTLNRSSYARDSMMIEELLVPSKEQHLTFTREFDSDSLRHYSWAADTLDNVNLVSSPIHSGFLVSFMVDARGGSMRGSRHHGMRIIIPPRKCTAPTRITCRLVKRHKLANPPPMVEGEGLASRLVEMGPAGAQFLGPVIVEIPHFGSMRGKERELIVLRSENGETWKEHQFDSKNEDLTELLNGMDEELDSPEELGKKRICRIITKDFPQYFAVVSRIKQESNQIGPEGGILSSTTVPLVQASFPEGALTKRIRVGLQAQPVPDEIVKKILGNKATFSPIVTVEPRRRKFHKPITMTIPVPPPSGEGVSNGYKGDTTPNLRLLCSITGGTSPAQWEDITGTTPLTFIKDCVSFTTNVSARFWLADCHQVLETVGLATQLYRELICVPYMAKFVVFAKMNDPVESSLRCFCMTDDKVDKTLEQQENFEEVARSKDIEVLEGKPIYVDCYGNLAPLTKGGQQLVFNFYSFKENRLPFSIKIRDTSQEPCGRLSFLKEPKTTKGLPQTAVCNLNITLPAHKKIEKTDRRQSFASLALRKRYSYLTEPGMSEFPNTFTNLRGFS

SEQ ID NO: 206852 - protein, 931 aa, Artificial Sequence
  derived and/or modified sequence
FTLAHVPQRGETALHMAARSGQAEVVRYLVQDGAQVEAKAKDDQTPLHISARLGKADIVQQLLQQGASPNAATTSGYTPLHLSAREGHEDVAAFLLDHGASLSITTKKGFTPLHVAAKYGKLEVANLLLQKSASPDAAGKSGLTPLHVAAHYDNQKVALLLLDQGASPHAAAKNGYTPLHIAAKKNQMDIATTLLEYGADANAVTRQGIASVHLAAQEGHVDMVSLLLGRNANVNLSNKSGLTPLHLAAQEDRVNVAEVLVNQGAHVDAQTKMGYTPLHVGCHYGNIKIVNFLLQHSAKVNAKTKNGYTPLHQAAQQGHTHIINVLLQNNASPNELTVNGNTALGIARRLGYISVVDTLKIVTEETMTTTTVTEKHKMNVPETMNEVLDMSDDEGEDAMTGDTDKYLGPQDLKELGDDSLPAEGYMGFSLGARSASRSFSSDRSYTLNRSSYARDSMMIEELLVPSKEQHLTFTREFDSDSLRHYSWAADTLDNVNLVSSPIHSGYSSPLPQYDSRFLVSFMVDARGGSMRGSRHHGMRIIIPPRKCTAPTRITCRLVKRHKLANPPPMVEGEGLASRLVEMGPAGAQFLGPVIVEIPHFGSMRGKERELIVLRSENGETWKEHQFDSKNEDLTELLNGMDEELDSPEELGKKRICRIITKDFPQYFAVVSRIKQESNQIGPEGGILSSTTVPLVQASFPEGALTKRIRVGLQAQPVPDEIVKKILGNKATFSPIVTVEPRRRKFHKPITMTIPVPPPSGEGVSNGYKGDTTPNLRLLCSITGGTSPAQWEDITGTTPLTFIKDCVSFTTNVSARFWLADCHQVLETVGLATQLYRELICVPYMAKFVVFAKMNDPVESSLRCFCMTDDKVDKTLEQQENFEEVARSKDIEVPCSQKQVHFITYSRYEVLFCGLNSTHYKIPSALLILLLL

SEQ ID NO: 206853 - protein, 548 aa, Artificial Sequence
  derived and/or modified sequence
SLPESEDAMTGDTDKYLGPQDLKELGDDSLPAEGYMGFSLGARSASLRSFSSDRSYTLNRSSYARDSMMIEELLVPSKEQHLTFTREFDSDSLRHYSWAADTLDNVNLVSSPIHSGFLVSFMVDARGGSMRGSRHHGMRIIIPPRKCTAPTRITCRLVKRHKLANPPPMVEGEGLASRLVEMGPAGAQFLGPVIVEIPHFGSMRGKERELIVLRSENGETWKEHQFDSKNEDLTELLNGMDEELDSPEELGKKRICRIITKDFPQYFAVVSRIKQESNQIGPEGGILSSTTVPLVQASFPEGALTKRIRVGLQAQPVPDEIVKKILGNKATFSPIVTVEPRRRKFHKPITMTIPVPPPSGEGVSNGYKGDTTPNLRLLCSITGGTSPAQWEDITGTTPLTFIKDCVSFTTNVSARFWLADCHQVLETVGLATQLYRELICVPYMAKFVVFAKMNDPVESSLRCFCMTDDKVDKTLEQQENFEEVARSKDIEVLEGKPIYVDCYGNLAPLTKGGQQLVFNFYSFKENRLPFSIKIRDTSQNIVQLSCLL

SEQ ID NO: 206854 - DNA, 13134 bp, Artificial Sequence
  derived and/or modified sequence
atggcccatgcagcatctcagttaaaaaaaaacagggatctcgagatcaacgccgaagaggaaccggagaaaaaacgtaaacatcggaagcgcagtcgggacaggaagaagaagagcgatgccaacgcatcttacttgagagccgcacgagctgggcatctggagaaggccttagactatattaagaatggagttgacattaacatatgtaatcagaacggactgaatgccctccatctggcctcaaaagaaggtcatgtcgaggtggtatctgagttgctgcagagagaggcaaatgtggatgctgcaaccaagaaggggaatactgctctgcatatcgcctccctggctggacaggcggaagtcgttaaggtgctggtaactaacggagccaacgtgaacgcccagagtcagaacggtttcaccccactttatatggccgcccaagaaaatcacctcgaggttgtcaagtttctgctcgacaatggcgctagccagagtctggcgacagaagacggcttcactcctctcgcggtggcgctccagcaggggcatgaccaggttgtctccctgcttcttgaaaatgacaccaaaggaaaagtacgcttacccgctctgcatatcgctgcacggaaggacgacaccaaagccgccgctcttctgcttcagaacgacaataacgccgacgtggaatctaagagtggcttcacccctcttcatatcgcggcccactatgggaacatcaatgtcgccacattattactcaacagagccgccgcagttgatttcaccgctagaaacgatattacaccgctgcatgtcgccagcaagaggggcaacgccaatatggtcaagctcctgttggatcgaggagccaagattgatgccaaaacccgggatggcctgacacctttgcattgtggggcgcgttccggacacgaacaggttgtggaaatgctgctggaccgcgctgcaccaattctgtcaaaaaccaaaaatggtctctcccctttacacatggcaactcagggagatcacctaaactgcgtgcaactgctgctgcagcacaacgtgcctgtcgacgacgtgacgaacgactacctcactgcgttgcacgttgccgctcattgcggtcattataaggtggccaaggtgctactggataagaaagcaaacccaaatgctaaggccttaaatggattcaccccgcttcacatcgcctgcaagaaaaatcggatcaaggtaatggagttgctactgaagcatggtgcatccatccaagctgtgacggagagcggccttacaccgattcacgtcgcagccttcatgggccacgtgaacatagtgtcacagctaatgcaccatggtgcgagcccaaacacgaccaatgtgaggggggaaaccgcgctacacatggctgcaagaagcggacaagcagaggtggtgcgctatctcgttcaagatggagctcaggtggaggccaaagcaaaagacgaccagactccacttcatatatccgctcggttgggcaaggccgatattgttcaacaactactacaacaaggagcaagccctaacgccgctactacaagcggctatacacctctgcacctctctgccagagaggggcatgaagatgtggcagcttttctgttggatcacggcgccagcctttcgataaccaccaagaaggggtttaccccattgcatgtggcagctaaatatggcaagctcgaggtggccaatctgctcctgcagaaatcggccagccccgatgccgccggtaaaagcgggctcacaccgttgcacgttgcggcccattacgacaatcaaaaggtggcactcctgctccttgaccagggcgctagccctcacgccgcggcgaagaacgggtacacccccctacacatcgctgcaaaaaagaatcagatggatattgccaccactctcctcgagtatggcgccgacgcaaatgccgtaacgaggcagggaatagcctcagtgcatctggctgcccaggagggtcacgtggatatggtaagcctgctgttagggcgtaacgcaaacgttaacctgtccaataagtctggattaactccactgcacctcgcagctcaagaggatagagtgaatgtagccgaagttctggtaaaccaaggcgcccatgtcgacgcccagaccaagatgggctatacacccctgcacgtgggctgccattacggcaacataaagatcgttaactttcttttgcagcattcagcgaaagtcaacgccaagacaaagaatggttacactcctctgcaccaggcagctcaacaggggcatacacatattatcaatgtgctgttacaaaacaacgctagtcccaacgagcttacagtgaatggcaacacagcgctggggatcgccaggcgtctgggctacattagcgtggtcgatacgctcaagattgtgaccgaggaaacaatgaccacaaccacagtaactgaaaagcacaagatgaatgtgccagaaaccatgaatgaggtcctggatatgtccgatgacgaggtccggaaggcaaatgcccctgaaatgctatcagatggcgaatatatatcagacgttgaggagggcgaagacgccatgacaggggacaccgataagtacctgggacctcaggacctgaaggagctgggggatgactcgttgcctgcagaaggttatatggggttttccctgggggcccgatctgcctctctgcgctcattctcaagcgacaggtcctacacattgaataggagttcttacgctagagactctatgatgatagaagaactgctggtgccaagcaaggagcaacacttgactttcaccagggagttcgacagcgattcgctaagacactatagctgggctgccgacaccctcgacaatgtgaatctcgtaagctcacctattcacagcgggtttttggtgagtttcatggtagacgcacggggtggcagcatgagggggtctcggcaccatggtatgcggattattattccacctcggaaatgtaccgcccccactaggattacctgtaggctggtgaaacggcataaactggccaaccctcctcccatggttgagggagagggactggcaagtcgactagtggagatgggcccagcgggagctcagttcctcggtcccgtgatcgttgaaatcccgcactttggctccatgaggggtaaagagcgtgagctcattgtccttcggagtgagaatggcgaaacttggaaagaacatcaatttgatagcaagaacgaggatttgaccgagcttctgaatggaatggatgaagagctcgatagtcctgaagaattggggaaaaagagaatctgcaggattatcaccaaggatttcccgcaatattttgccgttgtaagtcggattaagcaagagtcaaaccagattgggcccgaaggaggaattctttccagtacaaccgttcccctggtccaggctagcttccccgaaggcgccctaactaagcgcatacgggtaggcctccaggcccagccagtccctgatgaaattgttaagaagatcctcggaaacaaagccacatttagccctattgtaaccgtcgagccccgccgccgcaagttccacaaaccaattactatgacgataccagttccgccaccatctggggaaggcgttagtaacggttacaaaggagacacgacgccgaacttgaggctgctgtgcagcataaccgggggaacatcccctgcacagtgggaagatattacaggcaccacgcccctgacctttatcaaagattgtgttagcttcaccaccaatgtttctgcgagattttggctggccgactgccaccaggtgttggagacagtgggattagccacacagctttatagagagttgatttgcgtcccttatatggctaaattcgtggtgttcgcgaagatgaacgacccggttgaatcatctctaagatgcttctgcatgacagatgataaggtcgataaaacactggagcaacaagagaacttcgaggaagttgctaggtcaaaggacatagaggttctggaagggaaacccatctatgtggactgctatgggaacctggccccactgacaaagggaggacagcagctcgtgtttaacttctattcttttaaagagaaccgcctcccattctccatcaaaatccgcgacacctcccaagagccttgcggtcgcctgtcctttttgaaagaacctaaaacaactaagggtttgccccaaactgccgtgtgcaacctaaacattaccttacctgctcacaagaaggagacggagagcgatcaagatgacgagatcgagaaaactgatcgaagacaatcctttgcgagccttgccttaagaaagcggtacagctacctgacagaaccaggtatgatagagaggtcgacaggcgccacacgttccttgccgacaacctattcctataagcccttcttctctaccaggccttaccagagttggaccacagcgcctatcacagttcccggaccggctaagagcggttttacctcactctcttcctcttctagtaatactcctagcgcgagccctctgaagagcatctggtcagtgagcaccccatcgcccattaagagcactttgggtgccagtaccacgtcgagcgtgaaaagtatttcagatgtggcttccccgatccggtccttcagaaccatgagttcaccaattaagaccgtggtttcacagagcccctacaatattcaggtgtcatctgggacactggcgcgcgctcctgccgtgaccgaagctacccccctaaaggggttagcctccaactccacctttagctctcgcaccagcccagttactacagccggcagcctcctggaaagatcctccattaccatgacaccaccagcttctcccaagagtaacatcaacatgtattcctccagtctcccgtttaaatcaatcataacttctgccgcccctctgatttctagtcctctgaagagcgtggtgtctcccgtgaagagcgccgtcgatgtgattagtagcgctaagattacaatggcaagtagtctttcgagcccggtgaaacagatgccaggccacgctgaggtcgccctggtgaacggatccatcagccctctcaagtacccatcatcctccaccctcattaatggctgcaaggccactgcaactctgcaggagaaaatttcgagcgccacaaattcagtcagctccgtggtatccgcagcgacagacaccgtggagaaggttttttccacaaccacggcgatgcctttctcacccctccgctcctatgtgtcggccgcgccctccgctttccagtctctccgtacaccctccgctagcgccctgtatacgtccctgggatccagtatctcagctaccacatcaagtgtgaccagttctattataaccgtccccgtttactccgtggtgaacgtgctgccagagccagcacttaagaaactgcccgactccaactcattcaccaagagcgccgccgcgcttctgagccccatcaagacactcaccacagaaacacaccctcaacctcacttcagtcggacatcttctccagtgaagagtagcctttttctcgcaccctccgctctgaagttgagcaccccctcctcattatcctcctcacaagagatcctgaaggacgtggccgaaatgaaagaggacctgatgcggatgacagctatcctacagacagacgtgccggaggagaagcctttccaacccgaattacccaaggagggtaggattgacgatgaagaaccctttaaaattgtcgagaaagttaaggaagatcttgtgaaggtgagcgaaatccttaagaaggacgtgtgtgttgataataagggcagccccaagagtcctaagtctgataagggccattcaccagaagacgactggatcgaatttagctctgaggaaatcagggaggctagacagcaggcggccgccagccagagtcctagcttgcccgaaagggttcaggtgaaagcaaaggccgcaagcgaaaaggattacaaccttaccaaagtgattgactacctgactaatgatatcggcagctctagcctgacaaatctcaagtacaaattcgaggacgcaaagaaggacggcgaggaacggcagaagagagtgctgaagcctgcaatcgccctccaggagcacaagctcaagatgccccccgctagtatgcggacttctaccagcgaaaaggaactctgtaaaatggctgacagcttcttcgggactgacacgattcttgaatcccctgacgatttctctcagcatgaccaggacaagtctccgctttcggactccggctttgagacccgatcagaaaagacacccagtgcgccccagtccgctgagtcgaccgggccaaagccattgttccacgaggtccctatcccacccgtgatcacggagacaaggactgaggtcgtgcatgttattcgaagctacgacccatctgccggtgacgttcctcaaactcaacccgaggagccagtgagccccaaaccgtcaccgacttttatggaacttgagcccaagcccaccaccagctcgatcaaggaaaaggttaaggcatttcagatgaaggcatcttccgaggaggatgaccacaaccgggtcctaagtaagggcatgagagtaaaggaggagactcacattacaaccacaaccaggatggtctatcactcacccccaggcggagagggtgcatctgagagaatagaagagaccatgtccgtccatgatatcatgaaggcctttcaaagcggccgagacccaagcaaggagctggccggcttgtttgaacataagagcgccgtgtccccagacgtacacaagtccgccgctgaaacttccgctcagcacgccgaaaaggataaccagatgaaacccaaattagagcgaattattgaggtccacatcgagaaaggtaatcaggctgaacctactgaggtcataattcgggaaacgaagaagcatcccgaaaaagaaatgtacgtctaccagaaagacttgtctagaggagacattaacttgaaggatttcctgcccgagaagcacgacgccttcccctgttcagaagaacagggtcagcaggaggaagaagaactcaccgccgaagaatcgctcccctcctacctggaatctagccgcgtgaacacaccggtcagccaagaggaagatagtcggccatcgtcagcgcagctcatcagcgacgactcttacaagacactgaagctgctgtcgcagcactccatcgaataccacgacgacgaactctccgagctgcgaggcgaaagctatcggttcgcggagaagatgctgctgtctgagaaactcgacgtgagtcactctgacaccgaagagtctgtcacggaccacgccggaccaccatcatctgaattgcagggctctgataaacgcagcagggaaaaaatagctacagctccaaaaaaagaaatcctgagtaaaatttacaaggatgtctcagagaatggcgtcgggaaagtctccaaagatgagcatttcgataaggtgacagtgctgcattacagtgggaatgtctcctcaccaaagcatgcgatgtggatgcggtttactgaagaccgcctggacagaggaagggagaagctaatatatgaagacagagtggatcgcacagtgaaagaggcagaagaaaagctgaccgaagtgagtcagttttttcgggacaaaaccgagaagctgaatgatgagcttcaaagtcctgagaagaaggctcgacccaagaatggcaaagagtactcttcgcagagtccgacttcctcctcccccgagaaggttctcctgacggagcttctcgcgtctaacgatgaatgggttaaagcgcgtcagcacggccctgacggccaaggcttcccgaaagcagaggagaaagccccttcgctgcccagttctccagaaaagatggtgttgtcccaacagactgaggactcaaagtcaacagtggaagcaaaggggtctatcagtcagtctaaggcaccagacggcccacagagcggttttcagctgaagcagagtaaactgtcgagcattcgtctcaagttcgagcagggaacgcatgctaagtctaaggatatgtctcaggaagataggaagagcgacggacagtccaggattcctgtcaaaaaaatccaggagtcgaagctgcctgtatatcaggttttcgcccgtgagaagcagcagaaagctatcgatctaccagatgagtcggtaagcgtgcaaaaggacttcatggttcttaagacaaaggacgagcatgcccaatctaatgaaatcgtggtcaatgacagtggatcagataacgtaaagaaacagagaacagagatgagcagtaaagccatgcccgacagcttctccgagcagcaagctaaagacttggcatgccacattacatccgatctcgccactcgtggtccttgggacaaaaaagtgttccgcacctgggagtcatcaggcgcgacgaataataagtcacagaaggagaaactcagccacgtgttggttcacgacgtcagagagaatcatatcggccaccctgagtcaaagagtgtggaccaaaaaaatgaattcatgtcagtgaccgaaagagagcgcaagctcctcacaaatggcagcctctctgagattaaagaaatgacggtcaaatctccctccaaaaaggtgttgtatcgcgaatacgtagtaaaagaaggggaccatcccggggggttactggatcaaccttctcgccggtctgagtctagcgcagtgagtcatatcccagtccgcgtggctgatgagcgcaggatgctgtcttccaatatccccgatggattttgtgagcagtctgcatttcccaagcatgagttgtctcagaagttatctcaatcaagcatgtcaaaggagacagtggagactcaacactttaatagcatcgaagatgagaaagtaacctactccgagatctccaaagtgagtaaacaccaatcttacgtcgggctttgtccgccgctggaggagacggaaacctcacctaccaaaagtccggactccttagagttctcccccggcaaagaatcaccttccagtgacgtctttgatcatagccccatcgacggtctggagaaactcgcgcccctcgctcagactgaaggcggcaaagagattaagactttaccagtctatgtctcattcgtgcaggtgggcaagcagtacgagaaggaaatacaacagggcggcgtgaaaaaaatcattagtcaggagtgcaagaccgtgcaggagacccgcgggacattttatacaacacggcaacagaagcagccccccagtccacagggatctccagaggatgacacgttagagcaggtgtccttcctagacagctctggcaagtcaccccttaccccagagaccccaagctcagaggaggtgtcctacgaatttacctccaaaacacctgacagccttatcgcttacattccgggaaaaccatctccaatacccgaggtgtctgaagagtccgaggaagaagaacaggccaagtcaacctctctgaaacaaacaacggtggaagagaccgcagtagaacgggagatgccgaacgatgtttcaaaggatagcaatcaaagacccaaaaacaatagggtggcctacatcgagttccctccccctccaccattggatgccgatcagatcgagagcgacaaaaaacaccactatctccctgagaaagaggtggacatgattgaagtcaacttgcaggatgagcacgacaagtaccagttggcggaacccgttatacgcgtacagccaccgagccccgtacctcccggagctgacgtgagcgattcatcggatgacgagtccatctaccaaccagtgccagtgaagaaatatacatttaaactgaaagaggtcgacgatgaacaaaaggagaagcctaaagccagcgccgagaaagcatcaaatcagaaagaactggaatccaacggatcgggcaaggacaatgaatttggactcggattggactccccccagaatgagatcgcacagaacggaaacaacgaccagtcaatcaccgagtgcagcatagccaccacggcggagttcagccacgacacagatgccactgagattgattctctggacggatacgatctgcaggatgaggacgatgggttaactgaatccgactccaaactgcctatacaggccatggaaatcaagaaggacatctggaatactgaaggcattctgaagccagccgaccggagttttagtcaaagcaagcttgaggttattgaagaagaaggtaaggtcggccctgacgaggacaagcctcccagcaagagcagctcctccgaaaagacgcctgacaaaacagaccagaagagcggggcacagttttttactctggaaggccgccaccctgatagatcggtctttcccgatacctatttttcttacaaggtggatgaagagtttgcaacccctttcaaaacagtcgccactaagggacttgacttcgatccctggagcaacaatagaggcgacgatgaggtcttcgatagtaagagccgggaagacgagaccaaaccatttgggctggcagtcgaggatcgctcccccgcaacaacccccgacactacacccgccaggaccccaacagatgaaagcactcctactagtgagcctaatccattcccttttcatgaggggaaaatgtttgaaatgacccgaagcggcgcaattgacatgtctaagcgagattttgttgaggaacggcttcagttctttcagataggcgagcatacttcagagggtaaatctggagatcagggcgaaggcgacaagagcatggttaccgccacccctcagccgcagtctggcgataccaccgttgaaaccaatcttgagcgcaacgtggaaactcccacagtagagcctaacccctctatccccacctctggggaatgccaggagggaacttcaagctccggatccctggagaagtctgccgctgctaccaacacatcaaaagtcgatcccaagctgcggacccccatcaagatggggatatctgctagcacaatgactatgaaaaaggaaggaccgggtgaaatcaccgataagatagaggcagtgatgactagctgccaggggctggaaaacgaaaccatcaccatgatcagcaataccgccaattctcaaatgggcgtcaggccgcatgagaaacacgacttccagaaagacaattttaataacaataataatctggactcaagcaccattcaaactgataatatcatgtccaacatagtgctcacagaacactctgctcctacctgcacaaccgaaaaagataatccagtaaaagtatcctcaggcaaaaaaacgggcgtcctacaggggcactgtgtacgggataaacagaaggtcctcggggagcaacagaagaccaaagagctgattggtattcgacagaaatcaaagttgccaatcaaagcaacttcgccaaaagatacattcccacccaatcacatgagtaacacgaaggcaagcaagatgaagcaggtctctcagagcgagaaaacgaaagccctgaccacctcatcttgcgtggatgtaaagtcacgcatccccgtcaaaaacacccaccgcgacaacattatcgccgtgcggaaggcttgtgccacccagaaacaaggccagcccgaaaagggaaaggctaagcagctgcccagtaagttgccagtaaaagttaggtccacatgtgtaacaaccacaacaactaccgctactacaacaaccacgactaccacaaccactacgacttcctgtactgtcaaggttcgcaagtctcagctgaaggaggtctgtaaacactcaatcgaatattttaaaggcatcagcggagagacactgaagcttgtcgatagactcagtgaggaggaaaagaagatgcagagtgagttgtccgacgaggaggagtccacctcacgcaatacaagtctgagcgagacatcccgtggggggcagcccagcgtgaccactaagtctgctcgtgacaaaaaaaccgaggctgcccctctgaaatccaaaagtgagaaagccggatccgaaaagcggtccagtcggaggaccgggccccagtccccctgtgagcgaactgacatcagaatggcaatcgtcgcggaccacctcggactcagttggaccgagttggctagggagttgaactttagcgtcgatgagataaatcagattcgtgttgaaaatccgaatagtctcatttctcagtcatttatgcttctgaagaaatgggtgacaagagatggtaaaaacgccacgaccgatgcacttaccagcgtgctgactaaaatcaacagaatcgacatcgtgaccctcctggaaggtcccatttttgactatggcaacattagcggcacaaggagcttcgccgacgagaataacgtatttcatgacccagtagacgggtggcaaaatgagacaagctcaggtaaccttgagagctgcgcccaggctcggcgcgtgactggaggactgctcgacaggctggatgattcccccgaccaatgcagggattccattaccagctatttgaaaggtgaagctggcaaatttgaggcaaacggatcccacacagaaattacaccagaggctaagacgaagagctactttcccgaatctcagaacgacgtcggcaaacaaagtactaaagagacgttgaagccaaagatccacgggagcggccacgttgaggaacctgcgagcccattggcagcatatcagaaatccttggaggagacgtccaaactgatcatcgaagaaaccaaaccctgcgtgcctgtatccatgaaaaaaatgagccggacctcacccgctgacggtaagcctagactgtctctccacgaagaagagggcagctctggttcagagcagaagcagggggaaggttttaaggtcaagacaaagaaagaaattagacatgttgaaaaaaaatctcacagttag

SEQ ID NO: 206855 - DNA, 13134 bp, Artificial Sequence
  derived and/or modified sequence
atggcccacgccgccagccagctgaagaagaacagagacctggagatcaatgctgaggaggagcctgagaagaagaggaagcacaggaagaggagccgggacaggaagaagaagagtgatgccaatgccagctacctgcgggccgcccgggccggccacctggagaaggccctggactacatcaagaatggagtggacatcaacatctgcaaccagaatggcctgaatgccctgcacctggccagcaaggagggccacgtggaggtggtgtctgagctgctgcagcgggaggccaacgtggatgctgccaccaagaagggcaacacagccctgcacatcgccagcctggccggccaggccgaggtggtgaaggtgctggtgaccaatggagccaacgtgaatgcccagagccagaatggcttcacccccctgtacatggccgcccaggagaaccacctggaggtggtgaagttcctgctggacaacggggccagccagagcctggccacagaagatggcttcacccccctggccgtggccctgcagcagggccatgaccaggtggtgtccctgctgctggagaatgacaccaagggcaaggtgcggctgcctgccctgcacatcgccgccaggaaggatgacaccaaggccgccgccctgctgctgcagaatgacaacaatgctgatgtggagagcaagagcggcttcacccccctgcacatcgccgcccactacggcaacatcaacgtggccaccctgctgctgaacagagctgctgctgtggacttcaccgccagaaatgacatcacccccctgcacgtggccagcaagagaggaaatgccaacatggtgaagctgctgctggacagaggagccaagattgatgccaagaccagagatggcctgacccccctgcactgtggggcccggagcggccacgagcaggtggtggagatgctgctggaccgggccgcccccatcctgagcaagaccaagaatggcctgagccccctgcacatggccacccagggcgaccacctgaactgtgtgcagctgctgctgcagcacaacgtgcctgtggatgatgtgaccaatgactacctgacagccctgcacgtggccgcccactgcggccactacaaggtggccaaggtgctgctggacaagaaggccaaccccaatgccaaggccctgaatggcttcacccccctgcacatcgcctgcaagaagaaccgcatcaaggtgatggagctgctgctgaagcacggggccagcatccaggccgtgacagagagcggcctgacccccatccacgtggccgccttcatgggccacgtgaacatcgtgtcccagctgatgcaccacggggccagccccaacaccaccaacgtgcggggggagacagccctgcacatggccgcccggagcggccaggccgaggtggtgcgctacctggtgcaggatggagcccaggtggaggccaaggccaaggatgaccagacccccctgcacatcagcgcccggctgggcaaggctgacatcgtgcagcagctgctgcagcagggcgccagccccaatgctgccaccaccagcggctacacccccctgcacctgagcgcccgggagggccatgaagatgtggccgccttcctgctggaccacggggccagcctgagcatcaccaccaagaagggcttcacccccctgcacgtggccgccaagtatggcaagctggaggtggccaacctgctgctgcagaagagcgccagcccagatgctgctgggaagagcggcctgacccccctgcacgtggccgcccactatgacaaccagaaggtggccctgctgctgctggaccagggcgccagcccccacgccgccgccaagaatggctacacccccctgcacatcgccgccaagaagaaccagatggacatcgccaccaccctgctggagtatggagcagatgccaatgctgtgacccggcagggcatcgcctctgtgcacctggccgcccaggagggccacgtggacatggtgtccctgctgctgggcagaaatgccaacgtgaacctgagcaacaagagcggcctgacccccctgcacctggccgcccaggaggacagagtgaatgtggccgaggtgctggtgaaccagggcgcccacgtggatgcccagaccaagatgggctacacccccctgcacgtgggctgccactacggcaacatcaagatcgtgaacttcctgctgcagcacagcgccaaggtgaatgccaagaccaagaatggctacacccccctgcaccaggccgcccagcagggccacacccacatcatcaacgtgctgctgcagaacaatgccagccccaatgagctgactgtgaatggaaacacagccctgggcatcgcccggcggctgggctacatctctgtggtggacaccctgaagatcgtgacagaggagaccatgaccaccaccaccgtgacagagaagcacaagatgaatgtgcctgagaccatgaatgaggtgctggacatgtctgatgatgaggtgaggaaggccaatgcccctgagatgctgagtgatggagagtacatcagtgatgtggaggagggagaagatgccatgactggagacacagacaagtacctgggcccccaggacctgaaggagctgggagatgacagcctgcctgctgagggctacatgggcttcagcctgggcgcccggagcgccagcctgcggagcttcagcagtgacaggagctacaccctgaacagaagcagctatgcccgggacagcatgatgattgaggagctgctggtgcccagcaaggagcagcacctgaccttcacccgggagtttgacagcgacagcctgcggcactacagctgggccgctgacaccctggacaacgtgaacctggtgagcagccccatccacagcggcttcctggtgtccttcatggtggatgcccggggcggctccatgaggggcagccgccaccacggcatgaggatcatcatcccccccaggaaatgtacagcccccacccgcatcacctgccgcctggtgaagaggcacaagctggccaaccccccacccatggtggagggggagggcctggccagccggctggtggagatgggccctgctggggcccagttcctgggccctgtgattgtggagatcccccacttcggctccatgaggggcaaggagcgggagctgattgtgctgcggagtgaaaatggagagacctggaaggagcaccagtttgacagcaagaatgaagacctgacagagctgctgaatggcatggatgaggagctggacagccctgaggagctgggcaagaagaggatctgccgcatcatcaccaaggacttcccccagtactttgctgtggtgagccgcatcaagcaggagagcaaccagatcggccctgagggcggcatcctgagcagcaccaccgtgcccctggtgcaggccagcttccctgagggcgccctgaccaagaggatccgggtgggcctgcaggcccagcctgtgcctgatgagatcgtgaagaagatcctgggcaacaaggccaccttcagccccatcgtgacagtggagcccaggaggaggaagttccacaagcccatcaccatgaccatccctgtgcccccacccagcggggagggcgtgtccaatggctacaagggggacaccacccccaacctgcggctgctgtgcagcatcactggaggcaccagccctgcccagtgggaggacatcaccggcaccacccccctgaccttcatcaaggactgtgtgtccttcaccaccaacgtgtctgcccgcttctggctggccgactgccaccaggtgctggagaccgtgggcctggccacccagctgtaccgggagctgatctgtgtgccctacatggccaagtttgtggtgtttgccaagatgaatgaccctgtggagagcagcctgcgctgcttctgcatgacagatgacaaggtggacaagaccctggagcagcaggagaactttgaggaggtggcccggagcaaggacatcgaggtgctggagggcaagcccatctacgtggactgctacggcaacctggcccccctgaccaagggcggccagcagctggtgttcaacttctacagcttcaaggagaaccggctgcccttcagcatcaagatccgggacaccagccaggagccctgtggccgcctgtccttcctgaaggagcccaagaccaccaagggcctgccccagacagctgtgtgcaacctgaacatcaccctgcctgcccacaagaaggagacagaaagtgaccaggatgatgaaattgagaagacagaccggcggcagagctttgccagcctggccctgaggaagcgctacagctacctgacagagcccggcatgattgaaagaagcactggagccaccaggagcctgcccaccacctacagctacaagcccttcttcagcacccggccctaccagagctggaccacagcccccatcaccgtgcccggccctgccaagagcggcttcaccagcctgagcagcagcagcagcaacaccccatctgccagccccctgaagagcatctggagcgtgtccacccccagccccatcaagagcaccctgggcgccagcaccaccagctctgtgaagagcatcagtgatgtggccagccccatccgctccttccgcaccatgagcagccccatcaagacagtggtgtcccagagcccctacaacatccaggtgagcagcggcaccctggcccgggccccagctgtgacagaggccacccccctgaagggcctggccagcaacagcaccttcagcagcaggaccagccctgtgaccacagctggcagcctgctggagaggagcagcatcaccatgaccccaccagccagccccaagagcaacatcaacatgtacagcagcagcctgcccttcaagagcatcatcaccagcgctgcccccctcatcagcagccccctgaagtctgtggtgtcccctgtgaagtctgctgtggatgtgatcagcagcgccaagatcaccatggccagcagcctgagcagccctgtgaagcagatgcctggccatgctgaggtggccctggtgaatggcagcatcagccccctgaagtaccccagcagcagcaccctcatcaatggctgcaaggccacagccaccctgcaggagaagatcagcagcgccaccaacagcgtgtcctctgtggtgtctgctgccacagacacagtggagaaggtgttcagcaccaccacagccatgcccttcagccccctgcggagctatgtgtctgctgcccccagcgccttccagagcctgcggacccccagcgccagcgccctgtacaccagcctgggcagcagcatcagcgccaccaccagctctgtgaccagcagcatcatcaccgtgcctgtgtacagcgtggtgaatgtgctgcctgagcccgccctgaagaagctgcctgacagcaacagcttcaccaagtctgctgctgccctgctgagccccatcaagaccctgaccacagagacccacccccagccccacttcagcaggaccagcagccctgtgaagagcagcctcttcctggcccccagcgccctgaagctgagcacccccagcagcctgagcagcagccaggagatcctgaaggatgtggccgagatgaaggaggacctgatgaggatgacagccatcctgcagacagatgtgcctgaggagaagcccttccagcctgagctgcccaaggagggcagaattgatgatgaggagcccttcaagatcgtggagaaggtgaaggaggacctggtgaaggtgtctgagatcctgaagaaggatgtgtgtgtggacaacaagggcagccccaagagccccaagagtgacaagggccacagcccagaagatgactggattgagttcagcagcgaggagatccgggaggcccggcagcaggccgccgccagccagagccccagcctgcctgagcgggtgcaggtgaaggccaaggccgccagcgagaaggactacaacctgaccaaggtgattgactacctgaccaatgacatcggcagcagcagcctgaccaacctgaagtacaagtttgaagatgccaagaaggatggagaggagcggcagaagagggtgctgaagccagccatcgccctgcaggagcacaagctgaagatgcccccagcctccatgaggaccagcaccagcgagaaggagctgtgcaagatggctgacagcttctttggaacagacaccatcctggagagcccagatgacttcagccagcacgaccaggacaagagccccctgagtgacagcggctttgagaccaggtctgagaagaccccatctgccccccagagcgctgagagcacaggccccaagcccctcttccacgaggtgcccatcccccctgtgatcacagagaccaggacagaggtggtgcacgtgatccgctcctatgaccccagcgctggagatgtgccccagacccagcctgaggagcctgtgagccccaagcccagccccaccttcatggagctggagcccaagcccaccaccagcagcatcaaggagaaggtgaaggccttccagatgaaggccagcagtgaagaagatgaccacaacagagtgctgagcaagggcatgagggtgaaggaggagacccacatcaccaccaccaccaggatggtgtaccacagccccccaggaggagagggcgccagcgagagaattgaggagaccatgtctgtgcatgacatcatgaaggccttccagagcggccgggaccccagcaaggagctggccggcctgtttgagcacaagtctgctgtgtccccagatgtgcacaagtctgctgctgagaccagcgcccagcacgccgagaaggacaaccagatgaagcccaagctggagcgcatcatcgaggtgcacatcgagaagggcaaccaggccgagcccacagaggtgatcatccgggagaccaagaagcaccctgagaaggagatgtatgtgtaccagaaggacctgagcagaggagacatcaacctgaaggacttcctgcctgagaagcatgatgccttcccctgcagcgaggagcagggccagcaggaggaggaggagctgacagctgaggagagcctgcccagctacctggagagcagccgggtgaacacccctgtgtcccaggaggaggacagccggcccagcagcgcccagctgatcagtgatgacagctacaagaccctgaagctgctgagccagcacagcattgagtaccatgatgatgagctgtctgagctgcggggggagagctacagatttgctgagaagatgctgctgtctgagaagctggatgtgagccacagcgacacagaggagagcgtgacagaccacgccggcccccccagcagcgagctgcagggcagtgacaagaggagccgggagaagatcgccacagcccccaagaaggagatcctgagcaagatctacaaggatgtgtctgaaaatggagtgggcaaggtgtccaaggatgagcactttgacaaggtgacagtgctgcactacagcggaaatgtgagcagccccaagcacgccatgtggatgaggttcacagaagatcggctggaccggggccgggagaagctgatctatgaggacagagtggacagaacagtgaaggaggccgaggagaagctgacagaggtgtcccagttcttccgggacaagacagagaagctgaatgatgagctgcagagccctgagaagaaggcccggcccaagaatggcaaggagtacagcagccagagccccaccagcagcagccctgagaaggtgctgctgacagagctgctggccagcaatgatgagtgggtgaaggcccggcagcacggcccagatggccagggcttccccaaggccgaggagaaggcccccagcctgcccagcagccctgagaagatggtgctgagccagcagacagaggacagcaagagcacagtggaggccaagggcagcatcagccagagcaaggccccagatggcccccagagcggcttccagctgaagcagagcaagctgagcagcatccggctgaagtttgagcagggcacccacgccaagagcaaggacatgagccaggaggacaggaagagtgatggccagagccgcatccctgtgaagaagatccaggagagcaagctgcctgtgtaccaggtgtttgcccgggagaagcagcagaaggccatcgacctgcctgatgaatctgtgtctgtgcagaaggacttcatggtgctgaagaccaaggatgaacatgcccagagcaatgaaattgtggtgaatgacagcggcagtgacaacgtgaagaagcagaggacagagatgagcagcaaggccatgccagacagcttcagcgagcagcaggccaaggacctggcctgccacatcaccagtgacctggccacccggggcccctgggacaagaaggtgttccgcacctgggagagcagcggggccaccaacaacaagagccagaaggagaagctgagccacgtgctggtgcatgatgtgcgggagaaccacatcggccaccctgagagcaagtctgtggaccagaagaatgagttcatgtctgtgacagagcgggagaggaagctgctgaccaacggcagcctgtctgagatcaaggagatgacagtgaagagccccagcaagaaggtgctgtaccgggagtatgtggtgaaggagggggaccaccctgggggcctgctggaccagcccagccgccgctctgagagcagcgctgtgagccacatccctgtgcgggtggctgatgagaggaggatgctgagcagcaacatcccagatggcttctgtgagcagagcgccttccccaagcatgagctgagccagaagctgagccagagctccatgagcaaggagaccgtggagacccagcacttcaacagcattgaagatgagaaggtgacctacagcgagatcagcaaggtgtccaagcaccagagctatgtgggcctgtgcccccccctggaggagacagagaccagccccaccaagagcccagacagcctggagttcagccctgggaaggagagccccagcagtgatgtgtttgaccacagccccattgatggcctggagaagctggcccccctggcccagacagaaggaggcaaggagatcaagaccctgcctgtgtatgtgtcctttgtgcaggtgggcaagcagtatgagaaggagatccagcagggcggcgtgaagaagatcatcagccaggagtgcaagacagtgcaggagacccggggcaccttctacaccacccggcagcagaagcagccccccagcccccagggcagcccagaagatgacaccctggagcaggtgtccttcctggacagcagcggcaagagccccctgaccccagagacccccagcagcgaggaggtgtcctatgagttcaccagcaagaccccagacagcctcatcgcctacatccctgggaagcccagccccatccctgaggtgtctgaggagagcgaggaggaggagcaggccaagagcaccagcctgaagcagaccaccgtggaggagacagctgtggagcgggagatgcccaatgatgtgtccaaggacagcaaccagaggcccaagaacaacagagtggcctacatcgagttccccccacctccacccctggatgctgaccagattgaaagtgacaagaagcaccactacctgcctgagaaggaggtggacatgattgaggtgaacctgcaggatgaacatgacaagtaccagctggccgagcccgtcatccgggtgcagccccccagccctgtgcccccaggagcagatgtgtctgacagcagtgatgatgagagcatctaccagcctgtgcctgtgaagaagtacaccttcaagctgaaggaggtggatgatgagcagaaggagaagcccaaggccagcgctgagaaggccagcaaccagaaggagctggagagcaatggaagtggcaaggacaatgaatttggcctgggcctggacagcccccagaatgagatcgcccagaatggaaataatgaccagagcatcacagagtgcagcatcgccaccacagctgagttcagccatgacacagatgccacagaaattgacagcctggatggctatgacctgcaggatgaagatgatggcctgacagaaagtgacagcaagctgcccatccaggccatggagatcaagaaggacatctggaacacagagggcatcctgaagccagctgacaggagcttcagccagagcaagctggaggtgattgaggaggagggcaaggtgggcccagatgaggacaagccacccagcaagagcagcagcagcgagaagaccccagacaagacagaccagaagagcggggcccagttcttcaccctggagggccgccacccagacagatctgtgtttcctgacacctacttctcctacaaggtggatgaggagtttgccacccccttcaagacagtggccaccaagggcctggactttgacccctggagcaacaacagaggagatgatgaggtgtttgacagcaagagcagagaagatgagaccaagcccttcggcctggccgtggaggacaggagccctgccaccaccccagacaccaccccagcccggacccccacagatgagagcacccccaccagcgagcccaaccccttccccttccacgagggcaagatgtttgagatgaccaggtctggggccatcgacatgagcaagagggactttgtggaggagcggctgcagttcttccagatcggggagcacaccagcgagggcaagagcggggaccagggcgagggggacaagtccatggtgacagccaccccccagccccagagcggggacaccaccgtggagaccaacctggagagaaatgtggagacccccaccgtggagcccaaccccagcatccccaccagcggggagtgccaggagggcaccagcagcagcggcagcctggagaagtctgctgctgccaccaacaccagcaaggtggaccccaagctgcggacccccatcaagatgggcatcagcgccagcaccatgaccatgaagaaggagggccctggagagatcacagacaagattgaagctgtgatgaccagctgccagggcctggagaatgagaccatcaccatgatcagcaacacagccaacagccagatgggcgtgcggccccatgagaagcatgacttccagaaggacaacttcaacaacaacaacaacctggacagcagcaccatccagacagacaacatcatgagcaacatcgtgctgacagagcacagcgcccccacctgcaccacagagaaggacaaccctgtgaaggtgagcagcggcaagaagacaggagtgctgcagggccactgtgtgcgggacaagcagaaggtgctgggggagcagcagaagaccaaggagctgattggcatccggcagaagagcaagctgcccatcaaggccaccagccccaaggacaccttcccccccaaccacatgagcaacaccaaggccagcaagatgaagcaggtgtcccagagcgagaagaccaaggccctgaccaccagcagctgtgtggatgtgaagagccgcatccctgtgaagaacacccaccgggacaacatcatcgctgtgaggaaggcctgtgccacccagaagcagggccagcctgagaagggcaaggccaagcagctgcccagcaagctgcctgtgaaggtgcgcagcacctgtgtgaccaccaccaccaccacagccaccaccaccaccaccaccaccaccaccaccaccaccagctgcaccgtgaaggtgaggaagagccagctgaaggaggtgtgcaagcacagcattgagtacttcaagggcatcagcggggagaccctgaagctggtggaccggctgtctgaggaggagaagaagatgcagagcgagctgagtgatgaggaggagagcaccagcaggaacaccagcctgtctgagaccagccggggcggccagcccagcgtgaccaccaagagcgcccgggacaagaagacagaagctgcccccctgaagagcaagtctgagaaggccggcagcgagaagaggagcagcagaagaacaggcccccagagcccctgtgagaggacagacatccgcatggccatcgtggccgaccacctgggcctgtcctggacagagctggcccgggagctgaacttctctgtggatgagatcaaccagatccgggtggagaaccccaacagcctcatcagccagagcttcatgctgctgaagaagtgggtgaccagagatggcaagaatgccaccacagatgccctgacctctgtgctgaccaagatcaacagaattgacatcgtgaccctgctggagggccccatctttgattatggcaacatcagcggcaccaggagctttgctgatgaaaataatgtgttccatgaccctgtggatggctggcagaatgagaccagcagcggcaacctggagagctgtgcccaggcccggcgggtgactggaggcctgctggaccggctggatgacagcccagaccagtgccgggacagcatcaccagctacctgaagggggaggccggcaagtttgaggccaacggcagccacacagagatcaccccagaggccaagaccaagagctacttccctgagagccagaatgatgtgggcaagcagagcaccaaggagaccctgaagcccaagatccacggcagcggccacgtggaggagcccgccagccccctggccgcctaccagaagagcctggaggagaccagcaagctgatcatcgaggagaccaagccctgtgtgcctgtgtccatgaagaagatgagcaggaccagccctgcagatggcaagccccggctgagcctgcacgaggaggagggcagcagcggcagcgagcagaagcagggcgagggcttcaaggtgaagaccaagaaggagatccgccacgtggagaagaagagccacagctag

SEQ ID NO: 206856 - DNA, 13134 bp, Artificial Sequence
  derived and/or modified sequence
atggcccacgccgccagccagctgaagaagaaccgggacctggagattaatgccgaagaagagccagaaaagaaaagaaagcacagaaagaggtcaagggaccgcaaaaaaaaatccgatgctaacgcctcctacctacgggccgcccgagccgggcatttggaaaaggcccttgattatataaaaaatggggttgacatcaacatttgcaatcaaaatggcctcaacgctctacatctggcttctaaggagggacacgtggaagtagtatctgagctgctacagagggaggccaatgtcgacgccgccacaaaaaaagggaacacagctctgcatattgccagccttgctggtcaggcggaggtagtgaaagtcctggtcaccaatggtgctaatgtgaatgcccaatctcagaacggcttcacacctttgtatatggccgctcaggagaaccacctcgaggtggtgaaatttttattagataatggggcctcccagtccctcgcgactgaggacggctttacacctctggccgtggctttacaacagggacacgatcaggtagtgagtcttctgttggagaacgacactaaaggaaaagtgagactccctgctctccatatcgctgcccgcaaggatgatacaaaggctgctgccttactcctgcagaacgataacaacgccgacgtcgaaagcaaatccgggtttactcctctgcacatcgcagcgcactacggcaacattaacgtcgccacacttctgcttaatagggctgctgctgtcgatttcacggcccgtaatgatatcactccactgcatgttgcctccaaacgcggtaacgccaacatggtcaagcttctgcttgacagaggcgccaaaatcgatgccaagacacgcgatgggttgacacctctgcattgcggcgcgcggtccggtcacgaacaggtagtcgagatgctgctggaccgagctgccccaatcctctcgaagaccaagaacggactgtcacccctccatatggccactcagggcgaccaccttaactgcgtgcagcttctgctccagcataatgtgccagtggacgacgtgactaacgactatctgactgctttgcatgtggccgcccactgcggacattacaaggtcgcaaaggttcttctcgacaagaaggcgaatcctaatgctaaggctttgaacggattcacccctctccatattgcctgtaaaaagaacagaattaaagtgatggaattgttgctgaagcatggggcatcaattcaagctgtaaccgaaagcgggctgactcccatccacgtggccgcatttatgggccatgtgaatattgtctctcagctgatgcatcacggggcaagcccaaacaccacaaatgtgaggggcgagacagccttgcatatggcggctcgatctggccaggccgaggtcgttcggtatctggtgcaggatggggcccaagtggaggcgaaagccaaagacgaccaaaccccactgcacatctccgctcgccttggtaaggctgatatcgtacagcagctcctgcagcaaggagcatcacctaatgccgcgactacttctggatatacacctctgcacctctcagccagggagggacatgaagacgtggctgcattcctactggatcacggagcctcgctatcaatcaccaccaagaagggatttactccactccacgtggcagccaaatatggcaagctcgaggtcgcaaatctgctcctccagaagagtgcaagtcccgatgccgccggcaagtccggcttaactccattgcatgtcgctgcgcactacgacaaccagaaggtcgctctgctgctcctagaccaaggggcgagtccacatgccgccgctaagaacggatatacaccactacacatcgccgctaagaagaaccagatggacatcgccaccacccttctggagtacggagccgatgctaatgcagtaaccagacagggaattgcatccgtccatcttgcagcgcaggaaggacacgtggatatggtttccctgctcctcggaagaaacgctaacgttaacctgtcgaacaaatccggcctcactcccctccatctggctgcacaggaagacagagtaaatgtggcagaggtgctcgttaaccaaggagctcacgtggacgcccagaccaagatgggctataccccattgcatgtgggctgtcactacggcaacatcaagatcgtcaacttcttattgcaacattctgctaaggtgaatgcaaagacaaaaaacggatataccccactacaccaggctgcacagcaggggcacactcatatcataaacgtgctcctgcagaataacgcaagtccaaacgagttgactgttaatggcaacaccgcacttggaatcgcccggaggttgggatatattagcgtagtcgatacgctgaagattgtgaccgaggagaccatgacaactaccacagtcactgaaaaacacaagatgaacgtgcctgaaactatgaatgaggtgcttgatatgtcggatgatgaagttcgcaaggcgaacgctccagaaatgctcagtgacggcgagtatatttcggacgtcgaagaaggtgaggacgctatgacgggggacactgacaagtatctgggcccacaggatctcaaagaactgggtgatgactcgttaccggctgaagggtacatggggttttcccttggtgcgcgatcggccagccttaggtcattctcttcggacaggagctataccctcaaccgttcatcctacgcccgtgactccatgatgattgaagaattgctcgtgccgagtaaggaacagcacttgacctttactagagaatttgactccgactcactgagacactattcctgggccgctgatactctggacaacgttaacctcgtgagctcacctatccactccggatttctcgtgtcctttatggtagatgctagaggcggcagcatgagaggaagccggcaccacggcatgaggattatcatcccgccccggaaatgcacggctccaacccggattacttgtagactggtgaagaggcacaagctagccaacccacctccaatggtggaaggagaaggtttggccagccggctggtggagatgggtccagcaggggctcaattcttaggcccagtgatcgttgaaataccgcactttggatcaatgaggggcaaagagcgggagctcatcgtgctacgctctgaaaatggagagacctggaaggagcatcagttcgactcaaagaatgaggacctcacggagcttcttaatggcatggatgaggaactagacagtcctgaggagttagggaaaaagcggatttgcagaatcattaccaaagattttcctcaatacttcgcagtggtgtcccggatcaagcaggagtcaaatcagatcggaccggaggggggtattctcagctctacaacagtgcctttagtacaggcatcattccctgagggagcgctgaccaaacgcattcgggtgggcctccaagcacagcccgtccctgatgaaatagtaaagaagatcctaggtaacaaggctaccttcagtcccatcgtaacagttgaacctcggcgacgtaagtttcataaaccaattaccatgaccatccccgtgcctccaccctctggggagggtgtttccaacggttataagggagacactactcctaaccttagattgctctgcagcatcacaggagggacaagccccgcacagtgggaggatataactggcaccactcccctgacattcataaaggactgcgtttcctttaccaccaatgtgtctgcacggttctggcttgctgattgccatcaagtcctcgagacagtgggattggcaactcagctgtatagggaactcatctgcgtgccttacatggccaaatttgtggtgttcgccaaaatgaacgaccccgtggaatcatccttacgatgcttttgcatgactgacgacaaagtcgacaagaccttagagcagcaggagaattttgaggaggttgctagatccaaggacattgaagttctggagggtaagcccatatacgtggattgctatgggaacctcgctcctctcaccaaaggtggtcaacaactcgtattcaatttctacagttttaaagaaaatcggctcccattctcgattaaaataagggacacaagtcaggagccttgtggcaggctctccttcctgaaagagcccaaaactacaaaggggctaccacagacagccgtgtgcaatttgaacattaccctgcctgcccacaaaaaagagacggagagcgaccaggacgacgaaattgagaaaacagatcgcagacagtccttcgccagcctggccctaaggaagcgctacagttatctgacggagcccggcatgattgagcggtccacaggcgctacacggtccttacccacgacctattcatataagccattcttcagcacaaggccctaccagagctggaccaccgcccccattacagtccccgggcccgctaaatccgggttcaccagcctgtcatcaagctcaagcaatacaccatccgccagtcctttgaaatcaatctggagtgtctctacacccagcccgattaagtcaacccttggagcctcgacaacgagctccgtaaaatcaatttcagacgtagcgagtcccatcagatcatttagaaccatgtctagccctataaagacagtggtgtcacaatctccatacaatatccaggtatcctctggcaccctggcacgtgctcctgctgtaacagaggccacacccctcaaggggctggcgagcaacagtacattttccagtagaacatcacctgtgaccacagccgggagtctgttggagcggtccagcatcaccatgacgccccccgcttcacccaagagcaacatcaatatgtactcctctagtcttcctttcaagagcatcattacgtccgccgctcccctgatatccagcccgttaaaaagtgtcgtatcacccgtcaaatctgcagttgacgtgatctcgtccgcaaaaattaccatggcatcttcactcagcagcccggtaaagcagatgccaggccacgccgaggtggccctggtaaacggatccatctcccctctgaaatacccaagcagcagtaccctgatcaatggctgtaaagccactgctacccttcaagaaaagatctcaagtgctactaactctgtgtcgtcagtcgtctcagcagccaccgatacagtggagaaggtattttctactacgaccgccatgcctttcagtcccttgagatcttatgtgagcgccgcacctagcgcttttcagagtctccgcacacctagtgccagcgccctttacacttccttggggtcctccatcagtgcaaccaccagctcagtgacctcatcaattataacagtgccagtctactcagtcgtaaacgttctgcccgagccagccctcaaaaagcttcccgacagcaatagctttacaaagtcggccgctgcacttttgagccccataaagacccttacgaccgaaactcaccctcaaccacatttctctaggacatctagccctgtcaagtcttcactgtttcttgcgccgtccgcattaaaactgtccactccttcctcactgagctccagccaggaaattttgaaagatgtggccgaaatgaaagaggacctgatgaggatgacagctattttgcagacggacgtgcctgaagaaaagccatttcagcccgagttaccaaaagaaggacgaatcgatgacgaggagccttttaagatcgtcgagaaagtcaaagaggatttggtgaaggtttccgaaattctgaaaaaggacgtgtgcgttgacaataagggcagccccaagtcgcctaaatctgataaagggcatagcccagaggatgactggattgagttttcatctgaagaaatccgcgaagcacgacagcaggccgccgcgagccagtccccctcattaccagagcgggttcaggtaaaagcaaaagccgccagcgagaaggactacaacctcacaaaggtgattgactatctgactaacgatatcggaagtagtagcttgacaaatctgaaatacaaattcgaagatgcaaaaaaagacggtgaagagcgccagaagagggtgctcaagcctgcgatcgccctccaggaacacaagttgaaaatgccacccgcaagtatgaggacgagtacaagcgaaaaagaactttgcaaaatggctgatagtttctttggcaccgacaccatcctcgagtccccagacgacttctcccagcatgaccaggataaatctcccttgagtgacagcggcttcgagaccagaagcgagaagactcccagtgccccccaaagcgctgaaagcaccggtccgaagccgctttttcatgaagtgcctatccctcctgtgattaccgaaaccagaactgaggtcgtgcatgttatacgatcctacgatccttccgccggcgacgtcccacagactcagcccgaagaaccggtgagcccaaagccctcaccgaccttcatggaactggagccgaagccgaccaccagtagcatcaaggaaaaagtgaaggcattccaaatgaaggcaagttcggaggaagacgatcacaacagagtactctccaaggggatgcgcgtgaaagaggagacccatattactacaactacacggatggtctaccattcacctcccggtggcgaaggcgcctcggaacgaatcgaggaaaccatgtcagtgcatgacattatgaaggcctttcagtcaggccgggatccttcaaaggagctggcggggctgtttgaacataagtctgcagtctctccagatgtgcacaagtcagccgcagaaaccagcgcgcagcacgcagaaaaggataatcagatgaaaccgaagctggagcgcatcatcgaggtccatatcgagaaaggcaatcaggccgagccgaccgaagtcataattcgagagactaagaaacatcctgaaaaagaaatgtatgtgtaccagaaagatctgagccggggggacattaacctgaaagacttcctgccggaaaagcacgatgccttcccgtgctccgaggaacaagggcagcaggaggaagaggaactgaccgccgaagagagtctccccagttacctggagagctcgagagtcaacactcctgtctcacaggaagaggattcgagaccctcatctgcccagctgatctccgacgacagctacaaaacgttgaagctgctttcacaacactcaatcgaatatcacgacgacgaactatccgagttacgtggcgagtcctatagatttgccgagaaaatgctgctcagcgagaaactcgacgtgtcacactccgacacggaagagagtgtgactgatcatgccgggccaccatcctctgaactccagggttcagataagagatcccgcgagaaaatcgctaccgcaccaaaaaaggagattctatccaagatctacaaagatgtgagtgaaaatggggtaggcaaggtgagtaaagacgagcattttgacaaagttactgtcctccattattctgggaacgtgagctcccccaagcacgctatgtggatgcggtttacagaagatcggctggaccggggaagagagaaattgatctatgaggatagagttgacagaaccgtcaaagaggccgaagagaagctgactgaggtgtcccagttttttagggacaaaactgagaaactgaacgacgagctgcaaagccccgagaagaaggctcggccaaagaacggcaaagaatactcttctcagtcacccacatccagtagtccagagaaggtcctccttacagaactactggcatcaaacgatgagtgggtcaaagccagacaacacggtcctgatggccagggtttccctaaggccgaggagaaagcaccttccctgccctcatcgcccgagaagatggtgctgagtcagcagaccgaggattccaagtccaccgtggaggcaaagggctctatctcacagtctaaggccccggacggcccccagtctggttttcagctgaagcagtcaaaactcagctctatcaggcttaagttcgagcagggtacccatgctaaatctaaggacatgtcccaggaagatagaaaaagtgatggtcagtcaaggattcccgtgaagaagatccaggagtccaaactgccggtttaccaggtatttgcaagggagaagcaacagaaggcaatagacctgcccgacgaatcagtgtccgtgcagaaagactttatggtccttaagacaaaggacgaacacgcacagagcaatgaaattgtggtgaatgattccggctctgacaatgtgaaaaaacagcgaaccgaaatgtcttcgaaagcaatgccggatagtttctctgaacaacaagccaaggacctggcatgtcatattacaagcgacctggctacgcgcggcccatgggacaaaaaggtgtttcgcacctgggaaagtagcggtgctacaaataacaaatcgcagaaggagaagttgagtcacgtgctggtgcacgatgttcgggagaatcatataggccaccctgagagtaagagcgtagaccagaagaatgagtttatgtctgtgactgagcgcgaacgcaagctgctaaccaacggaagcctgtcggaaatcaaggaaatgacagtgaagtccccatcaaagaaggttttgtatagagaatacgtggtcaaagaaggagaccacccgggcggattgctcgatcaaccttccaggagatccgagagcagcgcggtgtcccacattcccgtgagggtggccgatgagcgccggatgctgagcagtaacatccccgatgggttttgtgaacagagtgcgtttccaaaacatgaactatctcagaaactgagccagagctctatgtcaaaggagaccgtcgaaactcagcactttaacagcatagaagacgaaaaagtcacctactccgaaatctcaaaggtgtcaaaacaccagtcttatgtcggtctgtgtccacccctggaggagaccgagacaagtcccaccaaatcaccagactcactggaattctcccctggcaaggagtctccctcgtcagatgtcttcgaccattctccaatcgacggcttggagaaacttgctccgttggcacagacagagggcgggaaagagattaagacactgccagtgtacgtctcgtttgtgcaggtgggcaagcagtatgaaaaagaaatccagcagggaggagtaaagaagattatttcccaggagtgtaagacagtgcaggaaactcggggcactttctatacaaccaggcagcagaagcagccacctagcccacagggctctcctgaagacgataccttagaacaggtaagtttcctcgattcttcgggaaaaagccccctgacaccagagacacccagcagtgaggaggtgagctacgagttcacctcgaagacgccagacagcctgattgcttacattccaggcaagccttcaccgatccccgaagtctccgaggagtccgaagaagaggaacaggcaaagagtacgtcactgaagcagactacggtcgaagaaacggccgtggaacgcgagatgcccaatgacgttagcaaagattctaaccaaaggcccaaaaataatcgcgtggcatacatagaattccccccacccccacctctggacgctgaccaaatcgagagcgacaagaaacaccattacctccccgaaaaagaggtggacatgatcgaagtcaacctacaggatgagcacgataaatatcaattggccgagcctgttatccgggtgcaaccaccctccccagtgcccccaggggccgatgtgagtgattcctcggatgatgaatctatctaccagccagtacccgtgaaaaaatatacgtttaaactgaaagaggtcgatgacgaacaaaaggagaaaccgaaagcctctgcagagaaagcctctaatcagaaagaacttgagtcaaatggaagtggcaaggacaatgaattcgggctgggattggactcccctcagaatgaaatcgctcagaacggcaataacgaccagtcaatcaccgagtgttccatcgctaccaccgcagaattctcacatgacacagacgctaccgaaatagatagcttagatggatacgacttacaggatgaagacgatggtctgaccgagagcgattctaagctgccaattcaggcaatggagatcaagaaggacatctggaacacggaaggaattcttaaacctgccgaccgctcatttagtcagagcaagctagaggtgattgaggaagaggggaaagttggtccggacgaggataaacccccctctaaaagctcgtctagcgaaaagactcccgacaagaccgaccagaaatctggtgctcagttctttactctcgagggtcgccatccagacaggtctgtattccccgatacttatttcagctacaaagttgacgaggaattcgctaccccgttcaagaccgtagccaccaaaggactcgactttgatccctggtctaacaacaggggggacgatgaggtgttcgattctaagtcgcgcgaggatgaaacgaagcccttcggactggcggtggaggacagatcacctgctacgacacctgacaccactcctgcgaggaccccgaccgatgagtccacaccaacgtccgaacctaacccctttcccttccatgagggaaaaatgtttgaaatgacacgaagcggcgccatcgatatgagcaagcgcgacttcgtcgaagagcggcttcagttcttccaaattggcgaacatacttctgagggaaaatctggcgatcaaggggagggcgacaaatcgatggtcacagccactccacagccccaatcaggtgatacgaccgtcgagaccaacttggaacggaatgtggagacacctacagtggagccaaatccttcgattcccacttctggcgagtgccaagaaggcacttccagttctggaagcctcgaaaaaagcgcagccgctacgaacacctccaaggtcgatcccaagctcagaacaccaatcaaaatggggataagtgcatcaaccatgactatgaagaaagagggaccaggagaaattacggacaagatcgaggctgtgatgacctcatgccaggggttagagaatgagacgatcactatgatctccaacactgccaatagtcagatgggtgtaaggcctcacgagaaacatgatttccagaaggacaacttcaataacaataacaatttagattctagtactatccagacagataacataatgtcgaatattgtacttacagagcacagcgcaccaacctgtaccacggagaaggacaacccggtgaaagtgtcttccggaaaaaagaccggcgttttgcaaggtcattgtgtccgcgataagcagaaggtgcttggcgagcagcagaagactaaggaactgattggaattcggcagaaatccaagctgcctattaaagccacaagccctaaggacacctttcctcctaatcatatgagtaatacaaaggcgtccaagatgaaacaggtgagtcagtcggagaaaaccaaggccttaacaacctcttcttgcgttgatgttaagtcccggataccagtcaaaaatactcaccgggacaatatcattgccgttcggaaggcctgcgcaacacagaagcaagggcagcctgaaaaggggaaggcgaagcagctgccctctaagctgccagtaaaggtgaggtccacctgcgtgactactaccactaccacagctaccaccacgacgaccaccactacaacaacaaccacaagctgtaccgtaaaagttagaaagtcccaacttaaagaagtgtgcaaacattccattgaatattttaaagggatttcaggagaaacattaaaactagtagatcgcctatctgaggaagaaaaaaaaatgcaatcagagctgtcagatgaggaggaaagtacctcccgcaacaccagcctgtcggagacaagccgggggggccaaccatcagtgactaccaaatctgcccgagataaaaaaacagaagctgccccgctgaagtcaaagagcgagaaggctgggtccgagaagaggagctcaaggaggactggcccgcagtctccatgcgaaagaacggacatccggatggcaatcgtggcagatcatttgggtctgagttggactgaactggctcgagaacttaacttctcagtcgacgagataaaccaaatcagagtggagaacccaaattcccttatttcccaaagctttatgctgcttaaaaagtgggtaacaagggacggcaagaacgcaacaacagacgcactcacgtcagtgctgactaagatcaataggattgacattgtgaccctgctggagggcccaatcttcgattacggtaacatatccggcacccgttctttcgcagatgaaaacaatgtttttcacgacccggttgatggctggcagaatgaaacctctagtggaaatcttgaatcgtgtgcgcaggcccgcagagtgaccggtggtctgctcgacaggttagacgattcgcctgatcaatgccgagacagtattacatcgtatctaaagggagaagcagggaagttcgaggcgaacggctctcacactgagatcaccccagaagcgaagactaaatcttactttcccgagtctcaaaacgacgttgggaaacaatctaccaaagagacgcttaaacctaaaattcacggatcaggacacgtggaagagccagcctcccctttagccgcctaccagaaaagcctggaagaaactagtaagttaatcatcgaggagacaaagccctgcgtaccagtttccatgaaaaagatgtctcgcacctctccagccgacgggaaacccagactctcccttcacgaggaggagggtagttcgggctccgagcagaagcaaggcgagggcttcaaggtgaagacgaagaaggagattagacacgttgagaaaaaaagccatagttag

SEQ ID NO: 206857 - DNA, 14771 bp, Artificial Sequence
  derived and/or modified sequence
ggacaccatcatttgggtttttaaaagcttcagcttctccagcatctttgcattgtgaatatcttcctgcttctagtcaaagctttctctctagtgattggaatgctgctgtaagcctgattagaggtgcctgaggatatcaccttttacaaggaagccgtgtgtgcttgagaggatctttttaaatgcattatggctcatgcagcctcacaattaaagaaaaacagggatttagaaatcaatgctgaagaagagcctgagaaaaaaaggaaacaccgcaaacggtcccgggatcggaagaaaaagtctgatgccaatgcaagttacttaagagcagctcgagctggacaccttgaaaaggccctcgactacataaaaaatggagttgacatcaacatttgcaatcagaatgggttgaacgctctccaccttgcttccaaagaaggccatgtagaggttgtttctgagctgctgcagagagaagccaatgtggatgcagctacaaagaaaggaaacacagcattgcacatcgcatctttggctgggcaagcagaggtggtaaaagtcttggttacaaatggagccaatgtcaatgcacaatctcagaatggtttcacgccattgtatatggcagcccaggaaaatcacctggaagttgtcaagtttcttcttgacaatggtgcaagccagagcctagccacagaggatggcttcacaccattggcagtggctttgcaacaaggtcacgaccaagtcgtttcgctcctgctagagaatgacaccaaaggaaaagtgcgtctcccagctcttcatatcgcggcccgaaaagacgacacgaaagccgccgccctgctgctgcagaatgacaacaatgcagatgtggaatcaaagagtggcttcactccgctccacatagctgctcactatggaaatatcaatgtagccacgttgctgttaaaccgagcggctgctgtggatttcaccgcaaggaatgacatcactcctttacatgttgcatcaaaaagaggaaatgcaaatatggtaaaactattgctcgatcgaggagctaaaatcgatgccaaaaccagggatggtctgacaccactgcactgtggagcaaggagtggccacgagcaggtggtagaaatgttgcttgatcgagctgcccccattctttcaaaaaccaagaatggattatctccattgcacatggccacacaaggggatcatttaaactgcgtccagcttctcctccagcataatgtacccgtggatgatgtcaccaatgactacctgactgccctacacgtggctgcccactgtggccattacaaagttgccaaggttctcttggataagaaagctaaccccaatgccaaagccctgaatggctttacccctcttcatattgcctgcaagaagaatcgaattaaagtaatggaactccttctgaaacacggtgcatccatccaagctgtaaccgagtcgggccttaccccaatccatgttgctgccttcatggggcatgtaaatattgtatcacaactaatgcatcatggagcctcaccaaacaccaccaatgtgagaggagaaacagcactgcacatggcagctcgctccggccaagctgaagttgtgcggtatctggtacaagacggagctcaggtagaagctaaagctaaggatgaccaaacaccactccacatttcagcccgactggggaaagcagacatagtacaacagctgttgcagcaaggggcatctccaaatgcagccacaacttctgggtacaccccacttcacctttccgcccgagaggggcatgaggatgtggccgcgttccttttggatcatggagcgtctttatctataacaacaaagaaaggatttactcctcttcatgtggcagcaaaatatggaaagcttgaagtcgccaatctcctgctacagaaaagtgcatctccagatgctgctgggaagagcgggctaacaccactgcatgtagctgcacattacgataatcagaaagtggcccttctgcttttggaccaaggagcctcacctcacgcagccgcaaagaatggttatacgccactgcacatcgctgccaaaaagaaccagatggacatagcgacaactctgctggaatatggtgctgatgccaacgcagttacccggcaaggaattgcttccgtccatctcgcagctcaggaagggcacgtggacatggtgtcgctgctcctcggtagaaatgcgaatgtgaacctgagcaataagagcggcctgaccccactccatttggctgctcaagaagatcgagtgaatgtggcagaagtcctcgtaaaccaaggggctcatgtggacgcccagacaaagatgggatacacaccactgcatgtgggctgccactatggaaatatcaagattgttaatttcctgctccagcattctgcaaaagttaatgccaaaacaaagaatgggtatacgccattacatcaagcagcacagcaggggcatacgcatataataaatgtcttacttcagaacaacgcctcccccaatgaactcactgtgaatgggaatactgcccttggcattgcccggcgcctcggctacatctcagtagtggacaccctgaagatagtgaccgaagagaccatgaccacaactactgtcacagagaagcacaaaatgaatgttccagaaacgatgaatgaagttcttgatatgtctgatgatgaagttcgtaaagccaatgcccctgaaatgctcagtgatggcgaatatatctcagatgttgaagaaggtgaagatgcaatgaccggggacacagacaaatatcttgggccacaggaccttaaggaattgggtgatgattccctgcctgcagagggttacatgggctttagtctcggagcgcgttctgccagcctccgctccttcagttcggataggtcttacaccttgaacagaagctcctatgcacgggacagcatgatgattgaagaactccttgtgccatccaaagagcagcatctaacattcacaagggaatttgattcagattctcttagacattacagctgggctgcagacaccttagacaatgtcaatcttgtttcaagccccattcattctgggtttctggttagctttatggtggacgcgagagggggctccatgagaggaagccgtcatcacgggatgagaatcatcattcctccacgcaagtgtacggcccccactcgaatcacctgccgtttggtaaagagacataaactggccaacccaccccccatggtggaaggagagggattagccagtaggctggtagaaatgggtcctgcaggggcacaatttttaggccctgtcatagtggaaatccctcactttgggtccatgagaggaaaagagagagaactcattgttcttcgaagtgaaaatggtgaaacttggaaggagcatcagtttgacagcaaaaatgaagatttaaccgagttacttaatggcatggatgaagaacttgatagcccagaagagttagggaaaaagcgtatctgcaggattatcacgaaagatttcccccagtattttgcagtggtttcccggattaagcaggaaagcaaccagattggtcctgaaggtggaattctgagcagcaccacagtgccccttgttcaagcatctttcccagagggtgccctaactaaaagaattcgagtgggcctccaggcccagcctgttccagatgaaattgtgaaaaagatccttggaaacaaagcaacttttagcccaattgtcactgtggaaccaagaagacggaaattccataaaccaatcacaatgaccattccggtgcccccgccctcaggagaaggtgtatccaatggatacaaaggggacactacacccaatctgcgtcttctctgtagcattacagggggcacttcgcctgctcagtgggaagacatcacaggaacaactcctttgacgtttataaaagattgtgtctcctttacaaccaatgtttcagccagattttggcttgcagactgccatcaagttttagaaactgtggggttagccacgcaactgtacagagaattgatatgtgttccatatatggccaagtttgttgtttttgccaaaatgaatgatcccgtagaatcttccttgcgatgtttctgcatgacagatgacaaagtggacaaaactttagagcaacaagagaattttgaggaagtcgcaagaagcaaagatattgaggttctggaaggaaaacctatttatgttgattgttatggaaatttggccccacttaccaaaggaggacagcaacttgtttttaacttttattctttcaaagaaaatagactgccattttccatcaagattagagacaccagccaagagccctgtggtcgtctgtcttttctgaaagaaccaaagacaacaaaaggactgcctcaaacagcggtttgcaacttaaatatcactctgccagcacataaaaaggagacagagtcagatcaagatgatgagattgagaaaacagatagacgacagagcttcgcatccttagctttacgtaagcgctacagctacttgactgagcctggaatgattgaacggagtacaggagcaacaagatccctccccaccacttactcatacaagccattcttttctacaagaccataccagtcctggacaacagctccgattacagtgcctgggccagccaagtcaggcttcacttccttatcaagttcttcctctaatacgccatcagcttctccgttaaaatcaatatggtctgtttcgacaccttctccaatcaaatccacattaggcgcgtcaactacatcttcagttaaatccattagtgacgtggcatctccaattagatcctttcggacaatgtcttcgccgataaaaactgtggtgtcacaatctccatacaatatccaagtttcctctggtaccctggctagagctccagcagtcacggaagctacgcccttaaaagggctggcatccaattctacgttttcctctcgaacctctccagtgactacagcagggtctcttttggagaggtcatcaattactatgacaccccctgcctcccccaaatcaaacattaatatgtattcctcaagtttgccatttaagtcaattattacatcagcagcaccgctaatatcttcacctttaaagtcagtggtgtctccagttaaatcagcagttgatgtcatttcatcagccaaaattacaatggcatcttctctctcatcacctgtgaagcagatgcctggacatgcagaggtagcattagtcaatggatctatttcccctctaaaatatccatcatcctcaactttaattaatggatgcaaagccactgccacgttacaggaaaaaatttcttctgctacaaactctgtgagctctgtggtcagtgcagccactgacacagttgagaaagtgttttctaccacgactgcaatgccattttccccactcaggtcatatgtttctgcagcaccatcagcttttcagtctctaagaactccttccgcaagtgcactctatacatcccttgggtcgtcaatatctgcaactacctcatctgtaacttcatcaattataacagtgccagtatactctgtagtcaatgttttgccagaaccagcattaaagaaacttccagactctaattcatttacaaaatcagcagcagccttgctgtcacccattaaaacattgactacggagacacatcctcagcctcacttcagtcgaacttcatctccagttaagtcatctttgttccttgcaccctctgcccttaagttgtctacaccatcttctttatcttccagtcaggagatactaaaagatgtagctgaaatgaaagaggacctaatgcggatgaccgcaatactacagacagatgtgcctgaggagaagccattccaacctgaactcccaaaggaagggagaatagatgatgaagaacctttcaaaattgtagagaaagtaaaggaagacttagtgaaagttagtgaaatccttaaaaaggatgtatgtgtagataataaaggatcacccaaatcaccaaagagtgacaaaggacactctcctgaagatgactggatagaatttagttcggaagaaatccgggaagccagacaacaagctgctgcgagccagtctccatctctgccagagagagtgcaagtaaaagcaaaagccgcctccgaaaaggattataacttgaccaaagttattgattacctaacaaatgatattgggagtagttcactgacaaacttaaaatacaagtttgaggatgcaaagaaggatggtgaggagagacagaaaagagttttaaaaccagcaattgctttgcaggaacacaaactcaaaatgcctccagcctccatgaggacttccacctctgagaaagaattgtgtaaaatggctgattccttttttggaacagatactattttagagtctcctgatgacttttctcaacacgaccaagataaaagtcccttgtctgacagtggctttgaaacaagaagtgaaaagacaccttcagccccacaaagcgctgaaagcactggtcctaaaccactttttcatgaagttcccatccctcctgtcattacagaaacaagaactgaagtggttcatgttatcaggagctatgatccctcagctggggatgttccccagacccaaccagaggagcctgtgtcacctaaaccttcacctacttttatggaattggaaccaaagcccaccacctctagtattaaagaaaaggttaaagcatttcaaatgaaagccagtagtgaagaagatgaccacaatcgggttttaagcaaaggcatgcgtgttaaagaagagactcacataaccacaaccaccagaatggtttatcattctccaccaggcggtgaaggtgcatctgaaagaattgaagaaaccatgtcagtccatgacatcatgaaggcctttcagtccgggcgggatccttccaaagaactggcaggtctgtttgaacataagtcggcagtgtctccagatgttcacaagtctgctgctgaaacctcagcccagcatgcagagaaggacaaccaaatgaaacccaaactggagcgtataatagaagtccacatcgaaaaaggtaaccaagctgagcccactgaagtcattattagagaaaccaaaaagcatccagaaaaagaaatgtatgtatatcagaaagacttatcccggggagatattaacctaaaagattttctgccagaaaaacacgatgcttttccttgttcagaggaacagggtcagcaagaagaagaagaacttactgctgaagagtcattgccttcttatctggagtcttccagagtaaacactcctgtgtcccaagaagaagatagccgccctagttctgctcaactcatatctgatgactcttataaaacattgaagcttttgagtcaacactcaatagaataccatgacgatgagttgtcagaactaagaggggagtcttacaggtttgctgagaaaatgcttctgtcagaaaagctagatgtgtctcattctgatactgaggaatcggttacagaccatgcaggaccccctagctcagagttacaggggtctgataagcggtccagagaaaaaatagccactgcccccaaaaaagaaattctctccaaaatctataaagatgtttctgaaaatggtgtaggtaaagtgtctaaagatgagcattttgataaagtgacagtgttgcactattctggcaatgttagtagtccaaaacatgccatgtggatgcgctttactgaggacagattagacagaggtagagagaagttgatatatgaagatagggtggacaggactgtgaaggaggctgaagaaaaactgactgaagtgtcacagttttttcgtgacaaaactgaaaagctaaatgatgaactgcagtccccagagaaaaaggcacgccctaaaaatggcaaagaatattcttctcaaagccctaccagtagcagccctgagaaagtgctactgacagaactgctggcatccaatgatgagtgggttaaggcaagacagcatggccctgatggacaaggcttccccaaggccgaggagaaggcacccagtctgcccagcagcccagagaagatggttctctcccaacagactgaggacagcaagtccacagtggaagccaaaggaagtatttcacagagcaaagcaccagatgggccccagtctggattccagctcaaacaatctaaactcagttccattagattaaaatttgaacaaggcacacacgcaaaaagtaaggacatgtctcaagaagacagaaagtcagatggccagtccagaatcccagttaaaaaaatacaggagagcaagctacccgtctaccaagtttttgctagagaaaaacagcagaaggccatagacctcccagatgaaagtgtatctgtgcaaaaagattttatggtattaaaaaccaaagatgagcatgcccaaagcaacgaaattgttgtaaatgattctggctctgataatgtgaaaaaacagagaactgaaatgtcaagtaaagcaatgcctgactctttttctgagcagcaggctaaagacttggcatgtcatataacctcagatttagcaactaggggaccatgggacaaaaaggtctttagaacatgggagagttcgggagccactaacaataagtctcagaaagaaaaactttcgcatgtacttgttcatgatgtaagagagaatcacattggtcaccctgagagtaaaagtgttgatcaaaagaatgaatttatgtctgtgactgagagagaacgcaaattgttaacaaacggctctctctcagaaattaaagaaatgactgtaaaatctccctccaaaaaagtcttatatagggaatatgttgtgaaagaaggggaccatccaggcggattgcttgatcagccttccaggaggagcgagagctcagcagtgtcacacattcccgtcagagttgctgatgagaggagaatgctgtcttctaatattcccgatggtttttgtgaacagtcggcatttccaaaacatgaactatcacaaaaattgtcccagtcaagcatgagtaaagagacagttgagacacagcactttaattctatagaagatgaaaaagttacctattcagaaatcagcaaagtttccaaacaccagagttatgtaggtttatgcccacctctcgaggaaaccgaaacctcccccaccaaatctcctgattctttagagtttagcccaggaaaggaatctccctctagtgatgtattcgaccacagtcccattgatggattggaaaaactcgcaccactagcccagacagagggagggaaagagataaaaactttacccgtttatgtcagttttgtacaagtggggaagcaatatgaaaaggagatacaacaaggaggtgtaaaaaaaatcataagtcaggaatgtaagacagtacaagaaaccagggggaccttttatacaactagacagcaaaagcaacctccttctccccaaggtagtccagaagatgatactctagagcaagtatcctttctagacagctctgggaaaagccctttaaccccagaaacacccagttcagaggaagtgagttatgaatttacatctaagacacctgactcgctcatagcttatataccaggcaaacccagcccaattcccgaggtttctgaggagtcagaggaggaggaacaggccaagtcaacctcccttaagcagactacagtggaggaaacagcagttgagcgtgaaatgcctaatgacgtgagcaaagactctaaccaaagacccaaaaataacagagttgcctatattgaatttccccctcctccaccactggatgcggaccagattgagtcagataagaagcatcattatctcccagaaaaagaggttgacatgattgaagtcaatctgcaagatgagcatgacaagtaccagctggctgaacctgtcattagagtgcagccaccttcaccagttcctcccggggcagacgtcagtgattcaagcgatgacgaatctatttatcagccagtcccagttaaaaaatataccttcaaattaaaggaagtggacgatgaacaaaaagaaaaacccaaagcttctgctgaaaaggcttccaaccagaaagaactggaaagtaatggatctggaaaagataatgaatttggccttggccttgattcacctcagaatgaaattgcccagaatgggaacaacgaccagtccatcacagagtgttccattgccaccacagcagagttttctcatgacacggatgccacagagatcgactctctggatggctatgacctgcaagatgaagatgatggcttgacagagagtgattctaaactcccaattcaagccatggaaattaagaaagatatctggaacacagagggcattctgaagccagctgaccgctcttttagccaaagtaaacttgaagttatcgaggaggagggaaaggtgggaccagatgaggacaagccaccttctaaaagttcttcatctgaaaagactcctgataagactgatcagaagtcaggggcccagttcttcacactggaaggcagacatcctgacagatcagtgtttcctgatacttacttcagttacaaagtagatgaagaatttgccactccttttaaaacagtagctaccaaaggtctagattttgacccttggtctaataaccgaggggatgatgaagtttttgacagtaaatcacgggaagatgaaactaagccatttgggctggcggtagaagaccgctctccagcaacaacccctgatacaacgccagccagaacgccaactgatgaaagtaccccaactagtgagcctaaccccttcccatttcatgaaggaaaaatgtttgagatgactcgcagtggtgcaattgacatgagcaagagggattttgttgaagagaggctccaatttttccagattggtgagcatacttctgaagggaagtcaggggaccagggggaaggggataaaagtatggtcactgccacaccacagccacagtcaggggacaccactgtagaaaccaatctagagagaaatgtagagacacctacagtggaacctaaccccagcatcccgaccagcggagagtgtcaggaaggcacatccagtagtggctccctggagaaatcagcagcagccactaacacctctaaagttgaccccaagttgcgcacgcctataaaaatgggaatttctgcatccaccatgaccatgaagaaagaaggccctggagaaataacagataagatagaagcggtgatgaccagttgtcagggattagaaaatgaaactataacaatgatttcaaatacagccaatagccagatgggcgttaggccccatgaaaaacatgattttcaaaaagataactttaataacaacaacaatttggattcttccactatacagacagataacattatgagtaatatagttctgacagaacattctgcacccacttgtaccacagagaaagataacccagtgaaagtctcatcaggaaaaaagacaggggtactacaaggacactgtgtaagagataagcagaaagttcttggagaacagcaaaaaacaaaggaattgatagggattaggcaaaaatccaaacttcccataaaggccacttcaccaaaagataccttcccaccgaaccatatgtcaaacactaaagcaagtaaaatgaagcaggttagtcaatccgagaaaaccaaagcccttactacttcttcatgtgtagatgtaaagtccagaattccagtgaaaaacacacacagggataacataattgcagttagaaaagcatgtgccacacaaaagcaagggcagccagagaaaggcaaggccaaacagcttccatccaagttgccagtaaaggtaagatccacctgtgtcactaccaccaccaccactgccaccaccaccaccactaccaccactaccaccaccaccagctgcacagttaaagttaggaaaagtcagctcaaggaagtatgtaaacattccattgaatattttaagggaattagtggtgagaccttaaagcttgtggaccgcctctctgaagaagaaaaaaagatgcagtccgagttgtccgatgaggaagaaagtacctcaagaaacacgtcgttgtccgagacttcccggggtggccagccttcggttacaacgaagtctgctagagataagaaaacagaggcagcacctttaaaatcaaagagtgaaaaggccggcagtgagaaaaggagcagtagaaggactggtccacagagtccatgtgaacggacagatatcaggatggcaatagtagccgatcacctgggacttagttggacagaactggcaagggaactgaatttttcagtggatgaaatcaatcaaatacgtgtggaaaatccaaattctttaatttctcagagcttcatgttattaaaaaaatgggttaccagagacggaaaaaatgccacaactgatgccttaacttcggtcttgacaaaaattaatcgaatagatatagtgacactgctagaaggaccaatatttgattatggaaatatttcaggcaccagaagttttgcagatgagaacaatgttttccatgaccctgttgatggttggcagaatgagacatcaagtggaaacctagagtcctgcgctcaagctcgaagagtaactggtgggttactagatcgactggatgacagccctgaccagtgtagagattccattacctcatatctcaaaggagaagctggcaaatttgaagcaaatggaagccatacagaaatcactccagaagcaaagacaaaatcttactttccagaatcccaaaatgatgtaggaaaacagagtaccaaggaaactctgaaaccaaaaatacatggatctggtcatgttgaagaaccagcatcaccactagcagcatatcagaaatctctagaagaaaccagcaagcttataatagaagagactaaaccctgtgtgcctgtcagtatgaaaaagatgagtaggacttctccagcagatggcaagccaaggcttagcctccatgaagaagaggggtccagtgggtctgagcaaaagcagggagaaggttttaaggtgaaaacgaagaaagaaatccggcatgtggaaaagaagagccactcgtaacagcgaacggtcagtcaaggatcataagtttttactgccagtattgagaaattcgtggaagaaatgtcagcaggaagtaaaaattcaccgagaagtgtgtgtgtgttcgctgcttccacacattaatggcatgattttttttatgcaaaaagaaaagaaaagaaaaccacccacattttaatttagcatgagccaatttacagagcatggaaatcactttcatttccggattggcgcgtgtgcaattagcaatgcagtgtatatacaagaagccatgctgttaacagtttatctcaagtaatttggtgtcatttacaaaaggaagaaattcctgccatcagaagggacagaaggagatggaatgatcaaatcacagagaaacactaaaattactaaatctacaacagctcgccttatttttcttggacccaaactgtcagggtataaacactatttgtttcttttttaaaacatcgatagttttgctgtaaataataacactgtataaattctaacagaaaaatagaataaaatgttgataaggcactgcctcttagaacacaaacagaatattgcaaatgcatttaacaaataggggtctcaagtgacttcaccctagaagaggagggagggattctgggtgggggtgactcttcactgattcttgtatattagcaattataatgtttgtatatgcaaaactgctagcttgattttaaaaaaaaacaaatctttaaaatctgctgcaaatttaaataattcccaaaatgaggaattctgtagttctgtgaaaaatttttttcttcagaatactaatattttgatgcatgtgtatcaccttattttgattaaatcttttccaattttgcaaacactacagtatactgcaacacaaaagattttatctgtaaacacaaagcccttcatctaatatttgttgctattgccaatttttcaatgaaatgacctaaaaacaacaaaaaaaaataacctatacggtagttgctttagggggtggggggatgctatctgttagtgcttaaaagggggtaaatgcttgccgctttagaggtggatggtgctcataaaaggccccagtcgggggtatttaaaaaggactgaacagaaatccttagctagtagaatggcagcacgctgtaaaattattactgtattgtgtactggctataagatgtagacacctttcagtaagccaatcatttgtaaccattctagcagtgtcatattaggttaataaggctgctgtgttttaaagggcatttttatttgggttttggtgaaattctttaatttgttgattatattcacataaaatcagcattcattgacacatagctctaatgacatatgtatgaaaaaccatacactggatgacctagtcgattatttaagcataaaataaattgtgttaaactcttcaccta

SEQ ID NO: 206858 - DNA, 13134 bp, Artificial Sequence
  derived and/or modified sequence
atggcacacgctgcctcccagctgaagaaaaacagggaccttgagataaatgcagaggaagagcccgagaagaagcgaaagcaccgaaagaggagtagggatcgcaagaagaagtcagatgccaatgcgtcctatctaagagctgccagagctggccacctggaaaaggccctcgactatattaaaaatggcgtggacattaacatttgcaaccagaatgggttaaatgcactgcacttagcctcaaaggagggacacgtagaagtggtctctgaactcctccagagagaagccaacgtggacgcagctaccaaaaaggggaacaccgctctgcatattgcttccctggccggacaagctgaggtcgtcaaagtcctggtaacaaatggcgcaaatgttaacgctcagagccaaaatggtttcaccccactttatatggctgctcaggagaaccacctggaagtggtaaaatttctgcttgataacggagccagccagagtcttgccacagaggacggtttcacgcctctggctgttgcattgcagcaaggccacgaccaggtggtgagcctactgttagagaacgacaccaaagggaaggtacgcttacccgcactccacatcgccgctcgcaaagatgataccaaagctgctgccctgctacttcagaatgataataacgccgacgtggagagcaagtccggctttacacctttacacattgccgcacattatgggaacataaacgtggcaacgctgctgttgaatagggctgcagctgtcgatttcaccgctaggaatgacatcacaccactgcacgttgcatccaaacggggtaatgccaatatggtgaagctcctcttggatcgaggagctaagatagatgccaagaccagagatggattgacacctctccactgtggagctaggagtgggcacgagcaggtggtggagatgctgctcgaccgcgctgcccctattctctccaagaccaagaacggactctctccccttcatatggccactcaaggagaccatcttaactgcgtgcagctactacttcagcataatgtgccagtggacgacgtgaccaacgattacctcactgctctgcacgttgctgcccactgtgggcactataaggtggctaaggtgttgctggacaagaaggccaacccgaacgcaaaggctttgaatggctttaccccgctgcacatagcttgcaagaagaatagaataaaggtgatggagcttctgctcaagcacggcgctagtatccaggccgtgactgagtcagggctcacacccattcatgtcgctgctttcatgggccatgtgaatatcgtgtcccaacttatgcaccacggcgctagtcctaatacaactaacgtcagaggtgagaccgctttgcacatggctgctaggagtggccaggccgaggtcgtccggtaccttgtccaggatggcgctcaggtggaggccaaagccaaagatgaccagactcctcttcatatctctgccaggttgggcaaggctgatattgtgcagcagctattgcagcagggagcttcaccaaacgccgctacaacaagtggttacacccctctacatctgtcagcgagggaaggtcacgaggatgtcgccgcattcctgttggatcatggtgcgagtcttagcattaccactaagaagggattcacgcctcttcacgttgcggctaagtatggtaagcttgaagttgccaacctgcttctgcagaagtctgccagcccggatgctgccggtaagagcggtctgaccccattacacgtagctgcgcactatgacaaccaaaaggtggccctgttactgttagatcagggcgctagcccccatgccgctgcaaagaatggatataccccgcttcatattgccgcaaagaagaatcagatggatattgcaacgaccttactagagtatggagctgacgccaacgcagtgacgagacaggggatcgcttcagttcacctagctgctcaagagggccatgtggatatggttagcctactgctcggccgaaacgccaatgtgaacctctccaataagagtggcctcacccccctgcacttagcagcacaggaggatcgcgttaatgttgctgaggtgttagtaaatcaaggtgcccacgtggatgctcaaactaaaatgggttatactcctctgcacgttgggtgtcattatggaaacattaaaatcgtgaacttcctgctgcaacactctgcaaaggtgaatgccaagacaaaaaatggctatacacccctccatcaggccgcacaacagggccacacacacattatcaacgttcttcttcaaaataacgccagccccaatgagcttaccgtgaatgggaatactgcattaggaatagctaggaggctgggttacatcagcgtggtggacaccttgaaaattgtgacagaggagacaatgactaccaccactgtcacggagaaacataaaatgaacgtacccgaaactatgaatgaggtgctggacatgagcgacgacgaagtcaggaaggccaatgcaccggaaatgttaagcgacggtgagtacatatctgacgtcgaagaaggcgaggatgcaatgaccggggacacagacaaatacctcggtccccaggacctcaaagagcttggtgacgatagcctccctgcagagggttatatgggattctctctcggggctcggtccgcctcacttaggtctttcagctcggacaggtcatacaccctgaaccggagttcttacgcccgagactctatgatgattgaggaactgctggtgccatctaaagagcagcacctgaccttcacgcgcgaattcgatagcgactccctccgtcactattcctgggcagccgatactttagataatgttaaccttgtctcttcccctatccactccggattcctcgtgtccttcatggttgacgccagggggggtagcatgagggggagccgacaccacggaatgaggatcataattcccccacgcaagtgtaccgcaccgacccggatcacatgtaggctagtgaagaggcacaagctggccaatccccctcctatggtggagggtgagggacttgccagtagactggtggagatgggacccgcaggtgcacagttcttggggcctgtgatagtggagatccctcactttgggagtatgcggggaaaggaacgggaactgatagtgctacgatccgagaacggagaaacgtggaaggagcaccagtttgactctaaaaacgaagacttgacggagctgttaaacggcatggacgaggaacttgatagcccggaggaactgggtaaaaagcgtatatgtaggatcataacaaaagatttcccccaatacttcgcagtcgtttcccgcataaaacaggagagcaatcaaattggacccgaaggtggcatactgtccagcactaccgtgcccttggttcaggctagtttccccgaaggcgcactcactaaacgaatccgggtggggctgcaggctcagcctgtgcccgatgaaatcgtgaaaaagatcctgggtaacaaggcaacttttagtcccattgttacagttgagccacgccgtcggaaatttcataagcctattacaatgactattccagtcccaccgccaagcggcgagggcgtctcaaacggctacaagggcgacaccactcctaaccttcgcctgctgtgctctataaccggcggtacatccccggcacagtgggaagatatcacggggactactccgctgaccttcataaaggattgcgttagttttactacaaatgtatctgcacgcttttggttagcagactgtcaccaggtgttagaaaccgtggggcttgcaacccagctgtacagggaactgatctgcgtgccctacatggccaagtttgtggtcttcgccaaaatgaatgatccagtggagtcaagcctgcgctgtttttgcatgactgacgacaaggtagataagactctcgagcagcaagagaacttcgaggaggtcgcaaggtccaaggatatcgaggtgcttgagggcaagcctatttacgtagactgctacggcaacctcgcgccactcaccaagggcggacaacagttggtattcaacttttattcttttaaggagaacaggctccctttttccatcaagattagggacaccagccaggagccatgcggccgactgtcttttctcaaggagccgaagactacgaaggggctcccacagaccgctgtttgcaacctaaatataacgttaccagcacacaagaaggagaccgaaagcgaccaggacgacgagatcgaaaagacagaccggagacaatccttcgcctctttagcgctgagaaaacgatacagttacctgactgaacccggaatgatcgagcgcagcaccggcgctacaagatcgcttcccacaacatactcctacaagccattcttttccacacgtccgtaccaatcatggacaacagcgcctattactgtccccggtcctgccaagtctgggttcacatctttatctagctcatccagcaatactccatccgcgtctccattgaagagcatatggtccgtgagtactccttcacccattaagtctactctgggagcatccacaaccagctcagtgaagagcatttccgatgttgcaagcccaatccggtcatttagaaccatgtcttccccgattaagacagttgtgagccaatccccttacaatattcaggtcagcagcggcacgttggcccgtgcccctgcagtcacagaagccacccccctcaaggggctggcctctaactccacattttcctctaggacatctcccgtgactactgccggatctcttctggagcgctcctccattacaatgacaccaccagcaagccctaaatcaaatatcaacatgtactcgtctagtctcccattcaaatccattattacaagcgcagcccctctgatttctagtccactaaagtctgtagtgagccccgttaagtcagcggtcgatgtgatatcaagcgccaagatcactatggcctcctctctctccagccccgtgaaacagatgcctggacacgctgaggtcgcactggtgaacggaagcatcagtcctcttaaatacccctcctcttccaccctcataaacggctgtaaagctaccgccacccttcaggagaaaattagttctgccactaattccgtgtctagtgtggtgtctgcagccactgatacagttgagaaggttttttctactacaaccgcgatgccctttagtcccctgcggtcctatgtaagtgccgctcctagtgcctttcagtccctgcgcacgccatcagcctcagctttgtacacgtcactggggagctcaatcagtgccactacaagcagcgtgacatccagcatcattacagtaccagtgtacagcgtggtgaacgtgctcccggaaccagctctaaaaaagctaccagactcgaacagctttacaaagtctgcagcagccctgctgagtcctataaaaacgctcaccacagagacccaccctcagccacacttttcccgcacgagtagtcctgtcaaatcctccttgttcttggccccttctgccttgaagctttcaactccctcgtctctgagttcaagtcaggagattctcaaggacgtcgctgagatgaaggaagatttgatgaggatgacggctattttgcagaccgacgttcctgaggagaaacccttccagcctgaactgcccaaggaaggcagaatcgacgacgaagagccctttaaaattgttgagaaagtgaaagaagatctggtgaaagtgtcggaaattctgaagaaagacgtctgcgttgacaacaaaggatctcccaagagcccaaaatcagacaagggccacagtcccgaggacgactggattgagtttagctccgaagagatcagggaggcacggcaacaggccgcagcatcccagagtccatccctgcccgagcgcgtccaggttaaggccaaagcagcttccgaaaaagattacaatctgaccaaagtgattgattacctgaccaacgacattggctcttcgtcgctgactaacctcaaatataagttcgaagatgccaagaaagatggtgaggaacgtcaaaaacgggtactaaagcctgcaattgctctgcaagaacacaagttgaagatgccaccagctagcatgcgcacctctacctcagagaaggagctttgtaaaatggcggattcattttttggcactgatacaattctggagagtccagatgattttagtcagcacgatcaggataagtctcccctgagcgactccgggttcgagacccggtccgaaaagacgccatctgctccacagagtgcagagagcaccggtcccaagccactgttccatgaggtccctatcccacctgtgataacagagactaggacggaggtggttcacgtgatcagatcctatgacccttctgctggcgacgtgcctcagacacagcccgaggaacccgtgtcccccaagccatcacccaccttcatggaactggaaccaaagcctaccacctcctcaattaaagaaaaagtgaaggccttccagatgaaagcaagctccgaggaggacgaccacaatcgagttttatccaaaggcatgcgggtgaaggaggaaactcatattaccaccactacgcgcatggtctatcattcccctccagggggagagggcgcaagcgagaggatcgaggaaaccatgtctgttcatgatattatgaaagcctttcagtccggcagagacccatccaaggagctggctgggctgttcgagcacaagagcgccgtctcccctgacgtacataaatctgccgcagagactagcgcacagcacgcagagaaggacaaccagatgaaacctaagctggagaggataattgaggtccacatcgagaaaggcaatcaggcagagccaaccgaggtcattattcgggagaccaagaagcatcctgagaaggaaatgtacgtttaccagaaggacctcagccgaggggacattaatctcaaggattttttacctgagaagcacgacgcgtttccatgtagcgaagaacagggtcaacaagaggaagaggaacttaccgccgaagagtcactgcctagttacttggagagctcgcgggtcaacaccccagtgagccaagaggaggatagccgtccctcaagtgcccagctcatctcagacgactcatacaagactttgaaactgctgtcccagcattcaatcgagtatcatgacgatgaattgtcagagctccgtggtgagagttatagattcgccgagaaaatgctgctcagtgagaaactcgacgtttcccactcagataccgaagagtcagttaccgaccatgccggaccaccatcctcagagctgcagggcagtgataaacgaagtcgagagaagatcgccacggctcctaaaaaggagattctgagtaaaatctacaaggatgtgtctgaaaacggggtcggaaaggtatcaaaggatgagcatttcgacaaagtgacagtgctgcattactccggaaacgtctcttctccaaagcacgccatgtggatgcggttcactgaggaccgcctggaccgaggccgagagaagttgatctatgaagatagagtggatcgcacagttaaggaagcggaagagaagctgactgaagtgagtcagttcttccgcgataaaacagagaaactgaacgacgagctgcagagccctgaaaagaaggctcggccaaagaacggtaaagaatactcgtcgcagtctcctacaagctcttctccggaaaaggttctcctgaccgagctacttgccagtaatgacgagtgggtgaaggcccgtcagcatggtcccgacggccaggggtttccaaaagccgaagaaaaagccccaagccttccatcttcccccgagaagatggttttgtcccagcaaacagaggacagcaagtcaaccgtggaagctaagggctcgatttcccagtctaaggcacctgacggcccacagagtggattccaactgaagcaatcaaaactcagctctatacgcttgaagttcgagcaggggactcatgcaaagtccaaagacatgagccaagaggaccgcaagtccgacggccagtcacggatccctgtgaaaaaaattcaggagtccaaactgcctgtgtaccaggtttttgcacgggagaaacaacagaaggccattgacctccccgatgagtccgtctcggtccagaaggatttcatggtgctgaagacaaaagacgaacatgcccagtctaacgaaatcgtggttaatgacagcgggagtgataatgtaaagaaacagcgtacagaaatgtcttcaaaagctatgcctgacagtttctcagagcagcaagccaaagacctggcctgtcacatcactagcgacctggccacccgcggaccatgggacaaaaaagtgttccggacttgggagtccagcggagctacgaacaacaaaagtcagaaggaaaagctgtctcacgtattagtgcacgatgtcagagagaatcacataggacatcccgagagcaagtcagtcgaccagaagaatgaattcatgtccgtcaccgagagggaaagaaaactcttgaccaatgggtccctgagtgagattaaggagatgaccgtgaagagtccttctaagaaggtgttatatcgcgaatatgtcgtcaaggagggcgaccacccaggaggccttctcgaccagccctcgagacggagtgagtcatctgcagtgagccatattccggtgcgtgtcgcggatgaacgaagaatgctatcttctaacatccccgacgggttctgcgagcaaagcgcttttcccaaacatgagctgtctcaaaaattgagtcagagctcaatgagcaaagaaactgtggagacacaacattttaatagcattgaggacgagaaggttacttactccgagatatcaaaggtgtccaaacatcagagttatgtggggctgtgtccccctctggaagaaaccgaaacatctcccacaaagagtccagattcactcgaattcagccccggaaaagaatccccatcctcagacgtattcgatcacagcccaattgacgggctggagaaactagcccctctggcccagactgaagggggaaaggagattaagaccctgcctgtctatgtctctttcgtacaagtgggtaaacaatacgagaaggagatccaacaggggggtgtcaagaagattatttcccaggaatgcaagacagtgcaagaaactagaggcaccttctataccacacggcagcaaaagcagcccccttcccctcaggggagccctgaggacgatacgctcgagcaggtctcattcttggattcctctggaaagagtcctctgactcccgaaacaccctcttccgaggaggtgagttacgagtttaccagcaaaactcccgattcccttattgcctacattcctggtaaaccgtccccaataccagaggtgtctgaggagtctgaggaagaggagcaggctaaaagcacttccttaaagcaaaccaccgtggaagaaacggcggttgagcgagagatgcccaatgacgtcagcaaagattctaaccagcggcctaaaaacaatagagtggcctacatcgaatttccgcctcctcctcccctggatgctgaccagattgaaagcgataaaaagcatcattacctccccgagaaggaggtggacatgatcgaggtgaacctacaagatgaacacgataaataccagctggctgaacctgtcatcagggttcagcccccttcccctgtaccacctggcgcagacgtcagtgatagctcagatgatgagtctatttaccagcctgtgcccgtaaagaaatatacattcaagttgaaggaggtggatgatgaacagaaggagaaaccaaaagcgtccgctgaaaaggcatcaaatcaaaaagaactggagagcaacgggtcaggcaaggataatgaattcggactggggcttgacagtcctcagaatgagatcgcacagaacggcaacaatgaccagtctatcactgagtgcagcatcgccacaactgctgaattctcacatgacaccgatgcaaccgagattgactccctcgacggatatgatctccaggacgaagatgatggccttactgagtccgacagcaaactgcctatccaggccatggagataaagaaagacatttggaacactgaggggatcctgaagccagcagataggtcattttctcagtccaaacttgaagttatcgaggaagaaggcaaggtgggccctgatgaggataaaccaccttccaagagttctagcagcgagaaaactcctgataagactgaccagaagtctggtgctcagttttttacactcgaaggcaggcatcctgatcggtctgttttccctgatacttatttctcatacaaggtggatgaggagttcgccacgcccttcaaaaccgtggcgacgaaaggcctcgactttgatccttggagcaacaaccgcggtgatgatgaggtattcgactcaaaaagtcgtgaagacgaaaccaaaccattcggccttgccgtggaagataggtcacctgcgactactccagatacaacacccgcacgcacgcccacggacgagagcactcctacatccgagccaaacccgtttcccttccacgagggtaagatgtttgaaatgacccgatcaggggcaatcgatatgtccaagcgagactttgttgaagagcggctgcaatttttccagataggcgaacacacctcagaaggcaaatccggagaccagggggagggggataaatctatggttaccgccactccgcagccacaaagcggggatactaccgtggaaaccaacttggagcgaaatgtggagacacctacagtggagccaaacccctccatcccaacaagtggtgagtgccaagaggggacaagcagctcaggcagcctagaaaagtcagcagccgctaccaacacctctaaggtggacccaaagctgcggacccctatcaagatggggatttcagcaagcacgatgacgatgaaaaaggagggaccaggggagatcaccgataaaatcgaggccgtgatgacatcatgtcaaggactggagaacgaaaccatcacaatgattagtaacaccgctaactcacaaatgggtgtaaggccccatgaaaagcacgacttccagaaagataatttcaacaataacaacaatctagattcttccacaattcaaacggataacatcatgtctaatatcgttctgactgaacactccgccccaacttgcactactgagaaggacaatccagttaaggtgtccagcggaaagaaaaccggcgtattgcaggggcactgtgtacgcgataaacagaaagttctcggtgagcagcagaaaaccaaggagctaattggtattcggcagaaatctaaattgccaattaaggcaactagcccgaaagatacctttccccctaaccacatgagcaatacgaaagcaagtaaaatgaagcaagtgtcacagagcgagaagactaaagcactgaccacctccagctgtgtggatgtcaagtctcggatcccggtcaagaatactcacagggataacattatagccgtaagaaaggcctgtgccacacagaaacagggccagcctgagaagggaaaggccaaacagctccctagcaaactgccggtcaaggtgcgcagcacgtgcgttaccacaacaactaccaccgcgactaccacgaccaccacaaccacaaccactactactagttgtactgtcaaagtgagaaaaagtcaacttaaggaggtttgcaaacacagcatcgagtactttaaaggaatctccggggaaacgctgaagctagtggataggctgagcgaggaagaaaaaaaaatgcaatccgagctgtccgatgaagaggagtccaccagccgaaacacctcgctatccgaaacatctagagggggacagcccagcgtgaccaccaaatcagccagagacaaaaagaccgaggccgcacctctgaagtccaagagcgaaaaagcgggaagcgagaagcgcagctccagaaggactggcccacagagcccttgcgagagaaccgacatcagaatggctattgtggccgatcacctgggcctgtcctggaccgaactcgccagggagctgaatttctctgttgacgagatcaatcagattagagtcgaaaaccctaactccctcatttctcagtcattcatgttacttaagaagtgggtgacacgggatgggaaaaatgccactacagacgcacttaccagcgtcttaacaaagatcaacagaatcgacatcgtcacgcttctcgaaggacccatctttgattatgggaatataagtggtacccggagttttgccgacgagaataacgtattccacgacccggtggacggttggcagaacgagacttcatctggcaacctcgaatcatgtgcccaggccaggcgagtgaccgggggtctgctggataggctggacgattctcctgaccagtgtagagatagtatcacctcttatctgaaaggcgaggccggaaaattcgaggccaacggcagccatactgaaatcacaccagaggctaagaccaagtcatacttcccagagtcgcaaaatgacgtaggcaaacagtccacaaaagagactctgaagcctaagattcatggctctggacacgtcgaagaaccagccagtcccctggctgcctaccaaaagagcctcgaagagacatcgaagctgatcattgaagaaacaaagccatgcgtgccagtttccatgaagaaaatgtctaggacaagtccagcagacggaaagccgcgtctatcacttcatgaggaggagggctctagcggaagcgagcagaagcagggcgaaggtttcaaggtgaagaccaagaaggagatcagacacgttgagaaaaagtctcattcatat

SEQ ID NO: 206859 - DNA, 13134 bp, Artificial Sequence
  derived and/or modified sequence
atggcccacgccgccagccagctgaagaagaacagagacctggagatcaacgccgaggaggagcccgagaagaagagaaagcacagaaagagaagcagagacagaaagaagaagagcgacgccaacgccagctacctgagagccgccagagccggccacctggagaaggccctggactacatcaagaacggcgtggacatcaacatctgcaaccagaacggcctgaacgccctgcacctggccagcaaggagggccacgtggaggtggtgagcgagctgctgcagagagaggccaacgtggacgccgccaccaagaagggcaacaccgccctgcacatcgccagcctggccggccaggccgaggtggtgaaggtgctggtgaccaacggcgccaacgtgaacgcccagagccagaacggcttcacccccctgtacatggccgcccaggagaaccacctggaggtggtgaagttcctgctggacaacggcgccagccagagcctggccaccgaggacggcttcacccccctggccgtggccctgcagcagggccacgaccaggtggtgagcctgctgctggagaacgacaccaagggcaaggtgagactgcccgccctgcacatcgccgccagaaaggacgacaccaaggccgccgccctgctgctgcagaacgacaacaacgccgacgtggagagcaagagcggcttcacccccctgcacatcgccgcccactacggcaacatcaacgtggccaccctgctgctgaacagagccgccgccgtggacttcaccgccagaaacgacatcacccccctgcacgtggccagcaagagaggcaacgccaacatggtgaagctgctgctggacagaggcgccaagatcgacgccaagaccagagacggcctgacccccctgcactgcggcgccagaagcggccacgagcaggtggtggagatgctgctggacagagccgcccccatcctgagcaagaccaagaacggcctgagccccctgcacatggccacccagggcgaccacctgaactgcgtgcagctgctgctgcagcacaacgtgcccgtggacgacgtgaccaacgactacctgaccgccctgcacgtggccgcccactgcggccactacaaggtggccaaggtgctgctggacaagaaggccaaccccaacgccaaggccctgaacggcttcacccccctgcacatcgcctgcaagaagaacagaatcaaggtgatggagctgctgctgaagcacggcgccagcatccaggccgtgaccgagagcggcctgacccccatccacgtggccgccttcatgggccacgtgaacatcgtgagccagctgatgcaccacggcgccagccccaacaccaccaacgtgagaggcgagaccgccctgcacatggccgccagaagcggccaggccgaggtggtgagatacctggtgcaggacggcgcccaggtggaggccaaggccaaggacgaccagacccccctgcacatcagcgccagactgggcaaggccgacatcgtgcagcagctgctgcagcagggcgccagccccaacgccgccaccaccagcggctacacccccctgcacctgagcgccagagagggccacgaggacgtggccgccttcctgctggaccacggcgccagcctgagcatcaccaccaagaagggcttcacccccctgcacgtggccgccaagtacggcaagctggaggtggccaacctgctgctgcagaagagcgccagccccgacgccgccggcaagagcggcctgacccccctgcacgtggccgcccactacgacaaccagaaggtggccctgctgctgctggaccagggcgccagcccccacgccgccgccaagaacggctacacccccctgcacatcgccgccaagaagaaccagatggacatcgccaccaccctgctggagtacggcgccgacgccaacgccgtgaccagacagggcatcgccagcgtgcacctggccgcccaggagggccacgtggacatggtgagcctgctgctgggcagaaacgccaacgtgaacctgagcaacaagagcggcctgacccccctgcacctggccgcccaggaggacagagtgaacgtggccgaggtgctggtgaaccagggcgcccacgtggacgcccagaccaagatgggctacacccccctgcacgtgggctgccactacggcaacatcaagatcgtgaacttcctgctgcagcacagcgccaaggtgaacgccaagaccaagaacggctacacccccctgcaccaggccgcccagcagggccacacccacatcatcaacgtgctgctgcagaacaacgccagccccaacgagctgaccgtgaacggcaacaccgccctgggcatcgccagaagactgggctacatcagcgtggtggacaccctgaagatcgtgaccgaggagaccatgaccaccaccaccgtgaccgagaagcacaagatgaacgtgcccgagaccatgaacgaggtgctggacatgagcgacgacgaggtgagaaaggccaacgcccccgagatgctgagcgacggcgagtacatcagcgacgtggaggagggcgaggacgccatgaccggcgacaccgacaagtacctgggcccccaggacctgaaggagctgggcgacgacagcctgcccgccgagggctacatgggcttcagcctgggcgccagaagcgccagcctgagaagcttcagcagcgacagaagctacaccctgaacagaagcagctacgccagagacagcatgatgatcgaggagctgctggtgcccagcaaggagcagcacctgaccttcaccagagagttcgacagcgacagcctgagacactacagctgggccgccgacaccctggacaacgtgaacctggtgagcagccccatccacagcggcttcctggtgagcttcatggtggacgccagaggcggcagcatgagaggcagcagacaccacggcatgagaatcatcatcccccccagaaagtgcaccgcccccaccagaatcacctgcagactggtgaagagacacaagctggccaaccccccccccatggtggagggcgagggcctggccagcagactggtggagatgggccccgccggcgcccagttcctgggccccgtgatcgtggagatcccccacttcggcagcatgagaggcaaggagagagagctgatcgtgctgagaagcgagaacggcgagacctggaaggagcaccagttcgacagcaagaacgaggacctgaccgagctgctgaacggcatggacgaggagctggacagccccgaggagctgggcaagaagagaatctgcagaatcatcaccaaggacttcccccagtacttcgccgtggtgagcagaatcaagcaggagagcaaccagatcggccccgagggcggcatcctgagcagcaccaccgtgcccctggtgcaggccagcttccccgagggcgccctgaccaagagaatcagagtgggcctgcaggcccagcccgtgcccgacgagatcgtgaagaagatcctgggcaacaaggccaccttcagccccatcgtgaccgtggagcccagaagaagaaagttccacaagcccatcaccatgaccatccccgtgcccccccccagcggcgagggcgtgagcaacggctacaagggcgacaccacccccaacctgagactgctgtgcagcatcaccggcggcaccagccccgcccagtgggaggacatcaccggcaccacccccctgaccttcatcaaggactgcgtgagcttcaccaccaacgtgagcgccagattctggctggccgactgccaccaggtgctggagaccgtgggcctggccacccagctgtacagagagctgatctgcgtgccctacatggccaagttcgtggtgttcgccaagatgaacgaccccgtggagagcagcctgagatgcttctgcatgaccgacgacaaggtggacaagaccctggagcagcaggagaacttcgaggaggtggccagaagcaaggacatcgaggtgctggagggcaagcccatctacgtggactgctacggcaacctggcccccctgaccaagggcggccagcagctggtgttcaacttctacagcttcaaggagaacagactgcccttcagcatcaagatcagagacaccagccaggagccctgcggcagactgagcttcctgaaggagcccaagaccaccaagggcctgccccagaccgccgtgtgcaacctgaacatcaccctgcccgcccacaagaaggagaccgagagcgaccaggacgacgagatcgagaagaccgacagaagacagagcttcgccagcctggccctgagaaagagatacagctacctgaccgagcccggcatgatcgagagaagcaccggcgccaccagaagcctgcccaccacctacagctacaagcccttcttcagcaccagaccctaccagagctggaccaccgcccccatcaccgtgcccggccccgccaagagcggcttcaccagcctgagcagcagcagcagcaacacccccagcgccagccccctgaagagcatctggagcgtgagcacccccagccccatcaagagcaccctgggcgccagcaccaccagcagcgtgaagagcatcagcgacgtggccagccccatcagaagcttcagaaccatgagcagccccatcaagaccgtggtgagccagagcccctacaacatccaggtgagcagcggcaccctggccagagcccccgccgtgaccgaggccacccccctgaagggcctggccagcaacagcaccttcagcagcagaaccagccccgtgaccaccgccggcagcctgctggagagaagcagcatcaccatgaccccccccgccagccccaagagcaacatcaacatgtacagcagcagcctgcccttcaagagcatcatcaccagcgccgcccccctgatcagcagccccctgaagagcgtggtgagccccgtgaagagcgccgtggacgtgatcagcagcgccaagatcaccatggccagcagcctgagcagccccgtgaagcagatgcccggccacgccgaggtggccctggtgaacggcagcatcagccccctgaagtaccccagcagcagcaccctgatcaacggctgcaaggccaccgccaccctgcaggagaagatcagcagcgccaccaacagcgtgagcagcgtggtgagcgccgccaccgacaccgtggagaaggtgttcagcaccaccaccgccatgcccttcagccccctgagaagctacgtgagcgccgcccccagcgccttccagagcctgagaacccccagcgccagcgccctgtacaccagcctgggcagcagcatcagcgccaccaccagcagcgtgaccagcagcatcatcaccgtgcccgtgtacagcgtggtgaacgtgctgcccgagcccgccctgaagaagctgcccgacagcaacagcttcaccaagagcgccgccgccctgctgagccccatcaagaccctgaccaccgagacccacccccagccccacttcagcagaaccagcagccccgtgaagagcagcctgttcctggcccccagcgccctgaagctgagcacccccagcagcctgagcagcagccaggagatcctgaaggacgtggccgagatgaaggaggacctgatgagaatgaccgccatcctgcagaccgacgtgcccgaggagaagcccttccagcccgagctgcccaaggagggcagaatcgacgacgaggagcccttcaagatcgtggagaaggtgaaggaggacctggtgaaggtgagcgagatcctgaagaaggacgtgtgcgtggacaacaagggcagccccaagagccccaagagcgacaagggccacagccccgaggacgactggatcgagttcagcagcgaggagatcagagaggccagacagcaggccgccgccagccagagccccagcctgcccgagagagtgcaggtgaaggccaaggccgccagcgagaaggactacaacctgaccaaggtgatcgactacctgaccaacgacatcggcagcagcagcctgaccaacctgaagtacaagttcgaggacgccaagaaggacggcgaggagagacagaagagagtgctgaagcccgccatcgccctgcaggagcacaagctgaagatgccccccgccagcatgagaaccagcaccagcgagaaggagctgtgcaagatggccgacagcttcttcggcaccgacaccatcctggagagccccgacgacttcagccagcacgaccaggacaagagccccctgagcgacagcggcttcgagaccagaagcgagaagacccccagcgccccccagagcgccgagagcaccggccccaagcccctgttccacgaggtgcccatcccccccgtgatcaccgagaccagaaccgaggtggtgcacgtgatcagaagctacgaccccagcgccggcgacgtgccccagacccagcccgaggagcccgtgagccccaagcccagccccaccttcatggagctggagcccaagcccaccaccagcagcatcaaggagaaggtgaaggccttccagatgaaggccagcagcgaggaggacgaccacaacagagtgctgagcaagggcatgagagtgaaggaggagacccacatcaccaccaccaccagaatggtgtaccacagcccccccggcggcgagggcgccagcgagagaatcgaggagaccatgagcgtgcacgacatcatgaaggccttccagagcggcagagaccccagcaaggagctggccggcctgttcgagcacaagagcgccgtgagccccgacgtgcacaagagcgccgccgagaccagcgcccagcacgccgagaaggacaaccagatgaagcccaagctggagagaatcatcgaggtgcacatcgagaagggcaaccaggccgagcccaccgaggtgatcatcagagagaccaagaagcaccccgagaaggagatgtacgtgtaccagaaggacctgagcagaggcgacatcaacctgaaggacttcctgcccgagaagcacgacgccttcccctgcagcgaggagcagggccagcaggaggaggaggagctgaccgccgaggagagcctgcccagctacctggagagcagcagagtgaacacccccgtgagccaggaggaggacagcagacccagcagcgcccagctgatcagcgacgacagctacaagaccctgaagctgctgagccagcacagcatcgagtaccacgacgacgagctgagcgagctgagaggcgagagctacagattcgccgagaagatgctgctgagcgagaagctggacgtgagccacagcgacaccgaggagagcgtgaccgaccacgccggcccccccagcagcgagctgcagggcagcgacaagagaagcagagagaagatcgccaccgcccccaagaaggagatcctgagcaagatctacaaggacgtgagcgagaacggcgtgggcaaggtgagcaaggacgagcacttcgacaaggtgaccgtgctgcactacagcggcaacgtgagcagccccaagcacgccatgtggatgagattcaccgaggacagactggacagaggcagagagaagctgatctacgaggacagagtggacagaaccgtgaaggaggccgaggagaagctgaccgaggtgagccagttcttcagagacaagaccgagaagctgaacgacgagctgcagagccccgagaagaaggccagacccaagaacggcaaggagtacagcagccagagccccaccagcagcagccccgagaaggtgctgctgaccgagctgctggccagcaacgacgagtgggtgaaggccagacagcacggccccgacggccagggcttccccaaggccgaggagaaggcccccagcctgcccagcagccccgagaagatggtgctgagccagcagaccgaggacagcaagagcaccgtggaggccaagggcagcatcagccagagcaaggcccccgacggcccccagagcggcttccagctgaagcagagcaagctgagcagcatcagactgaagttcgagcagggcacccacgccaagagcaaggacatgagccaggaggacagaaagagcgacggccagagcagaatccccgtgaagaagatccaggagagcaagctgcccgtgtaccaggtgttcgccagagagaagcagcagaaggccatcgacctgcccgacgagagcgtgagcgtgcagaaggacttcatggtgctgaagaccaaggacgagcacgcccagagcaacgagatcgtggtgaacgacagcggcagcgacaacgtgaagaagcagagaaccgagatgagcagcaaggccatgcccgacagcttcagcgagcagcaggccaaggacctggcctgccacatcaccagcgacctggccaccagaggcccctgggacaagaaggtgttcagaacctgggagagcagcggcgccaccaacaacaagagccagaaggagaagctgagccacgtgctggtgcacgacgtgagagagaaccacatcggccaccccgagagcaagagcgtggaccagaagaacgagttcatgagcgtgaccgagagagagagaaagctgctgaccaacggcagcctgagcgagatcaaggagatgaccgtgaagagccccagcaagaaggtgctgtacagagagtacgtggtgaaggagggcgaccaccccggcggcctgctggaccagcccagcagaagaagcgagagcagcgccgtgagccacatccccgtgagagtggccgacgagagaagaatgctgagcagcaacatccccgacggcttctgcgagcagagcgccttccccaagcacgagctgagccagaagctgagccagagcagcatgagcaaggagaccgtggagacccagcacttcaacagcatcgaggacgagaaggtgacctacagcgagatcagcaaggtgagcaagcaccagagctacgtgggcctgtgcccccccctggaggagaccgagaccagccccaccaagagccccgacagcctggagttcagccccggcaaggagagccccagcagcgacgtgttcgaccacagccccatcgacggcctggagaagctggcccccctggcccagaccgagggcggcaaggagatcaagaccctgcccgtgtacgtgagcttcgtgcaggtgggcaagcagtacgagaaggagatccagcagggcggcgtgaagaagatcatcagccaggagtgcaagaccgtgcaggagaccagaggcaccttctacaccaccagacagcagaagcagccccccagcccccagggcagccccgaggacgacaccctggagcaggtgagcttcctggacagcagcggcaagagccccctgacccccgagacccccagcagcgaggaggtgagctacgagttcaccagcaagacccccgacagcctgatcgcctacatccccggcaagcccagccccatccccgaggtgagcgaggagagcgaggaggaggagcaggccaagagcaccagcctgaagcagaccaccgtggaggagaccgccgtggagagagagatgcccaacgacgtgagcaaggacagcaaccagagacccaagaacaacagagtggcctacatcgagttccccccccccccccccctggacgccgaccagatcgagagcgacaagaagcaccactacctgcccgagaaggaggtggacatgatcgaggtgaacctgcaggacgagcacgacaagtaccagctggccgagcccgtgatcagagtgcagccccccagccccgtgccccccggcgccgacgtgagcgacagcagcgacgacgagagcatctaccagcccgtgcccgtgaagaagtacaccttcaagctgaaggaggtggacgacgagcagaaggagaagcccaaggccagcgccgagaaggccagcaaccagaaggagctggagagcaacggcagcggcaaggacaacgagttcggcctgggcctggacagcccccagaacgagatcgcccagaacggcaacaacgaccagagcatcaccgagtgcagcatcgccaccaccgccgagttcagccacgacaccgacgccaccgagatcgacagcctggacggctacgacctgcaggacgaggacgacggcctgaccgagagcgacagcaagctgcccatccaggccatggagatcaagaaggacatctggaacaccgagggcatcctgaagcccgccgacagaagcttcagccagagcaagctggaggtgatcgaggaggagggcaaggtgggccccgacgaggacaagccccccagcaagagcagcagcagcgagaagacccccgacaagaccgaccagaagagcggcgcccagttcttcaccctggagggcagacaccccgacagaagcgtgttccccgacacctacttcagctacaaggtggacgaggagttcgccacccccttcaagaccgtggccaccaagggcctggacttcgacccctggagcaacaacagaggcgacgacgaggtgttcgacagcaagagcagagaggacgagaccaagcccttcggcctggccgtggaggacagaagccccgccaccacccccgacaccacccccgccagaacccccaccgacgagagcacccccaccagcgagcccaaccccttccccttccacgagggcaagatgttcgagatgaccagaagcggcgccatcgacatgagcaagagagacttcgtggaggagagactgcagttcttccagatcggcgagcacaccagcgagggcaagagcggcgaccagggcgagggcgacaagagcatggtgaccgccaccccccagccccagagcggcgacaccaccgtggagaccaacctggagagaaacgtggagacccccaccgtggagcccaaccccagcatccccaccagcggcgagtgccaggagggcaccagcagcagcggcagcctggagaagagcgccgccgccaccaacaccagcaaggtggaccccaagctgagaacccccatcaagatgggcatcagcgccagcaccatgaccatgaagaaggagggccccggcgagatcaccgacaagatcgaggccgtgatgaccagctgccagggcctggagaacgagaccatcaccatgatcagcaacaccgccaacagccagatgggcgtgagaccccacgagaagcacgacttccagaaggacaacttcaacaacaacaacaacctggacagcagcaccatccagaccgacaacatcatgagcaacatcgtgctgaccgagcacagcgcccccacctgcaccaccgagaaggacaaccccgtgaaggtgagcagcggcaagaagaccggcgtgctgcagggccactgcgtgagagacaagcagaaggtgctgggcgagcagcagaagaccaaggagctgatcggcatcagacagaagagcaagctgcccatcaaggccaccagccccaaggacaccttcccccccaaccacatgagcaacaccaaggccagcaagatgaagcaggtgagccagagcgagaagaccaaggccctgaccaccagcagctgcgtggacgtgaagagcagaatccccgtgaagaacacccacagagacaacatcatcgccgtgagaaaggcctgcgccacccagaagcagggccagcccgagaagggcaaggccaagcagctgcccagcaagctgcccgtgaaggtgagaagcacctgcgtgaccaccaccaccaccaccgccaccaccaccaccaccaccaccaccaccaccaccaccagctgcaccgtgaaggtgagaaagagccagctgaaggaggtgtgcaagcacagcatcgagtacttcaagggcatcagcggcgagaccctgaagctggtggacagactgagcgaggaggagaagaagatgcagagcgagctgagcgacgaggaggagagcaccagcagaaacaccagcctgagcgagaccagcagaggcggccagcccagcgtgaccaccaagagcgccagagacaagaagaccgaggccgcccccctgaagagcaagagcgagaaggccggcagcgagaagagaagcagcagaagaaccggcccccagagcccctgcgagagaaccgacatcagaatggccatcgtggccgaccacctgggcctgagctggaccgagctggccagagagctgaacttcagcgtggacgagatcaaccagatcagagtggagaaccccaacagcctgatcagccagagcttcatgctgctgaagaagtgggtgaccagagacggcaagaacgccaccaccgacgccctgaccagcgtgctgaccaagatcaacagaatcgacatcgtgaccctgctggagggccccatcttcgactacggcaacatcagcggcaccagaagcttcgccgacgagaacaacgtgttccacgaccccgtggacggctggcagaacgagaccagcagcggcaacctggagagctgcgcccaggccagaagagtgaccggcggcctgctggacagactggacgacagccccgaccagtgcagagacagcatcaccagctacctgaagggcgaggccggcaagttcgaggccaacggcagccacaccgagatcacccccgaggccaagaccaagagctacttccccgagagccagaacgacgtgggcaagcagagcaccaaggagaccctgaagcccaagatccacggcagcggccacgtggaggagcccgccagccccctggccgcctaccagaagagcctggaggagaccagcaagctgatcatcgaggagaccaagccctgcgtgcccgtgagcatgaagaagatgagcagaaccagccccgccgacggcaagcccagactgagcctgcacgaggaggagggcagcagcggcagcgagcagaagcagggcgagggcttcaaggtgaagaccaagaaggagatcagacacgtggagaagaagagccacagctag

SEQ ID NO: 206860 - protein, 354 aa, Artificial Sequence
  derived and/or modified sequence
MGCTLSAEERAALERSKAIEKNLKEDGISAAKDVKLLLLGAGESGKSTIVKQMKIIHEDGFSGEDVKQYKPVVYSNTIQSLAAIVRAMDTLGIEYGDKERKADAKMVCDVVSRMEDTEPFSAELLSAMMRLWGDSGIQECFNRSREYQLNDSAKYYLDSLDRIGAADYQPTEQDILRTRVKTTGIVETHFTFKNLHFRLFDVGGQRSERKKWIHCFEDVTAIIFCVALSGYDQVLHEDETTNRMHESLMLFDSICNNKFFIDTSIILFLNKKDLFGEKIKKSPLTICFPEYTGPNTYEDAAAYIQAQFESKNRSPNKEIYCHMTCATDTNNIQVVFDAVTDIIIANNLRGCGLY

SEQ ID NO: 206861 - DNA, 1065 bp, Artificial Sequence
  derived and/or modified sequence
atgggatgtacactcagcgccgaggagagggcggcgctggagaggagcaaagccatcgagaaaaacctgaaggaggacgggataagcgcagctaaggatgtgaagctgctcctgctgggagccggcgaaagcggcaagtccactattgttaaacagatgaaaattattcatgaagatggctttagcggggaagacgtgaaacaatataagccagtggtgtactctaacaccattcaatccctggcggccatagtacgcgccatggacacactgggtatagaatacggagacaaggagcggaaagctgatgccaagatggtttgcgatgtggtgagcaggatggaggataccgaaccattcagcgccgagctgctttctgctatgatgcgcctttggggggattcagggattcaggagtgttttaacaggtccagggagtaccagctgaatgacagcgccaagtactacctggattctcttgaccggattggtgcagccgattaccagccaaccgagcaggatatcctcagaaccagagtgaaaacgaccggcatcgtagaaactcatttcacattcaaaaacctgcactttaggctgttcgatgtggggggccagcgttccgagaggaagaagtggatccattgtttcgaggatgtaacagcgataattttttgcgtcgcactttcgggctacgaccaggtactccatgaagacgaaaccacgaaccggatgcatgagtccttgatgctgttcgattctatctgcaacaataaattctttattgacactagtatcatcctcttcttgaacaaaaaagacctgtttggcgagaagatcaaaaagtcacctctgactatttgttttcctgaatatactggccccaacacttatgaagacgccgctgcgtacatccaggcccagttcgaatccaaaaataggagcccgaataaggagatttactgtcatatgacatgcgccaccgatacgaataacattcaggtggtgtttgacgcagtgactgacattattatcgctaataacctgagaggctgcggattgtattag

SEQ ID NO: 206862 - DNA, 3279 bp, Artificial Sequence
  derived and/or modified sequence
actcgcgcgctgcgctggcctcctccccgccccgggcccaggcgcgcgcgcgcttgttcgctctcccattttttttttcccctccctccctgcctctctctctctccctctccctcgagctcccggctggctgcggctccctggcgctctccctctctctccggtaggctcaccgagcgatgcgagctctgggagacagcgacgccgcctcccgctagagacctgcccctcggcccggccccctgcccaaccctgcccagcgcgcgggggtcggcgaaggcgccgcggacgcaccgacggctgaagagcggcgatgcacatgcactagcagcaccccctaactcactccctccacatcccgcgccgccgccgccgcctcctccacctcctcctccgccgccgccgcctcctcctcctccggcagccgcggcagcaggacccaccctgccccccaccccaccctctgtcggctccggctgcggctccagcctcgactattattttatttattttgggtcgtgcacaagcctcagtgcctgcagtccgcgcctcctcggcccgcgggcgcctcctcccttggctccggagccccagaccccggccaccctcgattcgacaaccccagacccctgccagctgccgcgagtctccgctgctggaatcttgttagcggctgtctttttggagggttctggtttcccgacatttttgtttccagcccaggagaggatatcgtgattttccccccttgagcccaggctctgctctctgggggggtggggggcgctccaagccggggagccgtgccagccgagtcgtgcgggctgtggcagggaaggggccaccatgggatgtactctgagcgcagaggagagagccgccctcgagcggagcaaggcgattgagaaaaacctcaaagaggatggcatcagcgccgccaaagacgtgaaattactcctgctcggggctggagaatcaggaaaaagcaccattgtgaagcagatgaagatcatccatgaagatggcttctccggagaagacgtgaaacagtacaagcctgttgtctacagcaacactatccagtccctggcagccatcgtccgggccatggacactttgggcatcgaatatggtgataaggagagaaaggctgacgccaagatggtgtgtgatgtggtgagtcggatggaagacaccgagcccttctctgcagagctgctttctgccatgatgcggctctggggcgactcaggaatccaagagtgcttcaaccggtcccgggagtatcagctcaacgactctgccaaatactacctggacagcctggatcggattggggccgccgactaccagcccaccgagcaggacatcctccgaaccagggtcaaaaccactggcatcgtagaaacccacttcacattcaagaacctccacttcaggctgtttgacgtcggaggccagcgatctgaacgcaagaagtggatccattgcttcgaggacgtcacggccatcattttctgtgtcgcgctcagcggctatgaccaggtgctccacgaagacgaaaccacgaaccgcatgcacgagtctctcatgctcttcgactccatctgtaacaacaagttcttcatcgatacctccatcattctcttcctcaacaagaaagatctctttggcgagaagatcaagaagtcacctttgaccatctgctttcctgaatacacaggccccaatacctatgaagacgcagccgcctacatccaagcacaatttgaaagcaaaaaccgctcacccaacaaagaaatatattgtcacatgacttgtgccacagacacgaataacatccaggtggtgttcgacgccgtcaccgacatcatcattgccaacaacctccggggctgcggcttgtactgacctcttgtcctgtatagcaacctatttgactgcttcacggactctttgctgttgacgttgatctcctggtagcatgaccttttggcctttgtaagacacacagcctttctgtatcaagcccctgtctaacctacgaccccagagtgactgacggctgtgtatttctgtagaatgctgtagaatccggttttagttgagtcttcacatttagaatttgaaaggaaaaacagaacatttctcatgtgctttgtagcttaaaaaaaggaaaactcaccatttcatccatatttctttttcttgcaaaacaaacatacccatctgcaccgacgcctgcccccgtcccacctcgcggcgcagcccctggagctcctgctggggggcagggcccatctgccgcctggggctccggtgcggtgcactggtccgaggagtgtgctcaggccgggctttccagaaggccacaggccactgcaaaccctgctgcctgccggccgcccagacaccacagacgccacctggcggccctaagccactcccgccacacgctcactccaggttcgtatagaaaaagcacagctctcactggccagtagctgccaaaaagaacacccatcgtataaggaaatccagccccatagaaaacaatctgcccaccgaccccctttctaaggatagcctttgtaggggttttttggttccttttttttttttttcagtttttgtttttacttttgtcccgccgagtactatgtattaccagccccccaccccacagatcagttttcctagtctttgggaaacgggttgtgttttttttcctttgccgtgttggatttccggtcccggctgacacctcccttcgtgtgtgcgcccctccccacccctgcctttgtttcggtgccctgtgtccgctctctcatgtggggatgtttgtgctgcagacaaaaagaacaaaaaaaaatttttaaataccacaagatggaaaaaaaaaacaaaaaaatttaaaaagatggaatgtagtgtttacattaaagccgccgttttcatgaccaatcctatgtcatttctactttgactaatacccaaaccctaaacctcttcacggtttcacttttaagacttaatctttgctgaagaagaccagtcacagccatttcaaataaagaggaggcaaaaagacaaaacacacaaaaaattaaaaaaaaaaacttaaaaaaaaaaggaaaaaagaaaaaaaagcccacgggtctttgtaagcctttctattcccaatcggtgaggtttctgtgatatcttacacactgccagtctacttctctgactaatggaaaattcctgtgtagctcaataaaagagaatgtttgtctg

SEQ ID NO: 206863 - DNA, 1065 bp, Artificial Sequence
  derived and/or modified sequence
atgggctgcaccctgtctgctgaggagagagctgccctggagaggagcaaggccatcgagaagaacctgaaggaggatggcatctctgctgccaaggatgtgaagctgctgctgctgggcgctggggagagcggcaagagcaccatcgtgaagcagatgaagatcatccatgaagatggcttcagcggggaggatgtgaagcagtacaagcctgtggtgtacagcaacaccatccagagcctggccgccatcgtgcgggccatggacaccctgggcattgaatatggagacaaggagaggaaggcagatgccaagatggtgtgtgatgtggtgtccaggatggaggacacagagcccttctctgctgagctgctgagcgccatgatgaggctgtggggagacagcggcatccaggagtgcttcaacagaagccgggagtaccagctgaatgacagcgccaagtactacctggacagcctggacagaattggagctgctgactaccagcccacagagcaggacatcctgcggaccagggtgaagaccactggaattgtggagacccacttcaccttcaagaacctgcacttccggctgtttgatgtgggcggccagaggtctgagaggaagaagtggatccactgctttgaagatgtgacagccatcatcttctgtgtggccctgagcggctatgaccaggtgctgcatgaagatgagaccaccaacaggatgcatgagagcctgatgctgtttgacagcatctgcaacaacaagttcttcatcgacaccagcatcatcctcttcctgaacaagaaggacctgtttggagagaagatcaagaagagccccctgaccatctgcttccctgagtacacaggccccaacacctatgaagatgctgctgcctacatccaggcccagtttgagagcaagaacagaagccccaacaaggagatctactgccacatgacctgtgccacagacaccaacaacatccaggtggtgtttgatgctgtgacagacatcatcatcgccaacaacctgcggggctgcggcctgtactag

SEQ ID NO: 206864 - DNA, 1065 bp, Artificial Sequence
  derived and/or modified sequence
atgggctgcaccctgagcgccgaggagcgggccgccctggagcggtctaaagccatcgagaaaaacctcaaagaagacggcatttccgctgcaaaagacgttaagctcctcctcttgggcgcaggtgaaagcggtaaaagcacaatcgtgaaacagatgaaaatcatccatgaagacggcttctcaggtgaagatgtcaagcagtataagcccgtggtctattcaaacacgatacaatctctggcagctatagtgagagcgatggatacactaggcatcgaatacggagacaaggagagaaaggctgatgcaaagatggtgtgtgacgtggtaagtcgcatggaagatactgaacccttctcagctgaactcctgtccgccatgatgagactgtggggggactccggcattcaggagtgcttcaacagatcacgcgaataccagcttaatgactccgccaagtactacctggactcacttgaccgtatcggagcagcggattaccagcccaccgagcaggatatcctgcgtacaagagtaaagaccaccggaattgtggagacccacttcactttcaagaatttgcattttaggttgtttgatgttggtggacaaaggtccgaacgcaaaaaatggattcactgttttgaagacgtcactgccatcatcttctgtgtcgctttatcagggtatgaccaggtcctccacgaagatgaaactacaaacaggatgcatgagtcactgatgttatttgattctatttgcaacaataaattcttcattgacacaagtattatcttatttctgaacaagaaggatctgttcggagaaaagatcaagaaaagcccgcttacaatctgctttccagaatataccggacccaatacctacgaggatgccgccgcctacattcaggcacagttcgagagcaaaaaccgcagtccaaacaaagaaatttactgccacatgacctgcgccaccgacaccaataacatacaggtggttttcgatgcagtgaccgacataatcattgcaaacaacctgcgtggttgcggactctactag

SEQ ID NO: 206865 - DNA, 1065 bp, Artificial Sequence
  derived and/or modified sequence
atgggctgcacactgagcgcagaggagagggccgctctggagcgttccaaggctatcgagaagaatctgaaagaggacgggatatcagcagccaaagacgttaaattactgctcctgggggcaggcgagtccgggaaatctactattgtcaaacagatgaaaattattcatgaagatggcttctccggagaggacgtcaaacagtataaaccggtggtctacagcaatactattcagagcttagctgctatcgtgagagccatggacaccttgggcatagaatacggagataaagagcggaaagctgatgccaaaatggtttgcgatgttgtatcccggatggaagacactgaacccttttctgctgagcttttatccgccatgatgcgactctggggcgactcaggcatccaggagtgtttcaaccgatcgcgcgagtaccagctgaatgattccgccaaatattacttggactcactcgacaggattggcgctgctgattaccaacctactgagcaggacatcttgcgcacgagggtgaagacaactgggattgtggagacccactttacatttaagaaccttcattttcgcctcttcgacgtgggaggccagcggtccgagcggaagaaatggattcactgctttgaggatgtgactgctattatattttgcgtagcgttgagcggctatgatcaggttctgcacgaagacgagaccactaacaggatgcacgaatctttaatgctctttgatagcatctgcaacaataaattctttattgacaccagcattattttgttcctcaacaaaaaagatttattcggagaaaagattaagaagagcccactgaccatctgcttcccagaatacacaggccctaatacctatgaggatgcagctgcctacattcaggcgcagtttgagtccaaaaacagatcacccaataaagaaatctactgccacatgacatgcgccacagacaccaataatattcaggtggttttcgatgcggtgacagacatcataattgctaacaacctgagaggctgcggcctatattag

SEQ ID NO: 206866 - DNA, 1065 bp, Artificial Sequence
  derived and/or modified sequence
atgggctgcaccctgagcgccgaggagagagccgccctggagagaagcaaggccatcgagaagaacctgaaggaggacggcatcagcgccgccaaggacgtgaagctgctgctgctgggcgccggcgagagcggcaagagcaccatcgtgaagcagatgaagatcatccacgaggacggcttcagcggcgaggacgtgaagcagtacaagcccgtggtgtacagcaacaccatccagagcctggccgccatcgtgagagccatggacaccctgggcatcgagtacggcgacaaggagagaaaggccgacgccaagatggtgtgcgacgtggtgagcagaatggaggacaccgagcccttcagcgccgagctgctgagcgccatgatgagactgtggggcgacagcggcatccaggagtgcttcaacagaagcagagagtaccagctgaacgacagcgccaagtactacctggacagcctggacagaatcggcgccgccgactaccagcccaccgagcaggacatcctgagaaccagagtgaagaccaccggcatcgtggagacccacttcaccttcaagaacctgcacttcagactgttcgacgtgggcggccagagaagcgagagaaagaagtggatccactgcttcgaggacgtgaccgccatcatcttctgcgtggccctgagcggctacgaccaggtgctgcacgaggacgagaccaccaacagaatgcacgagagcctgatgctgttcgacagcatctgcaacaacaagttcttcatcgacaccagcatcatcctgttcctgaacaagaaggacctgttcggcgagaagatcaagaagagccccctgaccatctgcttccccgagtacaccggccccaacacctacgaggacgccgccgcctacatccaggcccagttcgagagcaagaacagaagccccaacaaggagatctactgccacatgacctgcgccaccgacaccaacaacatccaggtggtgttcgacgccgtgaccgacatcatcatcgccaacaacctgagaggctgcggcctgtactag

SEQ ID NO: 206867 - protein, 174 aa, Artificial Sequence
  derived and/or modified sequence
MGKITFYEDRAFQGRSYETTTDCPNLQPYFSRCNSIRVESGCWMLYERPNYQGQQYLLRRGEYPDYQQWMGLSDSIRSCCLIPQTVSHRLRLYEREDHKGLMMELSEDCPSIQDRFHLSEIRSLHVLEGCWVLYELPNYRGRQYLLRPQEYRRCQDWGAMDAKAGSLRRVVDLY

SEQ ID NO: 206868 - DNA, 525 bp, Artificial Sequence
  derived and/or modified sequence
atggggaagataaccttctacgaggaccgagcctttcaggggcggtcatatgagacaaccaccgactgtccaaatctgcaaccctacttttcaagatgtaatagtatccgagtcgagagcggatgttggatgctttatgaacgacctaactaccagggacaacagtacttgttgagacggggcgagtatcccgattatcagcaatggatggggttgagtgacagcattcgctcatgttgtctgatacctcagaccgtcagtcacaggctgagactgtacgaaagggaagaccataaaggcctaatgatggagctgtcagaagattgccctagcattcaagaccggtttcacctgagtgaaatccggtccctgcatgtgctggaaggatgctgggtgttatatgaactgcctaactacagaggaagacagtaccttttgcgcccacaggaataccggcgctgccaagactggggcgccatggatgcgaaggctgggagtctgaggagggtggtggatctttactag

SEQ ID NO: 206869 - DNA, 525 bp, Artificial Sequence
  derived and/or modified sequence
atgggcaagatcaccttctatgaggaccgggccttccagggccgctcctatgagaccaccacagactgccccaacctgcagccctacttcagccgctgcaacagcatccgggtggagagcggctgctggatgctgtatgaaagacccaactaccagggccagcagtacctgctgcggcggggggagtacccagactaccagcagtggatgggcctgagtgacagcatccgcagctgctgcctgatcccccagacagtgagccaccggctgcggctgtatgagcgggaggaccacaagggcctgatgatggagctgtctgaggactgccccagcatccaggaccgcttccacctgtctgagatccgcagcctgcacgtgctggagggctgctgggtgctgtatgagctgcccaactaccggggccggcagtacctgctgcggccccaggagtaccgccgctgccaggactggggcgccatggatgccaaggccggcagcctgcggcgggtggtggacctgtactag

SEQ ID NO: 206870 - DNA, 525 bp, Artificial Sequence
  derived and/or modified sequence
atgggcaagatcaccttctacgaggaccgggccttccagggccggagctatgagacaacgactgactgcccgaacctgcagccttatttcagtaggtgcaatagcatccgagttgaatccggctgctggatgctatacgagcgtccgaattaccaagggcaacagtatttactgcgcaggggagaataccccgattatcagcagtggatggggctgagcgattctatcagatcttgttgcttgattcctcagactgtgagccatcgcttaagactctacgaaagagaggaccacaagggactcatgatggagctcagcgaggattgtccctctatccaggaccggttccatttgagtgaaatccgatctcttcatgtgctggaggggtgctgggttttatatgagttacccaactacagaggaagacagtacctcctgcgaccgcaggagtaccggagatgtcaagactggggcgccatggatgctaaggccggttctctgagaagggtggtggatctctactag

SEQ ID NO: 206871 - DNA, 525 bp, Artificial Sequence
  derived and/or modified sequence
atggggaagatcacattttacgaggacagggccttccaggggagatcttacgagacgacaacagattgccccaatttgcagccatatttttccaggtgtaattctattagagtggaatccgggtgttggatgttatatgaaaggcccaactaccaaggccagcagtacctcctgagacgcggagagtaccccgactaccagcagtggatgggcttatccgatagcataagaagttgttgtcttatcccacaaacagtctctcaccgtttaaggctttacgagagagaggatcacaaaggactgatgatggagttgagcgaagactgtcccagcattcaggaccgcttccacctgtccgaaatacgttctcttcacgtgcttgaaggatgttgggtgctatacgaactccctaactacaggggcaggcagtacttactgaggccacaggagtacagacgatgccaggattggggagctatggacgccaaagctgggtcccttcggagagtggtcgatttatactag

SEQ ID NO: 206872 - DNA, 629 bp, Artificial Sequence
  derived and/or modified sequence
ccatcacactgaactcgcatcatccgtgtcaaccagccatggggaagatcaccttctatgaggacagggccttccagggccgcagctacgaaaccaccactgactgccccaacctgcagccgtatttcagccgctgcaactccatccgggtggagagcggctgctggatgctctatgagcgtcccaactaccaaggtcaacaatacttgctgcggcgaggggagtaccccgactaccagcaatggatgggcctcagcgactccatccgctcctgttgtctcatcccccaaacagtctcccacaggctgcggctgtacgagagggaagaccacaaaggcctcatgatggagctgagtgaagactgccccagcatccaggaccgcttccacctcagcgagatccgttccctccacgtgctggagggctgctgggtcctctacgagctgcccaactaccgggggcggcaatacctgctgaggccccaagagtacaggcggtgccaggactggggggccatggatgctaaggcaggctctttgcggagagtggtggatttgtattaaaatagcttaacactaccaatttcccattttggaacctaataaatatttagtctgcattgctggcaa

SEQ ID NO: 206873 - DNA, 525 bp, Artificial Sequence
  derived and/or modified sequence
atgggcaagatcaccttctacgaggacagagccttccagggcagaagctacgagaccaccaccgactgccccaacctgcagccctacttcagcagatgcaacagcatcagagtggagagcggctgctggatgctgtacgagagacccaactaccagggccagcagtacctgctgagaagaggcgagtaccccgactaccagcagtggatgggcctgagcgacagcatcagaagctgctgcctgatcccccagaccgtgagccacagactgagactgtacgagagagaggaccacaagggcctgatgatggagctgagcgaggactgccccagcatccaggacagattccacctgagcgagatcagaagcctgcacgtgctggagggctgctgggtgctgtacgagctgcccaactacagaggcagacagtacctgctgagaccccaggagtacagaagatgccaggactggggcgccatggacgccaaggccggcagcctgagaagagtggtggacctgtactag

SEQ ID NO: 206874 - protein, 217 aa, Artificial Sequence
  derived and/or modified sequence
MAAGSRTSLLLAFALLCLPWLQEAGAVQTVPLSRLFDHAMLQAHRAHQLAIDTYQEFEETYIPKDQKYSFLHDSQTSFCFSDSIPTPSNMEETQQKSNLELLRISLLLIESWLEPVRFLRSMFANNLVYDTSDSDDYHLLKDLEEGIQTLMGRLEDGSRRTGQILKQTYSKFDTNSHNHDALLKNYGLLYCFRKDMDKVETFLRMVQCRSVEGSCGF

SEQ ID NO: 206875 - protein, 160 aa, Artificial Sequence
  derived and/or modified sequence
MAAGSRTSLLLAFALLCLPWLQEADSIPTPSNMEETQQKSNLELLRISLLLIESWLEPVRFLRSMFANNLVYDTSDSDDYHLLKDLEEGIQTLMGRLEDGSRRTGQILKQTYSKFDTNSHNHDALLKNYGLLYCFRKDMDKVETFLRMVQCRSVEGSCGF

SEQ ID NO: 206876 - DNA, 654 bp, Artificial Sequence
  derived and/or modified sequence
atggctgctggtagtcgcacatcactgctgttagcatttgctctgttgtgtttgccttggcttcaagaagccggagccgtgcagaccgtgccgctgagtagattgttcgaccatgcaatgctccaggctcatagagcccatcagttggccattgatacatatcaggaattcgaagagacttatattccaaaggaccagaagtatagcttccttcacgacagccagactagcttctgcttctcggattctattcctacaccaagcaatatggaggaaacacagcagaaaagtaaccttgagctgctccggatctctcttctgctcattgagtcgtggctagagccagtcaggttcctgcggagtatgttcgctaacaacctcgtgtatgatacctcagatagtgatgattatcacctgttaaaggatctcgaagagggcatacagacactcatgggtcggctggaagacggatcgcgcaggaccggccaaatcctgaagcagacctactccaaatttgatactaactcccacaaccacgacgctctgctgaagaactacggcctcttatattgctttcgtaaagatatggacaaggtggagacatttctacggatggtgcagtgtcgttcagtggaaggctcctgcggattttag

SEQ ID NO: 206877 - DNA, 654 bp, Artificial Sequence
  derived and/or modified sequence
atggctgctggcagcaggaccagcctgctgctggcctttgccctgctgtgcctgccctggctgcaggaggccggggctgtgcagacagtgcccctgagccggctgtttgaccacgccatgctgcaggcccaccgggcccaccagctggccatcgacacctaccaggagtttgaggagacctacatccccaaggaccagaagtacagcttcctgcatgacagccagaccagcttctgcttcagtgacagcatccccacccccagcaacatggaggagacccagcagaagagcaacctggagctgctgcgcatcagcctgctgctgattgaatcctggctggagcctgtgcgcttcctgcgctccatgtttgccaacaacctggtgtatgacaccagtgacagtgatgactaccacctgctgaaggacctggaggagggcatccagaccctgatgggccgcctggaggatggcagcagaagaacaggccagatcctgaagcagacctacagcaagtttgacaccaacagccacaaccatgatgccctgctgaagaactacggcctgctgtactgcttcaggaaggacatggacaaggtggagaccttcctgaggatggtgcagtgccgctctgtggagggcagctgtggcttctag

SEQ ID NO: 206878 - DNA, 654 bp, Artificial Sequence
  derived and/or modified sequence
atggccgccggcagccggaccagcctgctgctggccttcgccctgttatgtctgccatggctacaggaagccggcgctgtgcagactgtgcccctgtcccgactgtttgaccatgcaatgttacaggctcaccgcgcacaccaattggcaattgacacctaccaggaatttgaggagacctatataccgaaagatcagaaatacagctttctgcatgacagccagaccagcttctgctttagcgatagtataccaactccttccaacatggaggagactcagcaaaaatctaatctggagctgctacgtattagcctcttattgatcgagtcttggcttgagcctgtccgtttcctgaggtcaatgtttgccaataatctagtgtatgatacatccgatagtgacgactaccacttgctgaaagatcttgaagagggaatccaaactctgatgggaagactggaagatgggtcacggaggacaggccaaattttgaagcagacatatagtaagtttgacacaaacagtcacaaccacgatgctctccttaaaaactatggcctgctgtactgctttagaaaagacatggacaaggtcgaaacattcctgaggatggtgcagtgcaggtcagttgagggatcctgcggcttttag

SEQ ID NO: 206879 - DNA, 654 bp, Artificial Sequence
  derived and/or modified sequence
atggccgcaggctctcggacgtcgttgcttctcgcttttgccttgttgtgccttccttggctgcaagaggccggtgccgttcagacagtgcctctctcccgcctctttgaccatgcaatgcttcaggcgcaccgcgctcaccagcttgccatcgatacctatcaggaatttgaggagacttatatacccaaagaccagaaatactccttcctccacgactcgcagactagtttctgcttttctgacagcatacctactccatcaaacatggaggagacccaacagaaaagcaacttggagctgctgcggattagtctgttgctgattgagtcatggcttgagccagtgcggttcttgaggagcatgttcgccaacaatcttgtttacgacacctctgatagtgacgattaccatctactgaaggacctggaggagggtatacagacccttatgggaagactggaggacggctcgaggaggacagggcaaatcctgaagcaaacctatagcaagttcgacactaattcccacaaccacgacgccctgcttaagaattacggcttgctttattgtttccgcaaggatatggataaggtggagacgtttctccgcatggtgcagtgtcgcagcgtggagggctcttgtggtttctag

SEQ ID NO: 206880 - DNA, 654 bp, Artificial Sequence
  derived and/or modified sequence
atggctgcgggctcaagaacatcactgctgttggcctttgcactgctatgtcttccatggcttcaggaggctggagctgtccagaccgtcccactttcccggctgtttgatcacgccatgttgcaggctcatcgcgcccatcagcttgccatcgacacctaccaggagtttgaagagacttacatcccaaaagatcagaaatacagcttccttcatgattctcagacctcattctgtttcagcgattctatccctacgcccagcaacatggaagagacccagcaaaagagtaacctggaactcctaaggatatcactcctgctcattgagtcatggctcgagccggtcaggtttctgaggagcatgtttgccaacaacctggtttatgatacttccgattcagacgactatcatctcttgaaggaccttgaagagggaatccaaacactgatgggacgccttgaggacgggagcaggcgcaccggccagattctcaaacagacgtactccaagttcgacacaaacagccacaatcacgatgcgctgctcaaaaattacggcctcttgtactgctttagaaaagatatggacaaggtcgaaacctttctgcggatggtgcaatgtcgctcggttgaaggctcgtgtggattctag

SEQ ID NO: 206881 - DNA, 654 bp, Artificial Sequence
  derived and/or modified sequence
atggcagcaggatcgcgcacaagtctattattggcctttgctttattgtgcctcccatggcttcaggaggccggcgctgtacagaccgtccccttgtccagactattcgatcatgccatgctgcaggcccacagagcacaccagttagccattgatacataccaagagttcgaggagacctacatacctaaagaccagaaatatagctttctgcatgactcacagactagtttctgcttcagtgatagtatccctacccctagtaatatggaagagacccagcagaaatcgaatctggagttgctgcggatatctctattgcttatcgagtcatggcttgagcccgtgcggttcctgagaagtatgtttgccaacaacttagtatacgacacatcggacagtgatgactaccacctgcttaaagatctggaggagggcattcagacgcttatgggacggctggaggacggtagccgcagaaccggacaaatactcaaacaaacatactctaaattcgacaccaattctcacaatcacgacgctctgctcaaaaactacggcctgctctactgttttcgtaaggatatggacaaagttgagacatttctgcgaatggtacagtgtagatcagtcgagggttcctgtgggttttag

SEQ ID NO: 206882 - DNA, 920 bp, Artificial Sequence
  derived and/or modified sequence
ccatgcataaatgtacacagaaacaggtggggtcaagcagggagagagaactggccagggtataaaaagggcccacaagagaccggctctaggatcccaaggcccaactccccgaaccactcagggtcctgtggacagctcacctagcggcaatggctgcaggctcccggacgtccctgctcctggcttttgccctgctctgcctgccctggcttcaagaggctggtgccgtccaaaccgttccgttatccaggctttttgaccacgctatgctccaagcccatcgcgcgcaccagctggccattgacacctaccaggagtttgaagaaacctatatcccaaaggaccagaagtattcattcctgcatgactcccagacctccttctgcttctcagactctattccgacaccctccaacatggaggaaacgcaacagaaatccaatctagagctgctccgcatctccctgctgctcatcgagtcgtggctggagcccgtgcggttcctcaggagtatgttcgccaacaacctggtgtatgacacctcggacagcgatgactatcacctcctaaaggacctagaggaaggcatccaaacgctgatggggaggctggaagacggcagccgccggactgggcagatcctcaagcagacctacagcaagtttgacacaaactcacacaaccatgacgcactgctcaagaactacgggctgctctactgcttcaggaaggacatggacaaggtcgagacattcctgcgcatggtgcagtgccgctctgtagagggtagctgtggcttctaggtgcccgcgtggcatcctgtgaccgacccctccccagtgcctctcctggccctggaaggtgccactccagtgcccatcagccttgtcctaataaaattaagttgtatcatttca

SEQ ID NO: 206883 - DNA, 654 bp, Artificial Sequence
  derived and/or modified sequence
atggccgccggcagcagaaccagcctgctgctggccttcgccctgctgtgcctgccctggctgcaggaggccggcgccgtgcagaccgtgcccctgagcagactgttcgaccacgccatgctgcaggcccacagagcccaccagctggccatcgacacctaccaggagttcgaggagacctacatccccaaggaccagaagtacagcttcctgcacgacagccagaccagcttctgcttcagcgacagcatccccacccccagcaacatggaggagacccagcagaagagcaacctggagctgctgagaatcagcctgctgctgatcgagagctggctggagcccgtgagattcctgagaagcatgttcgccaacaacctggtgtacgacaccagcgacagcgacgactaccacctgctgaaggacctggaggagggcatccagaccctgatgggcagactggaggacggcagcagaagaaccggccagatcctgaagcagacctacagcaagttcgacaccaacagccacaaccacgacgccctgctgaagaactacggcctgctgtactgcttcagaaaggacatggacaaggtggagaccttcctgagaatggtgcagtgcagaagcgtggagggcagctgcggcttctag

SEQ ID NO: 206884 - protein, 329 aa, Artificial Sequence
  derived and/or modified sequence
MTTQQIDLQGPGPWGFRLVGGKDFEQPLAISRVTPGSKAALANLCIGDVITAIDGENTSNMTHLEAQNRIKGCTDNLTLTVARSEHKVWSPLVTEEGKRHPYKMNLASEPQEVLHIGSAHNRSAMPFTASPASSTTARVITNQYNNPAGLYSSENISNFNNALESKTAASGVEANSRPLDHAQPPSSLVIDKESEVYKMLQEKQELNEPPKQSTSFLVLQEILESEEKGDPNKPSGFRSVKAPVTKVAASIGNAQKLPMCDKCGTGIVGVFVKLRDRHRHPECYVCTDCGTNLKQKGHFFVEDQIYCEKHARERVTPPEGYEVVTVFPK

SEQ ID NO: 206885 - DNA, 990 bp, Artificial Sequence
  derived and/or modified sequence
atgaccactcagcaaattgacttgcagggccctggcccttgggggtttcgcttggtgggcggaaaggacttcgaacaaccgctggccattagccgtgtgaccccagggagtaaggccgctctcgccaatttgtgtattggtgacgtgatcaccgctatcgacggtgagaatacatctaacatgacacaccttgaagcacagaacagaatcaagggctgcacagataacttgacactgaccgtggcaagatccgagcataaagtatggtctccgttagttaccgaggagggcaagagacacccgtacaaaatgaacctcgcttcggagcctcaggaggtcctgcacatcggaagcgcacataacaggagcgccatgccctttaccgccagccccgcctccagcaccactgcccgagtgatcacaaatcagtataataatcctgcaggtctgtactcaagtgagaatatttcgaactttaacaacgcacttgagtctaagactgccgctagcggcgtggaagcaaacagccggcctctggaccacgcacagccacccagttccttggtgatcgacaaggagtctgaggtgtataagatgctacaagagaaacaggagttgaacgagccccctaagcagtccacctcttttctggtcctgcaggagatcctggagtcagaggagaagggcgaccctaataaaccttcaggattccgctctgtgaaggcccctgtgactaaggttgcggcctccatagggaacgcccagaaattgcctatgtgcgataagtgcgggacgggaatagtaggggtgtttgtaaaactccgagatagacatcggcaccctgaatgctacgtgtgcaccgactgcggcactaaccttaaacagaaaggacatttcttcgtagaggaccagatctactgcgagaaacatgctagggagagagttacaccaccagaaggctacgaggtcgttactgtcttccctaagtag

SEQ ID NO: 206886 - DNA, 990 bp, Artificial Sequence
  derived and/or modified sequence
atgaccacccagcagattgacctgcagggccctggcccctggggcttccggctggtgggcggcaaggactttgagcagcccctggccatcagccgggtgaccccaggcagcaaggccgccctggccaacctgtgcattggagatgtgatcacagccattgatggagagaacaccagcaacatgacccacctggaggcccagaaccgcatcaagggctgcacagacaacctgaccctgactgtggcccggtctgagcacaaggtgtggagccccctggtgacagaggagggcaagaggcacccctacaagatgaacctggccagcgagccccaggaggtgctgcacatcggcagcgcccacaacagaagtgccatgcccttcaccgccagccctgccagcagcaccacagcccgggtcatcaccaaccagtacaacaacccagctggcctgtacagcagcgagaacatcagcaacttcaacaatgccctggagagcaagacagctgccagcggcgtggaggccaacagccggcccctggaccacgcccagccccccagcagcctggtgattgacaaggagagcgaggtgtacaagatgctgcaggagaagcaggagctgaatgaaccacccaagcagagcaccagcttcctggtgctgcaggagatcctggagagcgaggagaagggggaccccaacaagcccagcggcttccgctctgtgaaggcccctgtgaccaaggtggccgccagcattggaaatgcccagaagctgcccatgtgtgacaagtgtggcactggaattgtgggcgtgtttgtgaagctgcgggacagacaccgccaccctgagtgctacgtgtgcacagactgtggcaccaacctgaagcagaagggccacttctttgtggaggaccagatctactgtgagaagcacgcccgggagcgggtgaccccacctgagggctatgaggtggtgacagtgttccccaagtag

SEQ ID NO: 206887 - DNA, 990 bp, Artificial Sequence
  derived and/or modified sequence
atgaccacccagcagatcgacctgcagggccccggcccctggggcttccgcctagtgggtggcaaggactttgaacaacctctcgcgatttcaagagttacccccggctcaaaagcagctctcgctaacctgtgtataggggacgtcatcacggccatcgacggcgaaaatacatcaaacatgacgcacctggaggcccagaaccggattaaggggtgtaccgataacctgacattaacagttgcccggtctgagcataaggtctggagcccacttgttactgaggaagggaaaaggcacccttacaaaatgaatctcgcctccgagccccaggaagtgctgcatattggttcggcccacaatcgcagtgcgatgcccttcacagcctctccggcaagttccaccaccgccagggtgattacaaaccaatacaacaatccagctggcttgtactcttctgagaatatttctaactttaataatgccttggagagtaagacggcagcttctggcgtcgaagcaaactcgaggccactggaccatgctcaacccccatcctcccttgtgatcgacaaggagtcagaagtgtataaaatgctgcaagagaagcaagaactcaatgagcccccaaaacagtcaacttcctttctggttctgcaagaaatcctggagtctgaagaaaagggcgatcccaataagccaagcgggttccgctctgtgaaagcccctgttactaaggtggctgctagcatcggtaatgcccaaaaactgcctatgtgtgacaagtgtgggacgggaatcgtaggtgtttttgtcaagctcagggaccgacaccgccatcctgaatgttacgtgtgcactgattgcgggaccaacttgaaacagaaggggcatttttttgtggaagatcaaatctactgtgaaaagcacgcccgagaacgcgtgacccctccggaggggtacgaagtggttactgtcttcccaaagtag

SEQ ID NO: 206888 - DNA, 1452 bp, Artificial Sequence
  derived and/or modified sequence
gcccgcgccgcgccgctctttctccgacagccgccgggggtgccctgcaagctgttccgcgcgtcctgcccgtctgtccccgcgggtcgtcgcccgccacagccgcgccatgaccacccagcagatagacctccagggcccggggccgtggggcttccgcctcgtgggcggcaaggacttcgagcagcctctcgccatttcccgggtcactcctggaagcaaggcggctctagctaatttatgtattggagatgtaatcacagccattgatggggaaaatactagcaatatgacacacttggaagctcagaacagaatcaaaggctgcacagacaacttgactctcactgtagccagatctgaacataaagtctggtctcctctggtgacggaggaagggaagcgtcatccatacaagatgaatttagcctctgaaccccaggaggtcctgcacataggaagcgcccacaaccgaagtgccatgccctttaccgcctcgcctgcctccagcactactgccagggtcatcacaaaccagtacaacaacccagctggcctctactcttctgaaaatatctccaacttcaacaatgccctggagtcaaagactgctgccagcggggtggaggcgaacagcagacccttagaccatgctcagcctccaagcagccttgtcatcgacaaagaatctgaagtttacaagatgcttcaggagaaacaggagttgaatgagcccccgaaacagtccacgtctttcttggttttgcaggaaatcctggagtctgaagaaaaaggggatcccaacaagccctcaggattcagaagtgttaaagctcctgtcactaaagtggctgcgtcgattggaaatgctcagaagttgcctatgtgtgacaaatgtggcactgggattgttggtgtgtttgtgaagctgcgggaccgtcaccgccaccctgagtgttatgtgtgcactgactgtggcaccaacctgaaacagaagggccatttctttgtggaggatcaaatctactgtgagaagcatgcccgggagcgagtcacaccacctgagggttatgaagtggtcactgtgttccccaagtgagccagcagatctgaccactgttctccagcaggcctctgctgcagctttttctctcagtgttctggccctctcctctcttgaaagttctctgcttactttggttttccctctgcttgtaaaacattgagtcccctccctgccttggttaattgactcacaccagctgtgcgatgcccgcttttacaattaaaggaaaactgttttgttcagtgtcaccttgtcagcaacactgtgtcccttcgccccaccgttcttctctgctgcatttggacatcagccaaatttgaacccaatcaaatataacgtgtctgacactgattttgtttttactcaataaatgtatagactacaaa

SEQ ID NO: 206889 - DNA, 990 bp, Artificial Sequence
  derived and/or modified sequence
atgacaacacagcagattgatctccagggccctggcccatggggtttcagactggttgggggaaaggactttgagcagccactggctatttctcgcgtcacaccagggtccaaagctgcactcgccaacctctgcattggcgatgtcatcaccgccatagacggggagaatacatccaatatgacccatctggaagcgcaaaacaggattaaagggtgtactgataacctgaccttaacagtggcaaggagtgagcacaaggtgtggtctcctctggtgactgaggaggggaaaaggcatccttacaagatgaatcttgcctctgagcctcaggaagtgctacatatcgggtccgcgcataatagatcggctatgccttttacggccagtcccgcatccagcactacagccagagtaattacgaaccagtacaataatcctgccggactttatagctcagagaatatctcaaacttcaacaatgcactggaatcaaagactgctgcgtccggtgtcgaggccaatagtaggcccctggaccatgctcagcctccttcgtcactcgttatcgataaggagtcagaggtatacaagatgctgcaagagaagcaggaacttaacgagcctccaaagcaaagtaccagctttctggtactgcaggaaattctggaatctgaggagaagggggaccccaacaagccctccgggtttcgaagtgtcaaggcacccgtgacgaaggttgcagcttctatcgggaatgctcagaagctcccaatgtgcgacaagtgcgggacagggattgtgggtgtgtttgtgaagctgagagaccgccacagacacccggagtgctacgtgtgtacagattgcggcaccaatttgaagcaaaaaggccacttttttgtcgaggaccagatctactgtgaaaagcacgcgagagagagagtcacccctcccgagggctatgaggtcgtcaccgtatttccaaaatag

SEQ ID NO: 206890 - DNA, 990 bp, Artificial Sequence
  derived and/or modified sequence
atgaccacccagcagatcgacctgcagggccccggcccctggggcttcagactggtgggcggcaaggacttcgagcagcccctggccatcagcagagtgacccccggcagcaaggccgccctggccaacctgtgcatcggcgacgtgatcaccgccatcgacggcgagaacaccagcaacatgacccacctggaggcccagaacagaatcaagggctgcaccgacaacctgaccctgaccgtggccagaagcgagcacaaggtgtggagccccctggtgaccgaggagggcaagagacacccctacaagatgaacctggccagcgagccccaggaggtgctgcacatcggcagcgcccacaacagaagcgccatgcccttcaccgccagccccgccagcagcaccaccgccagagtgatcaccaaccagtacaacaaccccgccggcctgtacagcagcgagaacatcagcaacttcaacaacgccctggagagcaagaccgccgccagcggcgtggaggccaacagcagacccctggaccacgcccagccccccagcagcctggtgatcgacaaggagagcgaggtgtacaagatgctgcaggagaagcaggagctgaacgagccccccaagcagagcaccagcttcctggtgctgcaggagatcctggagagcgaggagaagggcgaccccaacaagcccagcggcttcagaagcgtgaaggcccccgtgaccaaggtggccgccagcatcggcaacgcccagaagctgcccatgtgcgacaagtgcggcaccggcatcgtgggcgtgttcgtgaagctgagagacagacacagacaccccgagtgctacgtgtgcaccgactgcggcaccaacctgaagcagaagggccacttcttcgtggaggaccagatctactgcgagaagcacgccagagagagagtgaccccccccgagggctacgaggtggtgaccgtgttccccaagtag

SEQ ID NO: 206891 - protein, 231 aa, Artificial Sequence
  derived and/or modified sequence
MSGRSVRAETRSRAKDDIKRVMAAIEKVRKWEKKWVTVGDTSLRIYKWVPVTEPKVDDKNKNKKKGKDEKCGSEVTTPENSSSPGMMDMHDDNSNQSSIADASPIKQENSSNSSPAPEPNSAVPSDGTEAKVDEAQADGKEHPGAEDASDEQNSQSSMEHSMNSSEKVDRQPSGDSGLAAETSAISQVPRSRSQRGSQIGREPIGLSGDLEGVPPSKKMKLEASQQNSEEM

SEQ ID NO: 206892 - DNA, 696 bp, Artificial Sequence
  derived and/or modified sequence
atgagcgggagaagtgtgagggccgagacaaggtcaagggcgaaggacgacatcaagcgagtcatggccgctatcgaaaaagtgcgtaagtgggaaaaaaagtgggtgaccgtcggcgatacgtccttgaggatatataagtgggtgccagtgactgagccgaaagttgacgacaaaaataagaataagaaaaagggcaaagacgagaagtgtggaagtgaggtaaccaccccagagaactcgtcttcacctggaatgatggatatgcacgatgacaacagcaaccaaagtagcattgccgatgcctcgcccataaaacaggagaatagcagtaattccagccctgccccggaacctaacagtgctgtcccctcagacggcacagaggctaaggtcgatgaagctcaagcagatggaaaagaacaccccggagcagaagacgcttctgacgagcagaactcgcagtccagcatggaacacagcatgaatagcagtgaaaaggtggatagacagccctccggtgattcagggctcgccgccgagacaagcgcgatttcacaggtgccacggtctcgatcccagagagggtcccaaattggccgagaacctatcggcctgagtggcgacctggagggggttcctccctctaagaaaatgaagctggaggcgtcccagcagaactctgaagaaatgtag

SEQ ID NO: 206893 - DNA, 696 bp, Artificial Sequence
  derived and/or modified sequence
atgagcggccgctctgtgcgggcagagaccaggagccgggccaaggatgacatcaagagggtgatggccgccatcgagaaggtgaggaagtgggagaagaagtgggtgacagtgggggacaccagcctgcgcatctacaagtgggtgcctgtgacagagcccaaggtggatgacaagaacaagaacaagaagaagggcaaggatgagaagtgtggcagcgaggtgaccaccccagagaacagcagcagccctggcatgatggacatgcatgatgacaacagcaaccagagcagcattgctgatgccagccccatcaagcaggagaacagcagcaacagcagccctgcccctgagcccaacagcgctgtgcccagtgatggaacagaggccaaggtggatgaggcccaggctgatggcaaggagcaccctggagcagaagatgccagtgatgagcagaacagccagagctccatggagcacagcatgaacagcagcgagaaggtggaccggcagcccagcggggacagcggcctggccgctgagaccagcgccatcagccaggtgcccaggagccgcagccagaggggcagccagatcggccgggagcccatcggcctgagcggggacctggagggcgtgccccccagcaagaagatgaagctggaggccagccagcagaacagcgaggagatgtag

SEQ ID NO: 206894 - DNA, 696 bp, Artificial Sequence
  derived and/or modified sequence
atgagcggccggagcgtgcgggccgagacccggagccgggccaaggatgacattaagagagtgatggccgctatcgagaaggtgcggaaatgggaaaagaaatgggtgactgtcggagatacatctttacgtatctacaagtgggtgcccgtaaccgagcccaaagtcgacgacaaaaacaagaataagaaaaaaggtaaagacgagaagtgtggatccgaggttaccactccagaaaactcaagcagcccagggatgatggacatgcatgacgataacagcaatcagtcatcaatcgcagacgcctcgcccataaagcaggagaacagctcaaactcttcacccgcaccagaacccaatagcgctgttccctctgatggaacagaggcaaaagtcgacgaggcgcaggcagatgggaaagagcatcctggcgctgaggacgcctcagacgagcagaacagtcagagttcaatggagcattccatgaatagctcagaaaaggtcgatcgtcagccttccggggattcaggcctggctgccgaaacaagcgccatatcccaagtgcctcgcagccgatcgcagcggggatcccagattggcagagagccaattggtctctctggggacctggagggcgttcctcccagtaaaaagatgaaactggaggcctcccagcagaattccgaagaaatgtag

SEQ ID NO: 206895 - DNA, 696 bp, Artificial Sequence
  derived and/or modified sequence
atgtctggccgatctgttcgggctgagactcgaagtcgggcaaaagacgacattaaaagagtaatggcagccatagagaaggtgcgtaagtgggagaaaaagtgggtgacagtgggtgatacatctctgcgaatctacaaatgggttcctgtcacagagcccaaggtggacgacaaaaacaaaaataagaaaaagggtaaggatgagaaatgtggcagcgaggttacaacgcctgagaactcctcctcccccggtatgatggacatgcatgatgataacagcaatcagtccagcatagccgacgctagtccgattaagcaggagaactctagcaattcgagtcccgctcccgagccgaactctgctgtgccttccgatggcacggaagctaaggtggatgaggcgcaggctgatggaaaggaacacccaggagccgaagacgcgtcggacgaacagaattcccagtcttccatggagcactccatgaacagctcagagaaggtagatagacagccttcgggcgatagcggcctggccgctgagacaagcgcaatcagtcaggttcccagaagtaggagccagcggggatcccagatcggcagggagccgattggactttctggcgatctggaaggcgttcctcccagcaagaaaatgaagctggaggcaagccaacagaattccgaggagatgtag

SEQ ID NO: 206896 - DNA, 6245 bp, Artificial Sequence
  derived and/or modified sequence
cccagcctagatttctttttattatgatcaaatacacataaaattgaccattgtaaccatttaaaagtgtacaattcagcgtcattaagtacattcacattgttctgcaaccatcaccactatctcattccagaactttcctatcactccgaaaggaaaccccacatccgttagcagtcactcctgctctccctcccccttgcctctggcaaccaccaatctgatatctgtctttatggattcgcctagttgtagatatctcccgcaaatggacttacgcatatttatccttttgtgactggcttctttcacttagcgtgtttcaaggttcacccatgttgtagcatgtattcattcccttttatggctgaataatattccattgtgtggatagacacatttatctgttcctcagtcactatttgaattctgacataatattttcctattttaaattttaagatacatttttttaaagtttcatgtggcccaaagcacatacctattgatctcacatatctctgtgagatctgttttatgacctgctgttgcatattttcccagaaaattctcggaacgattctctgaagtccttctttctctttctcttttttttctttttctttctctctttctttttttgttttgttttgttttattttgttttgttttgtttttttgagattcagttttgctctgttgcccaggctggagtgcaatggcatgatcattgcacctctgcctcccaggttcaagcattttcctgcctcagcctcccgcgtagctcagattacaggcctgcaccaccacgcccagctaatttttgtatttttagtagagacagggtttctccatgttggccaggctggtctcgaactcctgacctcgtgatctgcccacttcggcctccaaagtgctgggattacaggcatgaaccaccgcgcccggccttttttttttttctgagacagggtctcactctgtctcccaggctggagtgcagtggctggatctctgctcactgcaacctccgtctcccaggttcaagcgagtctcctgcctcagactcccgagtagctgcgattacaggagcccaccaccgcgcccggctaatttttgtatttttagtagagacggggtttcacccaccatgttggccaggctggtatcgaactcttaacctcaagtgatccacccgcctcggcctcccaaagtgctggtattacaggcatgagccaccgcgcccggccagtatttgttcttttcttcatttttcacgtcaggagactgcgtttcagaatagtaaaaacaaatgcctaggaaaaggcctgcggtctctccatttccacagtagcgtgttccccaaagaccaaaccctcaggggaaacgtctagaatgagtaacaacttaaggctgcaaccttaaactttcccaggactcagtttccccagctgtgaaatggctgctgtcgggctgtcatctccaggcccggggcgctgacatttgggccactctcggtctccctcttcattctgggcgcgcattagctctggtccggccggttccgctgcagctgaacagcaagatgcggcacccaggttaccctgatcatcgcagatttctccccggggctctgttctgaggcctcaaaagtgctccttgtagatgggaccaggggtcatttgggcagtagcagcgcctggtctcagtctggtactgaagtcaggaatggcttaaggtgaaatcgtggtcctctggtgaagctcagcgaagaccccctcgccttgtttatgacaagagaacttctgggggcgggaggaagagtccctgttacgatgctgatcatcattgagcttttgctgagcagaaaactctttagtactcaaggtcgagagtctctggtggtctgcctggcaccaggcaccttcctacaaccctagttttccaaaaggacaaagcctggggcaggcgacgtcctagctcgcatttgaacagggccgcgggccagcagagatgcgcgatgcccaactctttccaagagcacctcgcgtcccgaaccggtgccttcaactcggagaagtcaagagacccgcaagaaacttgcacgactgcacccgccgccgcgctctgggggctgggcaggggcagctgggctggctcccggggaacgcgacccccccgcgccccgcagaccggctgtctcccatggacccctcggcacctgcagcctccgaggaagggtcagcgcgcgtgtccgcacgcccgcccccaccgcgcgcccagagccgggggtcgccgtgcgcccttcgccacctccccaggagggcgtccggggcgtcccctctgggggcgcaggaggcccgggggcgctgcccggtggccgcggcgcccggaggccgcactgccggcggcggcggcggcgcggctccccctgctctgtgcagctgccgcccggcgcttgcgcactgggccaggcgcgcggcggccccgggctttgtgtgtgtgtgtatgtgtgtgtgtgtgtgtgtgtgtgtgtgagtgtgtgcgtgtgagagtgcgagtgtctgtgcgcgagtgagtgagcggcgggcgggcgcgagtgtggccgccgcggagcgcgagcaggacccggcgggcgcgctccccagcctccgtctccccgccggaaccatgtcgggcaggtcggttcgagccgagacgaggagccgggccaaagatgatatcaagagggtcatggcggcgatcgagaaagtgcgcaaatgggagaagaaatgggtgaccgttggtgacacatccctacgaatctacaaatgggtccctgtgacggagcccaaggttgatgacaaaaacaagaataagaaaaaaggcaaggacgagaagtgtggctcagaggtgaccactccggagaacagttcctccccagggatgatggacatgcatgacgataacagcaaccagagctccatcgcagatgcctcccccatcaaacaggagaacagcagcaactccagccccgctccagagcccaactcggctgtgcccagcgacggcaccgaggccaaggtggatgaggcccaggctgatgggaaggagcacccaggagctgaagatgcttctgatgagcagaattcacagtcctcgatggaacattcgatgaacagctcagagaaagtagatcggcagccgtctggagactcgggtctggccgcagagacgtctgcaatctctcaggtacctcgctcgaggtctcagaggggcagccagatcggccgggagcccattgggttgtcgggggatttggaaggagtgccaccctctaaaaagatgaaactggaggcctctcaacaaaactccgaagagatgtagacgatgctttaaagcctccgatccatgttccatggaaggtacatcagcaattaattctagagcaactttgccccagcgattcctcttgggtgcgaacagaactactaacgtttcaagtttaccaagtgcaaatccaagaagacccagaacggcgtcacttctcagacactgaagaactctgctgtgaagcaaaacactcaaacctttaagggactgtccttggggaggcaggcggggctgacagctcaggagtgtctgcacactgtctcggaagccaggattccatttgtgttgctgctgtattttccccccacttctctatgtaacgatataagctatcggagggtggtaccgatcaggaacgctttttggcggggctttccactgttcaaccgattccttccgctttctttttttgtgccttgtgcccttgaggtgacctctggcatgtatcctggtggttcttacatccccctctgcaaagtgccctcttggtttggttcgggcggcggctgccaccctactcaccgctctcctccctgccccaggacttcatcggagcaggcagggtggagcgaaggagctccttagcccacctggtttgcaggtgcagggggaccttaggcacgccccaagcaccaggcaccagggcccaaggacgcgcaggtgttggggcacagtccccaagggctcggccccttggatcaggctgggcactcgctgtgctctcccctccttggggcgtttaggactgggcgtctccaagcccaccatggcccagatggacgtgcaaagcccttggaattttctggcacttcctctctattgcccccaccaccaccacccccatcactgctttctcccagacctccgaatacgaaatggcttctctggctgactgcaaggctgtctccttaaggcactgagtgggccggggaggctgggagccggcggcaggattagctggtgctgaactttctctcataggacgtcgcttggatttcaaatccacggtcacctgctgccctttgcctcccccgacgccccagcctgtgccccggagaggcaggatcgcagtggtcagaatccacgtgctttcctattctcaggctgttctgactctgagccaacagctggaccgtgtctcatccccagaacatgccgtctgtccccaccggggagtgggccttgatggccgggcctcgaaggccacaaacaaggcgtcgaggaattggaaagatttgcacaccctccagaaaggagagacgcaatctcccctccctcccatcccccaccttcgctggaacagcttcctctcactgaacggagacgcccccttggacgaactgcctaatcgtttggttctgaggcctggtttgctcttaattaatatatgaactcctcagaccttaaaccttttcctaagctttctttactgcactggagttctgactccctttgagttgtgtgttactgggggtggggtggggtcatgggttttgttgtttttgggggctaattggtgcatattcaggtaccacctttgacgtgtggctctttctcctgaccatcatgggaagtgtctgctggattccattttctaagagtttctgagggtgaggctcttatttttttttttaagggatcctgtctatttcctgcacttcgagaagaatcaaaatgttcctgaatttcaaatacctcatgcaaaatgtctcctgaaataagggaaaaaaaaaaaaccacaactttgaaaatcttaatgttgaagttagcaatgccgaaaggtttctgtcttaaaaaaaaaaatccttgtacttatcaattttgccccttaggcagtcagttttgttgagaactgtgtcctgcatcctggcgcagaacctacctgatgcggttcctctccacgcatctcgaggcggcgttacctccagattccgtagagttagagtcacatttttctttgcagcgaaactccatcttggtgagagatgaatttggatatttatttccttctctgtttttgggaaacgagaggctacaaccaagacagctgaaggagaatgaaacacacacatccacagaaacagagaggcgtaggtggccctgccgttgaccgcagcctctctggacaggcaaggggagttggcgcaggtgaggactcagacgacgtccaccgtcccaaggctgtcactagtatttctctgaagtgcctgaaggtaggaatgggccggcgattgggaccagctgggccccaccacggccacgccaggcaaagcgccagcagccctgcactccacgctggccaagaaggccttccacgcagaatgacaagactgcaaaaatccgatgtgcttccttccctggcgcagtcgctcctcgagccgctgccccccacccaccctgcacccctcgccctccccccaccacagaatctaagacctttcagcttcgagccagggggcgggggatcccgagcaaaagccttccgtggacatcaggccccgtggcctcaagggctcccagggcaaacctaattccccccaaaacgtgaagtcggggaagctgcggctacacattccacaaagtgctggcacttacacccacaacccggaaggctgtggaccgattcctctagggtggtgacctcccattagcaaacggtgtcatggtttggaatgttcattatcgccaagaacctggttagaggcataaagaccttttttcaccgttacctaattttttcccctttcaagaattttttttttttttggtgtgttgtacagcagtataatttttcacttatttattccatcagtagatatggtttgtacaatgtacaattgtttcatttcagaaaataaaaatttcaaatcatg

SEQ ID NO: 206897 - DNA, 696 bp, Artificial Sequence
  derived and/or modified sequence
atgagcggcagaagcgtgagagccgagaccagaagcagagccaaggacgacatcaagagagtgatggccgccatcgagaaggtgagaaagtgggagaagaagtgggtgaccgtgggcgacaccagcctgagaatctacaagtgggtgcccgtgaccgagcccaaggtggacgacaagaacaagaacaagaagaagggcaaggacgagaagtgcggcagcgaggtgaccacccccgagaacagcagcagccccggcatgatggacatgcacgacgacaacagcaaccagagcagcatcgccgacgccagccccatcaagcaggagaacagcagcaacagcagccccgcccccgagcccaacagcgccgtgcccagcgacggcaccgaggccaaggtggacgaggcccaggccgacggcaaggagcaccccggcgccgaggacgccagcgacgagcagaacagccagagcagcatggagcacagcatgaacagcagcgagaaggtggacagacagcccagcggcgacagcggcctggccgccgagaccagcgccatcagccaggtgcccagaagcagaagccagagaggcagccagatcggcagagagcccatcggcctgagcggcgacctggagggcgtgccccccagcaagaagatgaagctggaggccagccagcagaacagcgaggagatgtag

SEQ ID NO: 206898 - protein, 210 aa, Artificial Sequence
  derived and/or modified sequence
MQAEGQGTGGSTGDADGPGGPGIPDGPGGNAGGPGEAGATGGRGPRGAGAARASGPRGGAPRGPHGGAASAQDGRCPCGARRPDSRLLQLHITMPFSSPMEAELVRRILSRDAAPLPRPGAVLKDFTVSGNLLFMSVRDQDREGAGRMRVVGWGLGSASPEGQKARDLRTPKHKVSEQRPGTPGPPPPEGAQGDGCRGVAFNVMFSAPHI

SEQ ID NO: 206899 - DNA, 633 bp, Artificial Sequence
  derived and/or modified sequence
atgcaggctgagggtcagggcaccggcggatctactggcgacgcagacggaccagggggaccggggatccctgacggtccagggggaaacgctggaggcccaggcgaagcaggcgctacaggcggtcgtggcccccggggtgccggtgccgctagagctagtggccctaggggtggagcaccaaggggccctcacgggggcgcagccagcgctcaggatgggagatgtccctgcggcgctcgccgtccagacagccggctgctgcaattgcatattactatgcccttctcaagtcccatggaagccgaacttgtgcgccgtatcctctcacgagatgccgcgcctctccctcggcccggggccgtgttgaaggattttaccgttagtgggaacctgcttttcatgtcagtgcgagaccaggatcgcgaaggtgccggtcgaatgagagttgtgggctggggcctggggtcagcttcccccgagggacagaaggctcgtgacctgaggacccccaagcataaagtctcagagcagaggcccggaacccccggccctccgcctcctgaaggtgcccagggagatgggtgcagaggcgtggcttttaatgtgatgttctccgcaccccatatatag

SEQ ID NO: 206900 - DNA, 633 bp, Artificial Sequence
  derived and/or modified sequence
atgcaggccgagggccagggcaccggcggcagcactggagatgctgatggccctgggggccctggcatcccagatggccctggaggaaatgccggcggccctggagaggccggggccaccggcggccggggccccaggggggccggggccgcccgggccagcggcccccggggcggggccccccggggcccccatggaggagctgccagcgcccaggacggccgctgcccctgtggggcccggcggccagacagccggctgctgcagctgcacatcaccatgcccttcagcagccccatggaggccgagctggtgcggcgcatcctgagcagagatgctgcccccctgcccaggcctggagctgtgctgaaggacttcaccgtgtctggcaacctgctcttcatgtctgtgcgggaccaggaccgggagggcgccggccgcatgagggtggtgggctggggcctgggcagcgccagccctgagggccagaaggcccgggacctgcggacccccaagcacaaggtgtctgagcagaggcctggcaccccaggccccccacctcctgagggcgcccagggagatggctgccggggcgtggccttcaacgtgatgttcagcgccccccacatctag

SEQ ID NO: 206901 - DNA, 633 bp, Artificial Sequence
  derived and/or modified sequence
atgcaggccgagggccagggcaccggcggcagcaccggcgacgccgacggcccgggaggaccaggaatacctgacggaccaggaggaaacgccggaggccctggagaagccggggcaactggtgggcgtggcccccggggggcgggggcggcgcgcgcgagcggtcctcgaggaggcgcccctaggggcccgcacgggggcgctgcatcagcacaggacgggcgctgcccatgcggagctaggagacccgattctagactacttcagctccacattacaatgccctttagctcccctatggaggctgagctggttcgacgcatcctgtcccgagacgccgcaccactgcctcgccctggagccgtgttgaaagattttacggtatccggaaatctgctctttatgagcgtcagggaccaggatcgcgagggtgcaggaaggatgagagtggtgggctggggcttgggctccgcgtctccagaaggccagaaggcacgtgatctgcggactccaaaacacaaggtgagcgaacagcgcccagggacgcccggacccccacctcctgagggagcccaaggagatggctgtcggggtgttgctttcaacgtcatgtttagtgctcctcacatctag

SEQ ID NO: 206902 - DNA, 633 bp, Artificial Sequence
  derived and/or modified sequence
atgcaggcggagggccaaggtaccggagggagcacgggagatgcggatggaccgggtggtccaggtatacccgacggtcctgggggtaatgctggtggcccaggagaagccggagccaccggagggagggggccacgcggagcgggagcagcccgtgcctccggaccccgtggtggcgcacctcggggaccgcatggaggagcggcatccgcccaggatggcaggtgtccatgcggcgcacgcaggcccgattcgaggctcctacagctccacataacgatgcccttttccagtcctatggaggcagagctcgttagacgtatcctttccagggatgccgcacccttaccgagaccaggggctgtccttaaagactttaccgtgagtggaaatttactgttcatgagcgttagggatcaggatagagaaggagctgggagaatgcgtgtggtcggctgggggctgggctccgcctcacccgagggacaaaaagccagggatcttcgcactcccaaacacaaggtgtccgagcaaaggcctgggaccccagggccacctcctcccgagggggcacagggggacgggtgtcgcggagtggccttcaatgtcatgtttagcgcaccacacatttag

SEQ ID NO: 206903 - DNA, 993 bp, Artificial Sequence
  derived and/or modified sequence
tctgcctccgcatcctcgtgggccctgaccttctctctgagagccgggcagaggctccggagccatgcaggccgaaggccagggcacagggggttcgacgggcgatgctgatggcccaggaggccctggcattcctgatggcccagggggcaatgctggcggcccaggagaggcgggtgccacgggcggcagaggtccccggggcgcaggggcagcaagggcctcggggccgagaggaggcgccccgcggggtccgcatggcggtgccgcttctgcgcaggatggaaggtgcccctgcggggccaggaggccggacagccgcctgcttcagttgcacatcacgatgcctttctcgtcgcccatggaagcggagctggtccgcaggatcctgtcccgggatgccgcacctctcccccgaccaggggcggttctgaaggacttcaccgtgtccggcaacctactgtttatgtcagttcgggaccaggacagggaaggcgctgggcggatgagggtggtgggttgggggctgggatccgcctccccggaggggcagaaagctagagatctcagaacacccaaacacaaggtctcagaacagagacctggtacaccaggcccgccgccacccgagggagcccagggagatgggtgcagaggtgtcgcctttaatgtgatgttctctgcccctcacatttagccgactgactgctgcagaccaccgccaactgcagctctccatcagctcctgtctccagcagctttccctgttgatgtggatcacgcagtgctttctgcccgtgtttttggctcaggctccctcagggcagaggcgctaagcccagcctggcgccccttcctaggtcatgcctcctcccctagggaatggtcccagcacgagtggccagttcattgtgggggcctgattgtttgtcgctggaggaggacggcttacatgtttgtttctgtagaaaataaagctgagctacgattccg

SEQ ID NO: 206904 - DNA, 633 bp, Artificial Sequence
  derived and/or modified sequence
atgcaggccgagggccagggcaccggcggcagcaccggcgacgccgacggccccggcggccccggcatccccgacggccccggcggcaacgccggcggccccggcgaggccggcgccaccggcggcagaggccccagaggcgccggcgccgccagagccagcggccccagaggcggcgcccccagaggcccccacggcggcgccgccagcgcccaggacggcagatgcccctgcggcgccagaagacccgacagcagactgctgcagctgcacatcaccatgcccttcagcagccccatggaggccgagctggtgagaagaatcctgagcagagacgccgcccccctgcccagacccggcgccgtgctgaaggacttcaccgtgagcggcaacctgctgttcatgagcgtgagagaccaggacagagagggcgccggcagaatgagagtggtgggctggggcctgggcagcgccagccccgagggccagaaggccagagacctgagaacccccaagcacaaggtgagcgagcagagacccggcacccccggcccccccccccccgagggcgcccagggcgacggctgcagaggcgtggccttcaacgtgatgttcagcgccccccacatctag

SEQ ID NO: 206905 - protein, 385 aa, Artificial Sequence
  derived and/or modified sequence
MHVCVCVCVCVYMPVCVDACMCCEAGRPAFRSFLFSLCSDLGAVISLLLWGRQLFALYSGNDVTDISDDRFPKPPEIANGYVEHLFRYQCKNYYRLRTEGDGVYTLNDKKQWINKAVGDKLPECEAVCGKPKNPANPVQRILGGHLDAKGSFPWQAKMVSHHNLTTGATLINEQWLLTTAKNLFLNHSENATAKDIAPTLTLYVGKKQLVEIEKVVLHPNYHQVDIGLIKLKQKVLVNERVMPICLPSKNYAEVGRVGYVSGWGQSDNFKLTDHLKYVMLPVADQYDCITHYEGSTCPKWKAPKSPVGVQPILNEHTFCVGMSKYQEDTCYGDAGSAFAVHDLEEDTWYAAGILSFDKSCAVAEYGVYVKVTSIQHWVQKTIAEN

SEQ ID NO: 206906 - protein, 348 aa, Artificial Sequence
  derived and/or modified sequence
MSDLGAVISLLLWGRQLFALYSGNDVTDISDDRFPKPPEIANGYVEHLFRYQCKNYYRLRTEGDGVYTLNDKKQWINKAVGDKLPECEAVCGKPKNPANPVQRILGGHLDAKGSFPWQAKMVSHHNLTTGATLINEQWLLTTAKNLFLNHSENATAKDIAPTLTLYVGKKQLVEIEKVVLHPNYHQVDIGLIKLKQKVLVNERVMPICLPSKNYAEVGRVGYVSGWGQSDNFKLTDHLKYVMLPVADQYDCITHYEGSTCPKWKAPKSPVGVQPILNEHTFCVGMSKYQEDTCYGDAGSAFAVHDLEEDTWYAAGILSFDKSCAVAEYGVYVKVTSIQHWVQKTIAEN

SEQ ID NO: 206907 - DNA, 1158 bp, Artificial Sequence
  derived and/or modified sequence
atgcacgtgtgcgtgtgcgtgtgcgtgtgcgtgtacatgcccgtgtgcgtggacgcctgcatgtgctgcgaggccggcagacccgccttcagaagcttcctgttcagcctgtgcagcgacctgggcgccgtgatcagcctgctgctgtggggcagacagctgttcgccctgtacagcggcaacgacgtgaccgacatcagcgacgacagattccccaagccccccgagatcgccaacggctacgtggagcacctgttcagataccagtgcaagaactactacagactgagaaccgagggcgacggcgtgtacaccctgaacgacaagaagcagtggatcaacaaggccgtgggcgacaagctgcccgagtgcgaggccgtgtgcggcaagcccaagaaccccgccaaccccgtgcagagaatcctgggcggccacctggacgccaagggcagcttcccctggcaggccaagatggtgagccaccacaacctgaccaccggcgccaccctgatcaacgagcagtggctgctgaccaccgccaagaacctgttcctgaaccacagcgagaacgccaccgccaaggacatcgcccccaccctgaccctgtacgtgggcaagaagcagctggtggagatcgagaaggtggtgctgcaccccaactaccaccaggtggacatcggcctgatcaagctgaagcagaaggtgctggtgaacgagagagtgatgcccatctgcctgcccagcaagaactacgccgaggtgggcagagtgggctacgtgagcggctggggccagagcgacaacttcaagctgaccgaccacctgaagtacgtgatgctgcccgtggccgaccagtacgactgcatcacccactacgagggcagcacctgccccaagtggaaggcccccaagagccccgtgggcgtgcagcccatcctgaacgagcacaccttctgcgtgggcatgagcaagtaccaggaggacacctgctacggcgacgccggcagcgccttcgccgtgcacgacctggaggaggacacctggtacgccgccggcatcctgagcttcgacaagagctgcgccgtggccgagtacggcgtgtacgtgaaggtgaccagcatccagcactgggtgcagaagaccatcgccgagaactag

SEQ ID NO: 206908 - DNA, 1047 bp, Artificial Sequence
  derived and/or modified sequence
atgtcggatctgggggctgtcattagtctcttattgtggggacggcaactctttgctctatacagtgggaacgatgtcaccgacatttcagacgatagattcccaaagcccccggaaattgccaatggctacgtggagcacctgttcagatatcagtgtaaaaactattaccggctgcgcaccgaaggagatggcgtctacacacttaatgacaaaaagcagtggattaacaaggccgtgggtgacaagttgccagagtgcgaggccgtgtgcggaaaacccaagaatccagcaaaccccgttcaaaggatcctgggcggacacctggatgccaagggctccttcccatggcaggccaaaatggtgagtcatcacaatctaactacaggggccacgctgattaacgagcaatggctcctgacaactgcgaaaaacctgtttcttaaccattccgaaaacgccacggccaaggacatcgcgcctacactgaccctgtatgtggggaagaaacagcttgtcgaaattgagaaagtagtgctacatcccaactaccaccaggtggatatcggccttattaaactgaagcagaaggtcctcgtaaatgaaagggtcatgcccatttgcctccctagtaaaaactacgcggaagtaggtagggtaggttacgtgtctgggtggggacagtccgataattttaagctaacagaccatctgaagtacgtgatgttacccgtggccgatcagtatgactgcatcacacactacgaaggctcgacttgtcctaagtggaaagcgccaaaatcccccgtgggggttcagcccatcctgaacgagcacactttttgtgtgggaatgagcaaatatcaggaagatacctgctatggtgacgcgggctctgcattcgcagttcatgacctggaagaggacacctggtacgcggcagggattctctctttcgacaaaagctgcgcagtggccgagtatggcgtatatgtcaaggttacctcgatacagcattgggtccagaagactattgcagaaaactag

SEQ ID NO: 206909 - DNA, 1047 bp, Artificial Sequence
  derived and/or modified sequence
atgagcgatctaggggccgtcatctcgctgctcctttggggccgccagttgttcgctctgtattctggcaacgatgtcaccgatatctctgacgaccggtttcccaagcccccagagatcgctaacggttatgtggaacacctctttcgctaccaatgcaaaaattactataggctccgaaccgagggggacggggtttacactctgaatgacaaaaaacagtggatcaataaagctgtaggggacaaactcccagaatgtgaggccgtgtgtggcaaacctaaaaatccagcgaaccctgttcagaggatcctcggaggccatctagatgcaaaagggagcttcccctggcaagccaagatggttagccatcataatctgacaaccggcgcgaccctgattaatgaacaatggctgctgacaactgcaaagaacttgttccttaaccacagcgagaatgcaaccgccaaagatatagcacccactcttacactgtacgtcggtaagaagcaactggttgagatagagaaggttgttctccatcctaactaccaccaggtcgatatcgggctgatcaagctgaagcagaaggtacttgtgaatgaacgcgtgatgcccatatgtttgccatctaagaattacgcggaggtaggcagggtgggctatgtctctggctggggtcagtctgacaatttcaaactcacagaccacttaaagtacgtaatgttgccagtggctgatcaatatgattgcatcacccactacgaaggttccacctgcccaaagtggaaagctcccaaatccccagtgggagtgcagcccattttaaatgaacatacattctgtgtcggcatgtcaaagtaccaggaagatacctgttacggagatgccgggtctgcctttgccgtgcacgatctcgaggaggatacctggtatgccgccggaatcctgtcatttgacaaatcgtgcgccgtcgcagagtacggagtgtatgtgaaggtcaccagtattcaacactgggtgcagaagactatcgcagagaactag

SEQ ID NO: 206910 - DNA, 1158 bp, Artificial Sequence
  derived and/or modified sequence
atgcatgtgtgtgtgtgcgtgtgtgtgtgtgtgtacatgcctgtgtgtgtggatgcatgcatgtgctgtgaagcagggagaccagctttccgctccttcttgttttctctctgcagtgacctgggagctgtcatttccctcctgctctggggacgacagctttttgcactgtactcaggcaatgatgtcacggatatttcagatgaccgcttcccgaagccccctgagattgcaaatggctatgtggagcacttgtttcgctaccagtgtaagaactactacagactgcgcacagaaggagatggagtatacaccttaaatgataagaagcagtggataaataaggctgttggagataaacttcctgaatgtgaagcagtatgtgggaagcccaagaatccggcaaacccagtgcagcggatcctgggtggacacctggatgccaaaggcagctttccctggcaggctaagatggtttcccaccataatctcaccacaggggccacgctgatcaatgaacaatggctgctgaccacggctaaaaatctcttcctgaaccattcagaaaatgcaacagcgaaagacattgcccctactttaacactctatgtggggaaaaagcagcttgtagagattgagaaggtggttctacaccctaactaccaccaggtagatattgggctcatcaaactcaaacagaaggtgcttgttaatgagagagtgatgcccatctgcctaccttcaaagaattatgcagaagtagggcgtgtgggttacgtgtctggctggggacaaagtgacaactttaaacttactgaccatctgaagtatgtcatgctgcctgtggctgaccaatacgattgcataacgcattatgaaggcagcacatgccccaaatggaaggcaccgaagagccctgtaggggtgcagcccatactgaacgaacacaccttctgtgtcggcatgtctaagtaccaggaagacacctgctatggcgatgcgggcagtgcctttgccgttcacgacctggaggaggacacctggtacgcggctgggatcctaagctttgataagagctgtgctgtggctgagtatggtgtgtatgtgaaggtgacttccatccagcactgggttcagaagaccatagctgagaactaa

SEQ ID NO: 206911 - DNA, 1077 bp, Artificial Sequence
  derived and/or modified sequence
actgctcttccagaggcaagaccaaccaagatgagtgacctgggagctgtcatttccctcctgctctggggacgacagctttttgcactgtactcaggcaatgatgtcacggatatttcagatgaccgcttcccgaagccccctgagattgcaaatggctatgtggagcacttgtttcgctaccagtgtaagaactactacagactgcgcacagaaggagatggagtatacaccttaaatgataagaagcagtggataaataaggctgttggagataaacttcctgaatgtgaagcagtatgtgggaagcccaagaatccggcaaacccagtgcagcggatcctgggtggacacctggatgccaaaggcagctttccctggcaggctaagatggtttcccaccataatctcaccacaggggccacgctgatcaatgaacaatggctgctgaccacggctaaaaatctcttcctgaaccattcagaaaatgcaacagcgaaagacattgcccctactttaacactctatgtggggaaaaagcagcttgtagagattgagaaggtggttctacaccctaactaccaccaggtagatattgggctcatcaaactcaaacagaaggtgcttgttaatgagagagtgatgcccatctgcctaccttcaaagaattatgcagaagtagggcgtgtgggttacgtgtctggctggggacaaagtgacaactttaaacttactgaccatctgaagtatgtcatgctgcctgtggctgaccaatacgattgcataacgcattatgaaggcagcacatgccccaaatggaaggcaccgaagagccctgtaggggtgcagcccatactgaacgaacacaccttctgtgtcggcatgtctaagtaccaggaagacacctgctatggcgatgcgggcagtgcctttgccgttcacgacctggaggaggacacctggtacgcggctgggatcctaagctttgataagagctgtgctgtggctgagtatggtgtgtatgtgaaggtgacttccatccagcactgggttcagaagaccatagctgagaactaa

SEQ ID NO: 206912 - DNA, 1047 bp, Artificial Sequence
  derived and/or modified sequence
atgagtgacctgggagctgtcatttccctcctgctctggggacgacagctttttgcactgtactcaggcaatgatgtcacggatatttcagatgaccgcttcccgaagccccctgagattgcaaatggctatgtggagcacttgtttcgctaccagtgtaagaactactacagactgcgcacagaaggagatggagtatacaccttaaatgataagaagcagtggataaataaggctgttggagataaacttcctgaatgtgaagcagtatgtgggaagcccaagaatccggcaaacccagtgcagcggatcctgggtggacacctggatgccaaaggcagctttccctggcaggctaagatggtttcccaccataatctcaccacaggggccacgctgatcaatgaacaatggctgctgaccacggctaaaaatctcttcctgaaccattcagaaaatgcaacagcgaaagacattgcccctactttaacactctatgtggggaaaaagcagcttgtagagattgagaaggtggttctacaccctaactaccaccaggtagatattgggctcatcaaactcaaacagaaggtgcttgttaatgagagagtgatgcccatctgcctaccttcaaagaattatgcagaagtagggcgtgtgggttacgtgtctggctggggacaaagtgacaactttaaacttactgaccatctgaagtatgtcatgctgcctgtggctgaccaatacgattgcataacgcattatgaaggcagcacatgccccaaatggaaggcaccgaagagccctgtaggggtgcagcccatactgaacgaacacaccttctgtgtcggcatgtctaagtaccaggaagacacctgctatggcgatgcgggcagtgcctttgccgttcacgacctggaggaggacacctggtacgcggctgggatcctaagctttgataagagctgtgctgtggctgagtatggtgtgtatgtgaaggtgacttccatccagcactgggttcagaagaccatagctgagaactaa

SEQ ID NO: 206913 - DNA, 1158 bp, Artificial Sequence
  derived and/or modified sequence
atgcacgtgtgtgtgtgtgtgtgcgtttgtgtgtacatgcccgtgtgtgttgacgcatgcatgtgttgcgaggctggcagacctgcttttcgcagcttcctgttttccttatgctccgaccttggggccgtcatttccctgctgctgtggggcagacagctgtttgccctctatagtggcaatgatgtgactgacattagcgacgatcgtttcccgaaaccaccagagatcgccaatggatacgtggaacacctattccggtaccagtgcaaaaattactacagacttaggaccgaaggcgatggtgtttataccctgaatgataagaagcagtggatcaataaggccgtgggagataaactcccagagtgtgaggctgtgtgcggtaagccaaagaatcctgctaatcccgtgcaacgcatattgggcgggcacctcgatgcgaaagggagctttccttggcaggccaagatggtttctcaccacaacctgacgaccggcgctacccttatcaacgaacaatggctcctgaccacggcaaagaatctcttcctcaatcatagtgagaatgccaccgccaaagacatagcgcctaccctgaccctatatgtcggcaagaaacagctggtggaaatcgagaaggtagtgttgcatcctaattaccatcaagtggatatcgggctgataaagctgaagcaaaaagtgctggtgaatgaacgggtgatgccaatctgcctaccttcgaaaaattacgctgaggtgggcagggtgggttacgtgtccgggtggggacaatccgataacttcaaactaactgaccatcttaagtacgtgatgctccccgtggccgatcagtatgattgtatcacccattacgagggcagcacttgccccaaatggaaggcccctaagtccccagtgggagtccaaccaatcctgaatgaacatactttttgcgtgggaatgtcaaagtaccaagaggatacctgctacggcgacgccggatccgcctttgcagtgcacgatctggaggaagacacttggtacgcagcgggcattttgagctttgacaagagctgcgccgttgcagaatacggagtatacgtgaaggttacaagcatccaacattgggtgcagaaaaccattgctgaaaactag

SEQ ID NO: 206914 - DNA, 1047 bp, Artificial Sequence
  derived and/or modified sequence
atgtctgacctgggcgccgtcatcagcctgctgctgtggggccggcagctgtttgccctgtacagcggaaatgatgtgacagacatcagtgatgaccgcttccccaagcccccagagatcgccaacggctacgtggagcacctgttccgctaccagtgcaagaactactaccgcctgaggacagaaggagatggagtgtacaccctgaatgacaagaagcagtggatcaacaaggctgtgggggacaagctgcctgaatgtgaggccgtgtgtgggaagcccaagaacccagccaaccctgtgcagaggatcctgggcggccacctggatgccaagggcagcttcccctggcaggccaagatggtgagccaccacaacctgaccactggagccaccctcatcaatgagcagtggctgctgaccacagccaagaacctcttcctgaaccacagtgaaaatgccacagccaaggacatcgcccccaccctgaccctgtatgtgggcaagaagcagctggtggagattgagaaggtggtgctgcaccccaactaccaccaggtggacatcggcctcatcaagctgaagcagaaggtgctggtgaatgaaagagtgatgcccatctgcctgcccagcaagaactatgcagaggtgggccgggtgggctacgtgtctggctggggccagagcgacaacttcaagctgacagaccacctgaagtatgtgatgctgcctgtggccgaccagtatgactgcatcacccactatgagggcagcacctgccccaagtggaaggcccccaagagccctgtgggcgtgcagcccatcctgaatgagcacaccttctgtgtgggcatgagcaagtaccaggaggacacctgctatggagatgctggcagcgcctttgctgtgcatgacctggaggaggacacctggtatgctgctggcatcctgagctttgacaagagctgtgctgtggccgagtatggagtgtatgtgaaggtgaccagcatccagcactgggtgcagaagaccatcgcagaaaattag

SEQ ID NO: 206915 - DNA, 1158 bp, Artificial Sequence
  derived and/or modified sequence
atgcacgtgtgtgtgtgtgtgtgtgtgtgtgtgtacatgcctgtgtgtgtggatgcctgcatgtgctgtgaggccggccggcctgccttccgctccttcctgttcagcctgtgcagcgacctgggcgctgtgatcagcctgctgctgtggggccggcagctgtttgccctgtacagcggaaatgatgtgacagacatcagtgatgaccgcttccccaagcccccagaaattgccaacggctacgtggagcacctgttccgctaccagtgcaagaactactaccgcctgaggacagaaggagatggagtgtacaccctgaatgacaagaagcagtggatcaacaaggctgtgggggacaagctgcctgaatgtgaggccgtgtgtgggaagcccaagaacccagccaaccctgtgcagaggatcctgggcggccacctggatgccaagggcagcttcccctggcaggccaagatggtgagccaccacaacctgaccaccggggccaccctcatcaatgagcagtggctgctgaccacagccaagaacctcttcctgaaccacagtgaaaatgccacagccaaggacatcgcccccaccctgaccctgtatgtgggcaagaagcagctggtggagattgagaaggtggtgctgcaccccaactaccaccaggtggacatcggcctcatcaagctgaagcagaaggtgctggtgaatgaaagagtgatgcccatctgcctgcccagcaagaactatgcagaggtgggccgggtgggctacgtgtctggctggggccagagcgacaacttcaagctgacagaccacctgaagtatgtgatgctgcctgtggccgaccagtatgactgcatcacccactatgagggcagcacctgccccaagtggaaggcccccaagagccctgtgggcgtgcagcccatcctgaatgagcacaccttctgtgtgggcatgagcaagtaccaggaggacacctgctatggagatgctggcagcgcctttgctgtgcatgacctggaggaggacacctggtacgccgccggcatcctgagctttgacaagagctgtgctgtggccgagtatggagtgtatgtgaaggtgaccagcatccagcactgggtgcagaagaccatcgccgagaactag

SEQ ID NO: 206916 - DNA, 1047 bp, Artificial Sequence
  derived and/or modified sequence
atgagcgacctgggcgccgtgatcagcctgctgctgtggggccggcaactcttcgcactgtatagcggtaacgacgtaacggacatctccgacgacagatttcccaaacctcccgagatcgcaaatggttacgtggagcatctgttcaggtaccagtgcaagaattattataggctgaggacagagggtgacggcgtgtacacactcaacgacaaaaaacagtggattaataaggcggttggcgataagctgcccgagtgcgaagcagtttgtgggaagccaaagaaccctgcaaaccctgtgcaaagaattcttggcggccacctcgatgccaaggggtcgttcccctggcaagcaaagatggtcagtcatcataacttgaccactggcgccactcttattaatgagcaatggctgctcacgacagcgaaaaacttattcctcaaccacagcgaaaatgctacagcgaaagacattgcgcctaccctcacactctacgttggaaaaaaacagcttgtagaaattgaaaaggtagttctgcatccaaattatcatcaggtggacatcgggttaataaagctgaagcagaaagtgctcgtgaatgaacgggtgatgcctatttgtctgccctccaagaactacgcggaggtcgggcgcgttggatacgtgagtggctggggccagagcgataactttaagctcacagatcatctgaagtacgtgatgctgcctgtggccgaccagtacgactgcattactcattacgagggctcaacttgccccaagtggaaagctccaaaatcccccgtaggcgtccaacccatcctcaatgagcacaccttctgcgttgggatgagtaagtaccaagaagacacctgttacggggatgcaggatctgcctttgctgtgcacgacctggaggaagacacatggtacgccgctgggatcctcagctttgataagtcttgcgctgtcgccgaatacggcgtttatgtaaaagtgacatctatccagcactgggtgcagaagacaatagccgagaactag

SEQ ID NO: 206917 - DNA, 1047 bp, Artificial Sequence
  derived and/or modified sequence
atgagcgacctgggcgccgtgatcagcctgctgctgtggggccggcaactgttcgccctatactccggaaatgatgtgacagatatcagtgacgatcggtttcctaaaccaccagaaatcgcaaatggttatgtcgaacacctcttccggtaccagtgcaaaaactactatcgactccgcacagagggcgacggagtttacacactgaacgacaagaaacagtggatcaataaggcagtcggagacaaactgcccgaatgtgaggctgtgtgcggaaagccaaagaaccccgctaaccctgtgcagaggatactgggggggcacctcgacgctaagggtagttttccatggcaggccaagatggttagccatcataacctcaccacaggagcaaccctgatcaatgaacagtggctcctgactactgccaagaatctttttctgaaccactccgaaaacgccactgcaaaagatatcgcgcctacacttacactctacgtgggcaagaagcagcttgtggagatcgagaaggtcgttcttcaccccaactatcatcaggtagacataggccttattaagttaaagcagaaggttcttgtcaacgaaagagtcatgccgatttgtctgccatctaaaaattacgccgaagtgggccgggttgggtatgttagcggttggggccagagcgataattttaagttaacagaccacttaaaatatgtgatgctgcctgtagcagaccagtacgattgcataacgcactacgaaggcagtacatgtcccaaatggaaggccccaaaatcccctgtcggagtccaacccattctgaatgaacatacattctgtgttgggatgtctaaatatcaagaggacacttgttatggggatgctggctctgcgtttgccgtccacgatttagaggaagacacatggtatgcagcaggcatcttgagcttcgataaatcgtgtgctgtggcggaatatggcgtatatgtgaaggtcaccagcattcagcattgggtccaaaagactattgccgaaaactag

SEQ ID NO: 206918 - DNA, 1158 bp, Artificial Sequence
  derived and/or modified sequence
atgcacgtgtgcgtgtgcgtgtgcgtgtgcgtgtacatgcccgtgtgcgtcgacgcctgtatgtgttgcgaggccggtagacccgccttccgatcttttttattttcactatgttccgacctcggcgccgtcattagtttacttctgtggggccggcagttgtttgccttgtatagcggtaatgatgtcactgatatctccgacgatcgcttccccaagccaccagaaatcgccaacggctatgtggaacacctgttccgctaccagtgcaaaaactactaccgactgcgaacagagggagatggcgtgtacacactgaatgacaagaagcaatggatcaacaaggcagtgggagataagctgccagagtgcgaagccgtgtgcgggaagccaaaaaaccctgccaatcctgtgcagagaatcttgggcgggcaccttgatgccaagggatccttcccatggcaggccaaaatggttagccatcataatctgaccactggggccactctcataaatgaacagtggctgcttactacagctaaaaatcttttcttgaaccactccgaaaacgctaccgccaaagacattgctccgacactaaccctgtatgtgggcaaaaagcagctggtagagatcgagaaggtggttctgcaccccaactaccaccaagtagatatcggcttgattaagttgaaacagaaggtgctcgtgaacgagagggtcatgccaatttgcttgccttccaagaattatgctgaagtgggcagagtcggatatgtgagcggctgggggcagtcagataactttaagctcaccgatcatctcaagtatgtaatgttacccgtggcagaccagtacgactgtataactcattatgagggctctacctgccccaagtggaaggcacctaagtcgcccgtcggagtgcaacctatcctgaatgagcatactttttgcgtagggatgtcaaagtaccaagaggacacttgctatggcgacgcgggttcagcattcgcagtccacgatctcgaagaagacacttggtacgctgctggcatactatcgtttgataaatcatgtgcagtggccgagtacggagtctacgtgaaggtcaccagcatccagcattgggtccagaagactattgccgagaactag

SEQ ID NO: 206919 - DNA, 1047 bp, Artificial Sequence
  derived and/or modified sequence
atgagtgacctgggagccgtaattagccttcttctatgggggcgtcagttgttcgctctctacagcggcaatgatgtgaccgacatcagcgacgacaggttccctaagccccctgagatagctaacggttacgtggagcatctgtttcgatatcagtgcaagaactattacaggctgcgcacggagggcgatggtgtgtacaccctgaacgataagaaacagtggataaacaaggccgttggcgacaaattgccagagtgtgaggccgtatgtgggaagcctaaaaatcctgctaaccccgtccaaaggatcctgggcggtcacctggatgccaagggttcttttccctggcaagctaaaatggtcagtcatcataatctgacaactggggcaactttgataaatgagcagtggctccttaccaccgcaaaaaatctattcctgaatcactccgagaatgctaccgcaaaggacatcgcccctacactaactctgtacgtcgggaaaaagcagctggtagagattgagaaggttgtcctccacccgaactaccaccaggtggacatcggcctgataaagctgaagcagaaggtgctggtgaacgaaagggtcatgcctatctgtctaccctccaaaaattatgcagaagttggcagggtggggtacgtgagtggatgggggcagtccgacaatttcaaactcactgaccatctcaaatacgtgatgcttccggtggccgatcagtacgactgtataactcattacgagggaagcacttgtcccaagtggaaagcacctaagagcccagtgggagtccagcctattctgaacgagcacacattttgcgtcggaatgagtaaatatcaggaagacacttgttatggcgatgcagggtctgcgtttgcagttcatgacctcgaggaggacacatggtacgccgcaggcattctaagttttgacaagtcttgcgccgtggccgagtacggtgtctacgtcaaagttaccagcatccagcactgggttcaaaaaaccatagctgagaactag

SEQ ID NO: 206920 - DNA, 1047 bp, Artificial Sequence
  derived and/or modified sequence
atgtccgatcttggcgctgtcatcagcctgttgctatggggcagacagctgttcgccctttacagcggcaatgacgtaaccgatatctccgacgacaggtttccgaagccccctgagattgccaatggctacgtcgagcacttattccgatatcaatgcaaaaactactacaggctccggaccgagggagacggcgtgtatacgctgaacgacaagaagcaatggatcaataaggcggtgggagataaacttcctgaatgtgaagccgtatgtggtaaaccaaagaatcccgctaatccagttcaaaggatcctcggcggacatttggacgccaaagggtcttttccatggcaggccaagatggtctcccatcacaatctgacaaccggagccactctgattaacgagcagtggctcctgacaaccgcaaagaacctattcctcaatcactcggaaaatgctacagccaaagacatcgccccaacgttgactctgtacgtgggcaaaaaacagctggtcgagattgagaaagtcgttctacacccaaactatcatcaggtggacattggcttgatcaaattaaaacagaaagtgctggtaaatgaaagagtgatgcctatctgtctgcctagcaagaactacgcggaagtcgggcgagtagggtatgtgtccggttgggggcagagcgataactttaagcttaccgatcacctcaagtatgtaatgctgcccgtcgcagatcagtatgattgcattacccattatgagggttccacctgtccaaagtggaaggccccaaagagtccggtgggcgttcagcctatcctcaacgagcatacgttctgtgtcggaatgagcaagtatcaggaggatacctgctatggcgacgccggatccgcttttgcagtccatgacttggaggaggacacctggtatgccgctggaatattaagcttcgataagagctgtgctgtggccgagtatggcgtttacgttaaggtgacttccatccaacattgggttcagaaaaccattgcggagaactag

SEQ ID NO: 206921 - DNA, 1158 bp, Artificial Sequence
  derived and/or modified sequence
atgcacgtgtgtgtgtgtgtctgtgtctgtgtgtacatgcctgtgtgtgtggatgcgtgcatgtgctgcgaggcgggacgccctgcctttcgctcattcctgttcagtctatgctctgatctgggggcagtgatcagtctgctcttgtggggtagacaactgtttgctttatacagtggtaacgatgttaccgatatcagcgatgataggttccccaagccacctgaaattgccaatggctacgtggaacacctgttcaggtaccaatgtaagaattattacagacttcggaccgagggcgacggcgtctacacactgaatgataagaagcagtggataaacaaggcagttggggataaattgccggagtgtgaagccgtatgtggtaagccaaaaaaccccgctaaccctgtacaaaggattttgggcggacacttggacgctaaaggcagtttcccgtggcaggccaagatggtgtcccaccataatctcaccactggcgctactctaattaatgagcaatggttactgactacagccaagaatctctttttaaaccacagcgaaaacgctactgccaaagatatagcccctacactcaccctttacgtcggcaaaaaacagctggttgagattgagaaggttgtgctacaccctaactaccatcaagtcgacattgggctgattaagctaaagcagaaggtcctggttaatgagcgcgtgatgcctatatgtttgcctagcaagaactatgctgaagttgggagagtgggctacgtgtctggatggggccagagtgacaactttaagctgacagatcatctgaagtacgtgatgctgccggtggctgaccaatatgattgcatcacacactacgagggctctacctgtccaaagtggaaggcgcctaaatccccagttggggtgcagcctatccttaacgaacacactttctgcgtgggcatgagcaaataccaggaagatacatgctatggagacgcaggcagcgctttcgctgtccacgatctcgaggaggatacgtggtatgccgcaggcatcctgtcatttgacaagtcatgcgccgtggccgagtatggagtgtacgttaaagttaccagtatccaacactgggtgcagaagaccatagctgagaattag

SEQ ID NO: 206922 - DNA, 1047 bp, Artificial Sequence
  derived and/or modified sequence
atgagcgacctgggcgccgtgatcagcctgctgctgtggggcagacagctgttcgccctgtacagcggcaacgacgtgaccgacatcagcgacgacagattccccaagccccccgagatcgccaacggctacgtggagcacctgttcagataccagtgcaagaactactacagactgagaaccgagggcgacggcgtgtacaccctgaacgacaagaagcagtggatcaacaaggccgtgggcgacaagctgcccgagtgcgaggccgtgtgcggcaagcccaagaaccccgccaaccccgtgcagagaatcctgggcggccacctggacgccaagggcagcttcccctggcaggccaagatggtgagccaccacaacctgaccaccggcgccaccctgatcaacgagcagtggctgctgaccaccgccaagaacctgttcctgaaccacagcgagaacgccaccgccaaggacatcgcccccaccctgaccctgtacgtgggcaagaagcagctggtggagatcgagaaggtggtgctgcaccccaactaccaccaggtggacatcggcctgatcaagctgaagcagaaggtgctggtgaacgagagagtgatgcccatctgcctgcccagcaagaactacgccgaggtgggcagagtgggctacgtgagcggctggggccagagcgacaacttcaagctgaccgaccacctgaagtacgtgatgctgcccgtggccgaccagtacgactgcatcacccactacgagggcagcacctgccccaagtggaaggcccccaagagccccgtgggcgtgcagcccatcctgaacgagcacaccttctgcgtgggcatgagcaagtaccaggaggacacctgctacggcgacgccggcagcgccttcgccgtgcacgacctggaggaggacacctggtacgccgccggcatcctgagcttcgacaagagctgcgccgtggccgagtacggcgtgtacgtgaaggtgaccagcatccagcactgggtgcagaagaccatcgccgagaactag

SEQ ID NO: 206923 - protein, 208 aa, Artificial Sequence
  derived and/or modified sequence
MALGQKLFITMSRGAGRLQGTLWALVFLGILVGMVVPSPAGTRANNTLLDSRGWGTLLSRSRAGLAGEIAGVNWESGYLVGIKRQRRLYCNVGIGFHLQVLPDGRISGTHEENPYSLLEISTVERGVVSLFGVRSALFVAMNSKGRLYATPSFQEECKFRETLLPNNYNAYESDLYQGTYIALSKYGRVKRGSKVSPIMTVTHFLPRI

SEQ ID NO: 206924 - DNA, 743 bp, Artificial Sequence
  derived and/or modified sequence
tttagggccattaattctgaccacgtgcctgagaggcaaggtggatggccctgggacagaaactgttcatcactatgtcccggggagcaggacgtctgcagggcacgctgtgggctctcgtcttcctaggcatcctagtgggcatggtggtgccctcgcctgcaggcacccgtgccaacaacacgctgctggactcgaggggctggggcaccctgctgtccaggtctcgcgccgggctagctggagagattgccggggtgaactgggaaagtggctatttggtggggatcaagcggcagcggaggctctactgcaacgtgggcatcggctttcacctccaggtgctccccgacggccggatcagcgggacccacgaggagaacccctacagcctgctggaaatttccactgtggagcgaggcgtggtgagtctctttggagtgagaagtgccctcttcgttgccatgaacagtaaaggaagattgtacgcaacgcccagcttccaagaagaatgcaagttcagagaaaccctcctgcccaacaattacaatgcctacgagtcagacttgtaccaagggacctacattgccctgagcaaatacggacgggtaaagcggggcagcaaggtgtccccgatcatgactgtcactcatttccttcccaggatctaaggacccacaaaagaaggctcacagatttaaagcatcatctgttcgattgaaattttgcaccagcgaagaatt

SEQ ID NO: 206925 - DNA, 627 bp, Artificial Sequence
  derived and/or modified sequence
atggcactggggcagaaactgttcataacgatgagtagaggggccggccgtctccagggcactctatgggccctcgtcttcttaggtatcctggttggaatggtcgttccttctcccgcagggacaagggccaacaatacactgttagatagcaggggctggggcacgctcctcagccggtctcgggccgggctggcaggagaaatcgcaggcgtgaactgggagtccgggtacctcgtgggcatcaagagacagagaagactatactgcaatgtgggaatcggattccaccttcaggtcctgcctgatggccggatctctggaacccatgaagagaatccatacagcttgcttgagatctctacagttgaacgcggggtcgtgtcattgttcggtgtcagatcagcgttgttcgtggcaatgaattctaagggtcgtctgtatgccactcccagcttccaggaggagtgtaaattccgagagacactccttcccaataattacaacgcatatgaatcagatctgtaccagggcacctatatcgctctgagcaaatacggccgcgttaaacggggctcaaaggtaagcccaatcatgaccgtgacccacttcctgccacggatctag

SEQ ID NO: 206926 - DNA, 627 bp, Artificial Sequence
  derived and/or modified sequence
atggccctgggccagaagctgttcatcaccatgagcagaggagctggccgcctgcagggcaccctgtgggccctggtgttcctgggcatcctggtgggcatggtggtgcccagccctgctggcacccgggccaacaacaccctgctggacagccggggctggggcaccctgctgagccgcagcagagctggcctggccggggagattgctggggtgaactgggagagcggctacctggtgggcatcaagaggcagaggcggctgtactgcaatgtgggcatcggcttccacctgcaggtgctgcctgatggccgcatcagcggcacccatgaggagaacccctacagcctgctggagatcagcacagtggagcggggcgtggtgtccctgtttggagtgcgcagcgccctgtttgtggccatgaacagcaagggccgcctgtatgccacccccagcttccaggaggagtgcaagttccgggagaccctgctgcccaacaactacaatgcctatgaaagtgacctgtaccagggcacctacatcgccctgagcaaatatggccgggtgaagaggggcagcaaggtgagccccatcatgacagtgacccacttcctgccccgcatctag

SEQ ID NO: 206927 - DNA, 627 bp, Artificial Sequence
  derived and/or modified sequence
atggccctgggccagaagctgttcatcaccatgagccggggcgccgggagacttcagggcacattatgggctttggtgtttttaggaattctggtagggatggtggtgccgtccccggcagggaccagggccaataacacactgctagacagccgcggctgggggacattgctgtcaaggagtcgggcgggtctggcgggtgagattgccggcgtgaattgggaaagtggttatctggtcggcatcaaacggcagcgcaggctgtactgcaatgtcggaatcggattccacctccaggtgcttcccgatggccggattagtgggactcacgaggaaaacccctatagtctgcttgaaatctccacagtggagcgaggcgtggtcagtttgtttggcgtccgctcagctctgtttgtcgccatgaattctaagggacggctttatgccacaccttccttccaagaagaatgtaaatttcgtgagaccctactccccaataactataatgcttatgagtcggacctctaccagggcacttacatagcgctgtccaaatacgggagagttaagcggggctccaaggtgtcacccatcatgaccgtgacacactttctgcctcggatctag

SEQ ID NO: 206928 - DNA, 627 bp, Artificial Sequence
  derived and/or modified sequence
atggctctcggccagaaactgttcataacaatgagcagaggcgcagggcgtctacagggcactctgtgggccctggtgttcctgggtatcctggtgggaatggtggttccatctcctgctggcaccagagcaaacaatacattactagacagcagaggatgggggacattattgtcccgatctcgggcagggctggcgggagaaattgccggagttaattgggagtccggctatctggtcggcattaaacggcaaagacgactttactgcaacgtggggattggtttccaccttcaggttctcccggatggtcgaattagcgggactcacgaggagaatccatacagcttgctcgaaatttctactgtcgaacggggagtggtgtccctgtttggagtgagaagcgccctgtttgtcgccatgaatagtaagggacgactctacgcaaccccctctttccaggaggagtgtaagttcagggagaccctgcttcctaacaactacaatgcctacgagtcagacctgtatcagggcacctatattgcacttagcaaatacggccgtgtgaaaagaggttctaaagtctctcccataatgaccgttacccactttctccctagaatctag

SEQ ID NO: 206929 - DNA, 627 bp, Artificial Sequence
  derived and/or modified sequence
atggccctgggccagaagctgttcatcaccatgagcagaggcgccggcagactgcagggcaccctgtgggccctggtgttcctgggcatcctggtgggcatggtggtgcccagccccgccggcaccagagccaacaacaccctgctggacagcagaggctggggcaccctgctgagcagaagcagagccggcctggccggcgagatcgccggcgtgaactgggagagcggctacctggtgggcatcaagagacagagaagactgtactgcaacgtgggcatcggcttccacctgcaggtgctgcccgacggcagaatcagcggcacccacgaggagaacccctacagcctgctggagatcagcaccgtggagagaggcgtggtgagcctgttcggcgtgagaagcgccctgttcgtggccatgaacagcaagggcagactgtacgccacccccagcttccaggaggagtgcaagttcagagagaccctgctgcccaacaactacaacgcctacgagagcgacctgtaccagggcacctacatcgccctgagcaagtacggcagagtgaagagaggcagcaaggtgagccccatcatgaccgtgacccacttcctgcccagaatctag

SEQ ID NO: 206930 - DNA, 744 bp, Artificial Sequence
  derived and/or modified sequence
tttagggccattaattctgaccacgtgcctgagaggcaaggtggatggccctgggacagaaactgttcatcactatgtcccggggagcaggacgtctgcagggcacgctgtgggctctcgtcttcctaggcatcctagtgggcatggtggtgccctcgcctgcaggcacccgtgccaacaacacgctgctggactcgaggggctggggcaccctgctgtccaggtctcgcgcggggctagctggagagattgccggggtgaactgggaaagtggctatttggtggggatcaagcggcagcggaggctctactgcaacgtgggcatcggctttcacctccaggtgctccccgacggccggatcagcgggacccacgaggagaacccctacagcctgctggaaatttccactgtggagcgaggcgtggtgagtctctttggagtgagaagtgccctcttcgttgccatgaacagtaaaggaagattgtacgcaacgcccagcttccaagaagaatgcaagttcagagaaaccctcctgcccaacaattacaatgcctacgagtcagacttgtaccaagggacctacattgccctgagcaaatacggacgggtaaagcggggcagcaaggtgtccccgatcatgactgtcactcatttccttcccaggatctaaggacccacaaaagaaggcttacagatttaaagcatcatctgttcgattgaaattttgcaccagcgaagaattc

SEQ ID NO: 206931 - protein, 366 aa, Artificial Sequence
  derived and/or modified sequence
MQPLWLCWALWVLPLASPGAALTGEQLLGSLLRQLQLKEVPTLDRADMEELVIPTHVRAQYVALLQRSHGDRSRGKRFSQSFREVAGRFLALEASTHLLVFGMEQRLPPNSELVQAVLRLFQEPVPKAALHRHGRLSPRSARARVTVEWLRVRDDGSNRTSLIDSRLVSVHESGWKAFDVTEAVNFWQQLSRPRQPLLLQVSVQREHLGPLASGAHKLVRFASQGAPAGLGEPQLELHTLDLGDYGAQGDCDPEAPMTEGTRCCRQEMYIDLQGMKWAENWVLEPPGFLAYECVGTCRQPPEALAFKWPFLGPRQCIASETDSLPMIVSIKEGGRTRPQVVSLPNMRVQKCSCASDGALVPRRLQP

SEQ ID NO: 206932 - DNA, 1101 bp, Artificial Sequence
  derived and/or modified sequence
atgcagcctttatggctgtgctgggctttgtgggttcttccgcttgctagccccggcgcagctctgactggggaacagctgcttggcagcctcctccggcagttgcaacttaaggaggtgccaactctcgatagggctgatatggaagaactggtgatccctacacacgttcgcgcccagtatgtggcactcttgcagcgctctcacggcgatagatcccggggtaagagattctctcaatcgttccgagaagtggctggtagattcctggctttagaagcatctacccaccttcttgtgtttggaatggagcaaaggctgccccctaacagcgaactggtgcaagcagtgttaaggctcttccaggagcctgtgccaaaagcggccctgcacaggcatggcaggctgagcccccgaagtgccagagccagggtcactgtcgaatggcttcgggtgcgtgacgacggctctaataggacctctctaatcgactcgcggctcgtcagcgtgcacgaatctggttggaaggcctttgacgtgaccgaggcggttaatttctggcagcagctctcacggcccaggcagcccttgctgctccaagtaagcgtgcagagagagcatctaggtcctttggcttcaggcgcccacaaactcgtgcggtttgctagtcagggggctcccgccggcctcggtgaaccacaattagagttgcatactctagacctgggtgactatggcgcacaaggagactgtgatccggaagcccccatgaccgagggcaccagatgctgtcggcaagaaatgtacattgacttgcagggtatgaagtgggccgaaaattgggtgcttgagcctcccggattcctcgcctacgagtgcgtgggaacatgtagacagccacctgaggctctcgccttcaaatggccatttctcggcccacgtcagtgtattgcttctgaaaccgatagcttaccaatgattgtgtctattaaggaaggaggcagaacgcgtccccaggtcgtgtctctgcctaatatgcgggtccagaagtgctcttgcgctagcgacggggccctggttccgagacggttgcagccttag

SEQ ID NO: 206933 - DNA, 1101 bp, Artificial Sequence
  derived and/or modified sequence
atgcagcccctgtggctgtgctgggccctgtgggtgctgcccctggccagccctggggccgccctgactggagagcagctgctgggcagcctgctgcggcagctgcagctgaaggaggtgcccaccctggacagagctgacatggaggagctggtgatccccacccacgtgcgggcccagtatgtggccctgctgcagaggagccatggagacaggagccggggcaagcgcttcagccagagcttccgggaggtggccggccgcttcctggccctggaggccagcacccacctgctggtgtttggcatggagcagaggctgccccccaacagcgagctggtgcaggccgtgctgcggctcttccaggagcctgtgcccaaggccgccctgcacagacatggccgcctgagccccaggtctgcccgggcccgggtgacagtggagtggctgcgggtgagagatgatggcagcaacagaaccagcctgattgacagccggctggtgtctgtgcatgaaagtggctggaaggcctttgatgtgacagaagctgtgaacttctggcagcagctgagccggccccggcagcccctgctgctgcaggtgtctgtgcagcgggagcacctgggccccctggccagcggggcccacaagctggtgcgctttgccagccagggcgccccagctggcctgggggagccccagctggagctgcacaccctggacctgggggactatggagcccagggcgactgtgaccctgaggcccccatgacagagggcacccgctgctgccggcaggagatgtacatcgacctgcagggcatgaagtgggccgagaactgggtgctggagcccccaggcttcctggcctatgaatgtgtgggcacctgccggcagcccccagaggccctggccttcaagtggcccttcctgggcccccggcagtgcatcgccagcgagacagacagcctgcccatgattgtgtccatcaaggagggcggccgcacccggccccaggtggtgtccctgcccaacatgagggtgcagaagtgcagctgtgccagtgatggagccctggtgccccggcggctgcagccctag

SEQ ID NO: 206934 - DNA, 1626 bp, Artificial Sequence
  derived and/or modified sequence
acatccagctgcctgagaccctcctgcagccttctcaagggacagccccactctgcctcttgctcctccagggcagcaccatgcagcccctgtggctctgctgggcactctgggtgttgcccctggccagccccggggccgccctgaccggggagcagctcctgggcagcctgctgcggcagctgcagctcaaagaggtgcccaccctggacagggccgacatggaggagctggtcatccccacccacgtgagggcccagtacgtggccctgctgcagcgcagccacggggaccgctcccgcggaaagaggttcagccagagcttccgagaggtggccggcaggttcctggcgttggaggccagcacacacctgctggtgttcggcatggagcagcggctgccgcccaacagcgagctggtgcaggccgtgctgcggctcttccaggagccggtccccaaggccgcgctgcacaggcacgggcggctgtccccgcgcagcgcccgggcccgggtgaccgtcgagtggctgcgcgtccgcgacgacggctccaaccgcacctccctcatcgactccaggctggtgtccgtccacgagagcggctggaaggccttcgacgtgaccgaggccgtgaacttctggcagcagctgagccggccccggcagccgctgctgctacaggtgtcggtgcagagggagcatctgggcccgctggcgtccggcgcccacaagctggtccgctttgcctcgcagggggcgccagccgggcttggggagccccagctggagctgcacaccctggaccttggggactatggagctcagggcgactgtgaccctgaagcaccaatgaccgagggcacccgctgctgccgccaggagatgtacattgacctgcaggggatgaagtgggccgagaactgggtgctggagcccccgggcttcctggcttatgagtgtgtgggcacctgccggcagcccccggaggccctggccttcaagtggccgtttctggggcctcgacagtgcatcgcctcggagactgactcgctgcccatgatcgtcagcatcaaggagggaggcaggaccaggccccaggtggtcagcctgcccaacatgagggtgcagaagtgcagctgtgcctcggatggtgcgctcgtgccaaggaggctccagccataggcgcctagtgtagccatcgagggacttgacttgtgtgtgtttctgaagtgttcgagggtaccaggagagctggcgatgactgaactgctgatggacaaatgctctgtgctctctagtgagccctgaatttgcttcctctgacaagttacctcacctaatttttgcttctcaggaatgagaatctttggccactggagagcccttgctcagttttctctattcttattattcactgcactatattctaagcacttacatgtggagatactgtaacctgagggcagaaagcccaatgtgtcattgtttacttgtcctgtcactggatctgggctaaagtcctccaccaccactctggacctaagacctggggttaagtgtgggttgtgcatccccaatccagataataaagactttgtaaaacatgaataaaacacattttattcta

SEQ ID NO: 206935 - DNA, 1101 bp, Artificial Sequence
  derived and/or modified sequence
atgcagcccctgtggctgtgctgggccctgtgggtgctgcccctggcctctccgggggcagcgttgaccggagagcagcttctaggctccctgttgagacagctccaactgaaagaagtacctacgctggatcgggccgacatggaagaacttgtcattccgacacatgttcgggctcagtatgtggcccttttacaaagaagtcatggcgaccggagtcgcggtaagcgcttcagccagtcctttcgcgaagttgcgggtaggtttctcgcgctggaagcctcaacccacttgcttgtcttcggaatggagcaaaggcttccccccaatagcgaactagtgcaggcagtgctgaggttatttcaggagcccgtacctaaagctgctctccatcggcatggccggctttctccacgatccgcgagggcgagggtcaccgtggagtggctacgtgtccgcgatgatggtagcaaccgtactagcctcattgactcccggcttgtgtccgtgcatgagtcaggctggaaggcatttgatgtgaccgaggcagtgaatttttggcaacagttgtcccggcctcggcagcccctgttactgcaagtgtccgtgcagcgcgagcaccttgggccactcgcctccggcgcacataagctggtgagatttgcatctcagggagcaccagctgggctcggcgagccccaattagagctgcatacacttgatcttggcgactacggggcccaaggcgactgcgacccagaggctcctatgaccgaaggcacacggtgttgccgccaagaaatgtacattgacctccagggaatgaagtgggccgagaactgggtgcttgagccacctggcttcctggcgtacgagtgtgtgggcacatgtcgacagccccccgaggccctcgcatttaagtggcccttcctgggccctcgccaatgtattgccagtgaaaccgacagtctccctatgattgtgagcattaaggagggagggcgtactcggccccaggtcgtgagcctccctaacatgcgggtgcagaagtgcagttgtgcgtcggatggcgctctggtcccacgcaggcttcagccttag

SEQ ID NO: 206936 - DNA, 1101 bp, Artificial Sequence
  derived and/or modified sequence
atgcaaccactgtggctgtgttgggccctgtgggtgttacccctggcctcaccaggagcggctcttaccggtgagcagttgctggggtccctgttgcgacaactacagctgaaggaagtccctacgttggatcgcgctgacatggaggaacttgtgattccgacgcatgtcagggctcagtacgttgctctcctgcagagaagccacggcgataggtctagaggaaaaaggttcagccagtcattccgggaagtagcaggccgtttcctggcccttgaagcatccacccatcttcttgtgtttggcatggaacagcgactgcccccaaacagcgaacttgtgcaggcagtcttgcgactgtttcaggagcctgtacccaaagctgcactgcaccggcatggtagactgagccctcgcagcgctcgcgctagagtcacagttgagtggctccgggtacgtgacgacgggagcaatagaacctccctgatcgattcccgcctggtctctgtccacgaatcagggtggaaagcctttgacgtgactgaagctgtgaatttttggcaacagctgtcacgcccacgccagcctctcctcttgcaagtgtcggtgcagagagaacatctcggaccattagcctcaggtgcacacaaattggtgaggtttgcatctcagggtgccccagccggactgggcgaaccccagctggagctgcataccctcgacctgggagactacggggctcaaggggattgcgaccctgaggcaccgatgactgaggggaccaggtgctgccgccaagaaatgtatatcgaccttcaagggatgaaatgggctgagaactgggtgctggagcctcccggattcctggcttatgagtgcgtgggcacgtgtcggcagccgccagaggcccttgccttcaagtggccatttctgggcccaagacagtgtatcgcttccgaaacagactccctccctatgattgtgagtatcaaagagggcggacgaacaagaccccaggtggtgagtctgcctaacatgcgtgttcagaaatgttcatgtgcaagcgacggcgctttggtgccaaggcgtctgcaaccctag

SEQ ID NO: 206937 - DNA, 1101 bp, Artificial Sequence
  derived and/or modified sequence
atgcagcccctgtggctgtgctgggccctgtgggtgctgcccctggccagccccggcgccgccctgaccggcgagcagctgctgggcagcctgctgagacagctgcagctgaaggaggtgcccaccctggacagagccgacatggaggagctggtgatccccacccacgtgagagcccagtacgtggccctgctgcagagaagccacggcgacagaagcagaggcaagagattcagccagagcttcagagaggtggccggcagattcctggccctggaggccagcacccacctgctggtgttcggcatggagcagagactgccccccaacagcgagctggtgcaggccgtgctgagactgttccaggagcccgtgcccaaggccgccctgcacagacacggcagactgagccccagaagcgccagagccagagtgaccgtggagtggctgagagtgagagacgacggcagcaacagaaccagcctgatcgacagcagactggtgagcgtgcacgagagcggctggaaggccttcgacgtgaccgaggccgtgaacttctggcagcagctgagcagacccagacagcccctgctgctgcaggtgagcgtgcagagagagcacctgggccccctggccagcggcgcccacaagctggtgagattcgccagccagggcgcccccgccggcctgggcgagccccagctggagctgcacaccctggacctgggcgactacggcgcccagggcgactgcgaccccgaggcccccatgaccgagggcaccagatgctgcagacaggagatgtacatcgacctgcagggcatgaagtgggccgagaactgggtgctggagccccccggcttcctggcctacgagtgcgtgggcacctgcagacagccccccgaggccctggccttcaagtggcccttcctgggccccagacagtgcatcgccagcgagaccgacagcctgcccatgatcgtgagcatcaaggagggcggcagaaccagaccccaggtggtgagcctgcccaacatgagagtgcagaagtgcagctgcgccagcgacggcgccctggtgcccagaagactgcagccctag

SEQ ID NO: 206938 - protein, 264 aa, Artificial Sequence
  derived and/or modified sequence
MLRGPWAFHYNVSSHGCQLLPWTQHSPHTRLRRSGRCDLFQKKDYVRTCIMNNGVGYRGTMATTVGGLPCQAWSHKFPNDHKYTPTLRNGLEENFCRNPDGDPGGPWCYTTDPAVRFQSCGIKSCREAACVWCNGEEYRGAVDRTESGRECQRWDLQHPHQHPFEPGKFLDQGLDDNYCRNPDGSERPWCYTTDPQIEREFCDLPRCGSEAQPRQEATTVSCFRGKGEGYRGTANTTTAGVPCQRWDAQIPHQHRFTPEKYACK

SEQ ID NO: 206939 - protein, 725 aa, Artificial Sequence
  derived and/or modified sequence
MGLWWVTVQPPARRMGWLPLLLLLTQCLGVPGQRSPLNDFQVLRGTELQHLLHAVVPGPWQEDVADAEECAGRCGPLMDCRAFHYNVSSHGCQLLPWTQHSPHTRLRRSGRCDLFQKKDYVRTCIMNNGVGYRGTMATTVGGLPCQAWSHKFPNDHKYTPTLRNGLEENFCRNPDGDPGGPWCYTTDPAVRFQSCGIKSCREAACVWCNGEEYRGAVDRTESGRECQRWDLQHPHQHPFEPGKFLDQGLDDNYCRNPDGSERPWCYTTDPQIEREFCDLPRCGSEAQPRQEATTVSCFRGKGEGYRGTANTTTAGVPCQRWDAQIPHQHRFTPEKYACKDLRENFCRNPDGSEAPWCFTLRPGMRAAFCYQIRRCTDDVRPQDCYHGAGEQYRGTVSKTRKGVQCQRWSAETPHKPQFTFTSEPHAQLEENFCRNPDGDSHGPWCYTMDPRTPFDYCALRRCADDQPPSILDPPDQVQFEKCGKRVDRLDQRRSKLRVVGGHPGNSPWTVSLRNRQGQHFCGGSLVKEQWILTARQCFSSCHMPLTGYEVWLGTLFQNPQHGEPSLQRVPVAKMVCGPSGSQLVLLKLERSVTLNQRVALICLPPEWYVVPPGTKCEIAGWGETKGTGNDTVLNVALLNVISNQECNIKHRGRVRESEMCTEGLLAPVGACEGDYGGPLACFTHNCWVLEGIIIPNRVCARSRWPAVFTRVSVFVDWIHKVMRLG

SEQ ID NO: 206940 - protein, 565 aa, Artificial Sequence
  derived and/or modified sequence
MTSRCSGAQSYLLHAVVPGPWQEDVADAEECAGRCGPLMDCWAFHYNVSSHGCQLLPWTQHSPHSRLWHSGRCDLFQEKDYIRTCIMNNGVGYRGTMATTVGGLSCQAWSHKFPNDHKYMPTLRNGLEENFCRNPDGDPGGPWCHTTDPAVRFQSCSIKSCRVAACVWCNGEEYRGAVDRTESGRECQRWDLQHPHQHPFEPGKFLDQGLDDNYCRNPDGSERPWCYTTDPQIEREFCDLPRCGSEAQPRQEATSVSCFRGKGEGYRGTANTTTGVPCQRWDAQIPHQHRFTPEKYACKDLRENFCWNLDGSEAPWCFTLRPGTRVGFCYQIRRCTDDVRPQDCYHGAGEQYRGTVSKTRKGVQCQRWSAETPHKLQFTFTSEPHAQLEENFCQPDGDSHGPWCYTMDPRTPFDYCALRRCADDQPPSILDPPNQVQFEKCGKRVDRLDQRRSKLRVAGGHPGNSPWTVSLRNRQGQHFCAGSLVKEQWILTARQCFSSCHMPLTGYEVWLGTLFQNPQHGEPGLQRVPVAKMLCGPSGSQLVLLKLERSVTLNQRVALICLPPE

SEQ ID NO: 206941 - DNA, 2178 bp, Artificial Sequence
  derived and/or modified sequence
atgggcctgtggtgggtgaccgtgcagccccccgccagaagaatgggctggctgcccctgctgctgctgctgacccagtgcctgggcgtgcccggccagagaagccccctgaacgacttccaggtgctgagaggcaccgagctgcagcacctgctgcacgccgtggtgcccggcccctggcaggaggacgtggccgacgccgaggagtgcgccggcagatgcggccccctgatggactgcagagccttccactacaacgtgagcagccacggctgccagctgctgccctggacccagcacagcccccacaccagactgagaagaagcggcagatgcgacctgttccagaagaaggactacgtgagaacctgcatcatgaacaacggcgtgggctacagaggcaccatggccaccaccgtgggcggcctgccctgccaggcctggagccacaagttccccaacgaccacaagtacacccccaccctgagaaacggcctggaggagaacttctgcagaaaccccgacggcgaccccggcggcccctggtgctacaccaccgaccccgccgtgagattccagagctgcggcatcaagagctgcagagaggccgcctgcgtgtggtgcaacggcgaggagtacagaggcgccgtggacagaaccgagagcggcagagagtgccagagatgggacctgcagcacccccaccagcaccccttcgagcccggcaagttcctggaccagggcctggacgacaactactgcagaaaccccgacggcagcgagagaccctggtgctacaccaccgacccccagatcgagagagagttctgcgacctgcccagatgcggcagcgaggcccagcccagacaggaggccaccaccgtgagctgcttcagaggcaagggcgagggctacagaggcaccgccaacaccaccaccgccggcgtgccctgccagagatgggacgcccagatcccccaccagcacagattcacccccgagaagtacgcctgcaaggacctgagagagaacttctgcagaaaccccgacggcagcgaggccccctggtgcttcaccctgagacccggcatgagagccgccttctgctaccagatcagaagatgcaccgacgacgtgagaccccaggactgctaccacggcgccggcgagcagtacagaggcaccgtgagcaagaccagaaagggcgtgcagtgccagagatggagcgccgagaccccccacaagccccagttcaccttcaccagcgagccccacgcccagctggaggagaacttctgcagaaaccccgacggcgacagccacggcccctggtgctacaccatggaccccagaacccccttcgactactgcgccctgagaagatgcgccgacgaccagccccccagcatcctggacccccccgaccaggtgcagttcgagaagtgcggcaagagagtggacagactggaccagagaagaagcaagctgagagtggtgggcggccaccccggcaacagcccctggaccgtgagcctgagaaacagacagggccagcacttctgcggcggcagcctggtgaaggagcagtggatcctgaccgccagacagtgcttcagcagctgccacatgcccctgaccggctacgaggtgtggctgggcaccctgttccagaacccccagcacggcgagcccagcctgcagagagtgcccgtggccaagatggtgtgcggccccagcggcagccagctggtgctgctgaagctggagagaagcgtgaccctgaaccagagagtggccctgatctgcctgccccccgagtggtacgtggtgccccccggcaccaagtgcgagatcgccggctggggcgagaccaagggcaccggcaacgacaccgtgctgaacgtggccctgctgaacgtgatcagcaaccaggagtgcaacatcaagcacagaggcagagtgagagagagcgagatgtgcaccgagggcctgctggcccccgtgggcgcctgcgagggcgactacggcggccccctggcctgcttcacccacaactgctgggtgctggagggcatcatcatccccaacagagtgtgcgccagaagcagatggcccgccgtgttcaccagagtgagcgtgttcgtggactggatccacaaggtgatgagactgggctag

SEQ ID NO: 206942 - DNA, 1698 bp, Artificial Sequence
  derived and/or modified sequence
atgaccagcagatgcagcggcgcccagagctacctgctgcacgccgtggtgcccggcccctggcaggaggacgtggccgacgccgaggagtgcgccggcagatgcggccccctgatggactgctgggccttccactacaacgtgagcagccacggctgccagctgctgccctggacccagcacagcccccacagcagactgtggcacagcggcagatgcgacctgttccaggagaaggactacatcagaacctgcatcatgaacaacggcgtgggctacagaggcaccatggccaccaccgtgggcggcctgagctgccaggcctggagccacaagttccccaacgaccacaagtacatgcccaccctgagaaacggcctggaggagaacttctgcagaaaccccgacggcgaccccggcggcccctggtgccacaccaccgaccccgccgtgagattccagagctgcagcatcaagagctgcagagtggccgcctgcgtgtggtgcaacggcgaggagtacagaggcgccgtggacagaaccgagagcggcagagagtgccagagatgggacctgcagcacccccaccagcaccccttcgagcccggcaagttcctggaccagggcctggacgacaactactgcagaaaccccgacggcagcgagagaccctggtgctacaccaccgacccccagatcgagagagagttctgcgacctgcccagatgcggcagcgaggcccagcccagacaggaggccaccagcgtgagctgcttcagaggcaagggcgagggctacagaggcaccgccaacaccaccaccggcgtgccctgccagagatgggacgcccagatcccccaccagcacagattcacccccgagaagtacgcctgcaaggacctgagagagaacttctgctggaacctggacggcagcgaggccccctggtgcttcaccctgagacccggcaccagagtgggcttctgctaccagatcagaagatgcaccgacgacgtgagaccccaggactgctaccacggcgccggcgagcagtacagaggcaccgtgagcaagaccagaaagggcgtgcagtgccagagatggagcgccgagaccccccacaagctgcagttcaccttcaccagcgagccccacgcccagctggaggagaacttctgccagcccgacggcgacagccacggcccctggtgctacaccatggaccccagaacccccttcgactactgcgccctgagaagatgcgccgacgaccagccccccagcatcctggacccccccaaccaggtgcagttcgagaagtgcggcaagagagtggacagactggaccagagaagaagcaagctgagagtggccggcggccaccccggcaacagcccctggaccgtgagcctgagaaacagacagggccagcacttctgcgccggcagcctggtgaaggagcagtggatcctgaccgccagacagtgcttcagcagctgccacatgcccctgaccggctacgaggtgtggctgggcaccctgttccagaacccccagcacggcgagcccggcctgcagagagtgcccgtggccaagatgctgtgcggccccagcggcagccagctggtgctgctgaagctggagagaagcgtgaccctgaaccagagagtggccctgatctgcctgccccccgagtag

SEQ ID NO: 206943 - DNA, 2178 bp, Artificial Sequence
  derived and/or modified sequence
atggggctgtggtgggtaactgtgcagccacccgctcgtagaatggggtggctgccccttctacttctgctaacccaatgtctcggagtgccgggccagcggagccccttgaatgacttccaggtgcttcgcggaacagaattgcagcacctgctccacgcggtagttcccggaccttggcaagaggacgtggccgatgcagaggagtgcgccggtaggtgcggcccactgatggattgtcgggcctttcattacaacgtctcgagtcacggatgtcagctactgccttggacccaacactcaccccatacacgtctgagaaggtcgggaagatgtgacctgttccaaaaaaaggactacgtccggacctgtattatgaataacggtgtgggttatcgaggtaccatggccaccactgtcggaggcctgccttgccaggcgtggtctcataagttcccaaacgatcataagtatacacctaccttgagaaacggactcgaagaaaatttctgtcggaatccagacggagatcctggagggccctggtgttacacaactgaccccgcggtgagatttcaaagttgtggtattaagagttgtagagaagccgcgtgcgtgtggtgcaatggagaagaatacaggggtgccgtggaccgcaccgagagcgggagggaatgtcagcgttgggatctccagcatccacaccagcacccatttgaaccaggcaagtttcttgaccaaggactcgatgacaactattgccggaacccggatggcagcgagcggccatggtgctacaccaccgacccccagatcgagcgagagttctgcgatctgccacgatgcggctctgaggcacagccaaggcaagaagcaacaacggtgtcctgctttagaggaaagggagaaggctaccgcggaactgccaataccacaacggcaggggtaccatgccagaggtgggatgcacagatacctcaccagcacaggttcactcccgaaaagtacgcctgtaaggaccttcgcgagaatttctgccggaacccagatggctcggaagctccctggtgtttcacactaagacccgggatgagagcagctttctgctatcaaatccgacgctgcacagatgatgtgcggcctcaggattgctatcacggggccggggagcaatacagggggacagtgagcaagaccagaaagggtgtacaatgtcagcggtggtcagcagagacgccacacaagccccagtttacatttaccagtgaaccacacgctcaactggaggagaatttttgtcgaaacccagacggggattcccacgggccatggtgttacactatggatccacgtacgcccttcgactattgcgctcttagacgctgcgccgatgatcagccacccagcatcctggacccgccagatcaggttcagttcgagaagtgtggcaaaagggtggacagactcgaccagcgaaggtcaaagcttagagtcgtgggaggtcaccctggtaatagtccatggacagtttcactgaggaatcggcagggccagcacttctgtggaggatcactggtcaaagaacagtggatattgacagcacggcagtgttttagtagctgccacatgcctttgacaggttacgaggtgtggctggggaccctgtttcagaacccacagcacggcgagccttccttacagcgcgttccggtggccaagatggtctgtggaccttcggggtctcagctggtcctcctgaagctggaaagaagcgtgacgttaaatcagcgggttgccctcatctgtctgcctcctgagtggtacgttgtgcctcccggtacaaaatgcgagatagccggctggggagagactaagggtaccggcaacgacaccgtgttgaacgtggccctattgaacgttatttctaatcaggagtgcaacattaaacatagaggcagggtgcgggagtctgagatgtgcacagaaggcctgctggctccggtgggagcgtgtgaaggggactatggtggcccactcgcctgctttactcacaattgctgggtgctagaaggcattatcatccctaacagggtatgcgccagatcacggtggccggcagtattcacgagagtctcagttttcgtggattggattcacaaagtcatgcgcctcgggtag

SEQ ID NO: 206944 - DNA, 1698 bp, Artificial Sequence
  derived and/or modified sequence
atgacctctcgctgctcaggggcacagtcctaccttctccacgccgtggtgccaggtccatggcaggaggacgtagccgatgcagaggagtgcgccggtagatgtggaccactaatggactgttgggccttccactacaacgtgtcatctcacggttgccaactgcttccttggactcagcactctccccattctaggctgtggcattcgggtcgttgtgatctctttcaggaaaaggactatatcaggacctgtattatgaacaacggggtaggatataggggcaccatggccacaactgtgggcggcctctcatgccaggcctggagccacaagttccccaacgatcacaaatacatgccaactctgcgcaatggactggaggaaaacttttgtcgcaatcctgacggagaccccggcggcccctggtgccataccacagacccagccgtgcgttttcagtcttgtagtattaagtcgtgcagagtggcagcctgcgtctggtgcaatggcgaggaatatcgcggcgccgttgacaggactgagtcaggcagggaatgtcagagatgggacttacagcatccccaccagcacccttttgaacctggaaagttcctggatcaggggcttgacgataattattgtcgtaaccctgacggctccgaacggccttggtgttatactaccgaccctcagatcgaaagagaattttgcgacctgccccgatgtgggtccgaggctcagccgcgccaggaggctacatctgtcagctgtttcaggggcaagggagagggataccgggggaccgctaataccacgacaggggtgccttgccagagatgggatgctcagattccccatcagcaccgattcacgcctgagaagtacgcctgcaaggatctccgcgagaatttttgctggaatctcgatggttctgaagcaccctggtgttttacactacggcccggaacccgggttggcttctgctatcagatccgcaggtgcactgacgacgtacgaccccaagactgctatcatggggcaggcgagcaatacagaggtacagtgtccaagacccggaagggagtgcagtgccaacgctggagtgctgagacccctcacaagctccaatttaccttcaccagcgagccacatgcccagctcgaggagaacttttgccagcccgatggagattctcatgggccttggtgctataccatggacccacggacccctttcgactattgtgctttgagacggtgcgccgatgaccagcctccgtctatcctggacccacccaaccaggtccaattcgagaagtgcggaaaaagggttgacaggttagatcaaagacgaagcaaattacgcgttgctgggggccaccccgggaactcgccatggactgtgtctttgaggaaccgccaaggacagcatttctgtgctggctccttggtgaaagaacagtggattctcacagcacggcagtgtttctcttcctgccatatgcctctcactggctacgaggtgtggcttggaacactctttcagaacccacagcacggggaaccgggcctgcaaagggtcccagtagccaagatgctctgtggaccgtcgggatctcagctcgtcttgcttaaactcgaaagatctgtcactttaaatcagcgggtagccctgatttgtttgcctcccgaatag

SEQ ID NO: 206945 - DNA, 2178 bp, Artificial Sequence
  derived and/or modified sequence
atgggcctgtggtgggtgacagtgcagcccccagcccggaggatgggctggctgcccctgctgctgctgctgacccagtgcctgggcgtgcccggccagaggagccccctgaatgacttccaggtgctgcggggcacagagctgcagcacctgctgcatgctgtggtgcccggcccctggcaggaggatgtggctgatgctgaagaatgtgccggccgctgtggccccctgatggactgccgggccttccactacaacgtgagcagccacggctgccagctgctgccctggacccagcacagcccccacacccggctgcggcgcagcggccgctgtgacctcttccagaagaaggactatgtgaggacctgcatcatgaacaacggggtgggctaccggggcaccatggccaccaccgtgggcggcctgccctgccaggcctggagccacaagttccccaatgaccacaagtacacccccaccctgagaaatggcctggaggagaacttctgcaggaacccagatggagaccccggcggcccctggtgctacaccacagatcctgctgtgcgcttccagagctgtggcatcaagagctgccgggaggccgcctgtgtgtggtgcaatggagaggagtacagaggagctgtggacagaacagagagcggccgggagtgccagcgctgggacctgcagcacccccaccagcacccctttgagcccgggaagttcctggaccagggcctggatgacaactactgcagaaatccagatggcagcgagcggccctggtgctacaccacagacccccagatcgagcgggagttctgtgacctgccccgctgtggcagcgaggcccagccccggcaggaggccaccaccgtgtcctgcttccggggcaaaggagagggctaccggggcacagccaacaccaccacagctggggtgccctgccagcgctgggatgcccagatcccccaccagcaccgcttcaccccagagaagtatgcctgcaaggacctgcgggagaacttctgcagaaatccagatggcagcgaggccccctggtgcttcaccctgcggcccggcatgagagctgccttctgctaccagatccgccgctgcacagatgatgtgcggccccaggactgctaccacggggccggggagcagtaccggggcaccgtgtccaagaccaggaaaggagtgcagtgccagcgctggagcgctgagaccccccacaagccccagttcaccttcaccagcgagccccacgcccagctggaggagaacttctgcaggaacccagatggagacagccacggcccctggtgctacaccatggaccccaggaccccatttgactactgtgccctgcggcgctgtgctgatgaccagcccccatccatcctggaccccccagaccaggtgcagtttgagaagtgtgggaagagggtggaccggctggaccagaggaggagcaagctgcgggtggtgggcggccaccctggcaacagcccctggacagtgtccctgaggaaccggcagggccagcacttctgtggcggcagcctggtgaaggagcagtggatcctgacagcccggcagtgcttcagcagctgccacatgcccctgaccggctatgaggtgtggctgggcaccctcttccagaacccccagcacggggagcccagcctgcagagggtgcctgtggccaagatggtgtgtggccccagcggcagccagctggtgctgctgaagctggagaggtctgtgaccctgaaccagagggtggccctgatctgcctgcccccagagtggtacgtggtgcccccaggcaccaagtgtgaaattgctggctggggcgagaccaagggcactggaaatgacacagtgctgaatgtggccctgctgaatgtcatcagcaaccaggagtgcaacatcaagcaccggggccgggtgcgggagagcgagatgtgcacagagggcctgctggcccctgtgggcgcctgtgagggggactatggaggccccctggcctgcttcacccacaactgctgggtgctggagggcatcatcatccccaacagagtgtgtgcccggagccgctggccagctgtgttcaccagggtgtctgtgtttgtggactggatccacaaggtgatgaggctgggctag

SEQ ID NO: 206946 - DNA, 1698 bp, Artificial Sequence
  derived and/or modified sequence
atgaccagccgctgcagcggggcccagagctacctgctgcatgctgtggtgcccggcccctggcaggaggatgtggctgatgctgaggagtgtgccggccgctgtggccccctgatggactgctgggccttccactacaacgtgagcagccacggctgccagctgctgccctggacccagcacagcccccacagccggctgtggcacagcggccgctgtgacctcttccaggagaaggactacatccgcacctgcatcatgaacaatggagtgggctaccggggcaccatggccaccaccgtgggcggcctgagctgccaggcctggagccacaagttccccaatgaccacaagtacatgcccaccctgagaaatggcctggaggagaacttctgcagaaatccagatggagaccccggcggcccctggtgccacaccacagatcctgctgtgcgcttccagagctgcagcatcaagagctgccgggtggccgcctgtgtgtggtgcaatggagaggagtacagaggagctgtggacagaacagaaagtggccgggagtgccagcgctgggacctgcagcacccccaccagcacccctttgagcccgggaagttcctggaccagggcctggatgacaactactgcaggaacccagatggcagcgagcggccctggtgctacaccacagacccccagatcgagcgggagttctgtgacctgccccgctgtggcagcgaggcccagccccggcaggaggccacctctgtgtcctgcttccggggcaagggggagggctaccggggcacagccaacaccaccaccggggtgccctgccagcgctgggatgcccagatcccccaccagcaccgcttcaccccagagaagtatgcctgcaaggacctgcgggagaacttctgctggaacctggatggcagcgaggccccctggtgcttcaccctgcggcccggcaccagggtgggcttctgctaccagatccgccgctgcacagatgatgtgcggccccaggactgctaccacggggccggggagcagtaccggggcaccgtgtccaagaccaggaaaggagtgcagtgccagcgctggagcgctgagaccccccacaagctgcagttcaccttcaccagcgagccccacgcccagctggaggagaacttctgccagccagatggagacagccacggcccctggtgctacaccatggaccccaggaccccatttgactactgtgccctgcggcgctgtgctgatgaccagccccccagcatcctggacccccccaaccaggtgcagtttgagaagtgtgggaagagggtggaccggctggaccagaggaggagcaagctgcgggtggccggcggccaccctggcaacagcccctggacagtgtccctgaggaaccggcagggccagcacttctgtgccggcagcctggtgaaggagcagtggatcctgacagcccggcagtgcttcagcagctgccacatgcccctgaccggctatgaggtgtggctgggcaccctcttccagaacccccagcacggggagcccggcctgcagagggtgcctgtggccaagatgctgtgtggccccagcggcagccagctggtgctgctgaagctggagaggtctgtgaccctgaaccagagggtggccctgatctgcctgcccccagagtag

SEQ ID NO: 206947 - DNA, 2178 bp, Artificial Sequence
  derived and/or modified sequence
atgggcctgtggtgggtgaccgtgcagccccccgcccggcggatgggatggctcccacttctgcttctgctgacacagtgcctcggcgtccctggccagagatcccctctaaatgacttccaggttctcagaggcactgaattacagcacctgttacacgccgtggtgcctggcccctggcaggaagacgtggcggacgccgaagagtgcgctggcaggtgtggtccccttatggactgccgcgcttttcattacaacgtgagcagccacggttgccagctcctcccctggacacaacactctcctcacactaggctacgccggagcggacgctgtgatctgtttcaaaagaaggattacgtgcggacctgcataatgaacaacggcgtggggtatagagggactatggccacgactgtcggtggcctgccttgccaggcctggagccataaattcccaaatgaccataagtatactcctaccctgcgaaatggcctggaggaaaatttctgccggaaccccgatggcgacccagggggaccatggtgttacaccaccgaccccgcagttcggtttcagtcatgcggtatcaagtcctgtagggaggctgcttgtgtatggtgcaatggcgaggaataccgaggcgcagtggatcgtaccgagagcgggagggagtgtcagaggtgggacctccagcatccgcaccagcatccgttcgaaccagggaaattcttagaccaaggcctcgacgacaactattgtcggaacccagacggatccgaacgtccgtggtgttacacgacggaccctcagatcgaacgggaattctgtgacttgccgcgctgcggttctgaggctcagccgaggcaggaagctaccactgtatcttgctttcgaggtaaaggggagggctaccgcggcaccgccaatacaaccactgcaggagtaccttgccagcgatgggatgcccagatcccccatcagcacaggttcacgcccgaaaagtacgcatgcaaggaccttagagaaaatttctgtaggaacccagatggaagcgaggctccatggtgtttcactctccgaccaggcatgcgggcagcgttttgttatcaaatccgcaggtgcactgacgacgtgagaccacaggattgttaccacggagcgggagaacagtacagaggaactgtgagcaaaacacggaagggggtgcaatgtcagaggtggagcgcagagactccgcacaagccacagtttacattcacaagcgaacctcatgcccagctagaggaaaatttctgcagaaatccagatggggactctcacgggccttggtgttatactatggatcctcgcacaccctttgactactgtgccctgcggcggtgtgcagacgatcagcccccttcaatccttgaccccccggaccaggtccagttcgagaagtgtgggaaacgggttgataggctcgatcagagacgctccaagctgagagtagtgggaggacacccaggaaacagtccttggactgtgagtctgcggaaccggcaggggcagcatttttgtggtggatctttagttaaggagcaatggattctgaccgcacggcaatgcttttcatcttgtcatatgcccttgacaggatatgaagtctggctgggaaccctgttccagaacccacagcacggcgagcccagtcttcagcgtgttcccgttgcaaaaatggtctgcggacctagcggaagccagttggtgctcctgaaactagaaagatccgtgaccctaaatcagagggtggcattgatttgtctgccccccgaatggtacgttgttcccccaggtactaagtgcgagatcgccggctggggcgagaccaaggggactggaaatgatacagtcctgaacgtggctctcctcaatgtaatttccaaccaggagtgtaatataaagcacaggggccgcgtgcgtgaatccgaaatgtgtactgagggacttttagctcccgttggagcatgcgagggcgattatggaggtccattggcttgtttcactcataactgctgggtacttgaagggataatcattccaaacagagtgtgtgcacgatccaggtggcccgccgtattcactcgtgtaagcgtcttcgtcgattggattcataaagtcatgcgactggggtag

SEQ ID NO: 206948 - DNA, 1698 bp, Artificial Sequence
  derived and/or modified sequence
atgaccagccggtgcagcggcgcccagagctacctgctgcacgccgtggttcccggtccatggcaggaagatgtggcggatgctgaggagtgcgccggacggtgcgggcccctgatggattgttgggcgttccattacaacgtgtcgtcacatggctgccagctgctcccgtggacccagcattcgccgcacagccggctttggcactccggcagatgcgatctttttcaggagaaagattatattagaacctgtataatgaataatggagtggggtacaggggtacaatggccactacagtgggcggcctctcatgccaggcctggagtcacaagtttcccaacgatcacaagtacatgcccacattacggaatggcttagaggaaaacttttgccggaacccagacggcgatccgggaggcccatggtgtcacaccaccgaccctgccgtgagatttcagtcctgcagtatcaagtcatgtcgggtcgctgcctgcgtgtggtgcaatggagaggagtatcgaggcgccgtggataggacagagagtggtagggaatgtcagaggtgggacctgcagcaccctcatcagcatccgttcgaaccgggcaaatttctggaccagggtttagacgataactactgccgcaacccagacggtagcgagcgtccctggtgctatacaaccgatcctcagatagagcgagagttctgtgatctgccccgttgcggctctgaagcccagcctagacaagaagcaacttcagtgagctgtttcagaggcaaaggcgagggctacaggggaaccgcaaatacgacaacaggtgtcccttgtcagcgatgggatgcacagattccccatcaacatagatttacccccgagaagtatgcttgtaaggatctcagggaaaatttttgctggaatcttgacggtagcgaagctccttggtgcttcacactgagacccggaacacgggttgggttttgctatcaaatcaggagatgtaccgacgacgtgcggccgcaagattgctatcatggggcaggcgaacagtaccggggaaccgtttctaaaacacgcaagggggtgcagtgccagcgctggtcggcggaaactccccacaagttgcaatttaccttcacctccgagccacacgcccaattggaggaaaacttctgccaaccggatggcgattctcacgggccatggtgttacaccatggacccaaggactccgttcgactattgcgccctgcgaagatgtgcagacgaccagcccccgtctatactggatccccccaatcaggtacagtttgaaaagtgcggaaagagggtggaccggctggatcaaaggaggtccaagctgcgagtagccggcggacatcccggtaactcaccctggactgtgtcacttagaaaccggcagggccagcatttctgcgctggatctctggtcaaagagcagtggattctgaccgcccggcaatgtttctcaagctgtcacatgcccctaactggatacgaagtatggttgggaaccctgttccagaatccgcagcacggagaacctggtctgcagcgagtgccagtggctaagatgctctgtggaccatcggggagccagcttgtgctgctgaagcttgaacgtagcgtgacactcaatcagagggttgccctgatctgcttgcctccagagtag

SEQ ID NO: 206949 - DNA, 2178 bp, Artificial Sequence
  derived and/or modified sequence
atgggactgtggtgggttaccgttcaacctccagcgagaaggatggggtggttgccactgctgctgctgttaacacagtgtttgggagtcccaggtcagaggtcccccttgaacgacttccaggtcttgagaggtacagagctccagcatttacttcacgccgtggtacccggaccatggcaggaagacgttgcagacgccgaagagtgcgctggacggtgtggccctttaatggactgccgggcattccactataacgtctcatcccatgggtgtcaactgctgccatggacccagcattccccccacacaaggctgcgaaggagcggtagatgcgacctctttcagaagaaagattacgttcggacctgcatcatgaacaacggagtagggtatagggggacaatggcaaccacagtgggaggcctcccctgtcaagcctggtctcataagttccccaacgaccacaagtacactccgaccctgagaaacggactggaggaaaatttttgtcggaacccggacggagatccaggcggaccctggtgctataccacagaccctgcggtgcgcttccagtcttgtggaataaagagttgtagggaagcagcctgcgtatggtgcaacggagaggagtaccggggagccgtcgacaggaccgagtctggtagagagtgccagagatgggatctccagcaccctcaccagcatcctttcgagccaggaaagttcctggatcagggtctggatgacaactattgtcgaaatccagacgggtccgaaaggccctggtgctacaccaccgatcctcagatcgagagggaattctgtgatctgccacggtgcggatctgaggcccagccgaggcaggaggcgacaaccgtgagttgttttcgcggaaagggtgaagggtatcgtggcaccgcaaatacgactactgcgggtgtaccttgccaaaggtgggacgcccagatcccgcaccagcaccgctttaccccagagaaatatgcctgtaaagatctacgagagaacttttgtcggaatccagatggatccgaagcaccttggtgctttactttacgcccaggaatgagagcggcattctgttaccagatccggagatgcaccgacgacgtgcgtccccaggactgctatcacggtgctggcgagcagtataggggaacagtctcaaaaacccggaaaggcgtgcagtgtcagagatggtctgcagaaacgcctcacaaacctcagtttacctttacctctgagccccacgctcagttagaggaaaatttttgccgcaaccctgacggcgacagtcacggtccttggtgctacactatggatcccaggaccccttttgattattgcgccctgcggagatgtgccgacgatcagcctccatccatcctcgaccctcccgaccaggttcagttcgaaaaatgcggcaagcgcgtcgacaggctggaccagagacgaagtaaattacgcgtggtggggggacaccccggtaacagcccctggaccgtatcattgcggaatagacaaggacaacacttctgtgggggtagcctagtaaaggaacagtggatcctcaccgccagacagtgttttagctcctgccatatgcccctgactggctatgaagtgtggctggggactctctttcagaacccacaacacggggaaccttctcttcagagagtccctgtcgccaagatggtttgtggccctagcggctctcagctcgttctgttaaaactggaacggtcagtgaccctcaaccagagagtggctctgatttgtctccctcctgagtggtacgtggttcctcctggaaccaaatgtgagattgctggatggggagagaccaaggggaccgggaacgacacagtgttgaacgtagcactccttaacgtcatctctaaccaggagtgcaacataaaacacaggggcagagtgagagagagcgaaatgtgtactgagggcctgttggcaccagtgggggcatgcgaaggcgattatggcggaccactggcatgttttacgcacaactgttgggtgctggagggaatcattattccaaatcgcgtctgcgctcgaagccgctggcccgctgtgtttacccgagtcagtgtattcgtcgactggatccacaaggtaatgaggttgggatag

SEQ ID NO: 206950 - DNA, 1698 bp, Artificial Sequence
  derived and/or modified sequence
atgacatccagatgctccggggctcaaagttatctgctgcacgctgtagtccccggaccctggcaagaggatgttgcagacgcagaagagtgtgccggacgttgcgggcctctcatggactgctgggcttttcactataatgtatccagccacgggtgccagctacttccatggacacagcacagtccgcatagccggctgtggcatagtggcagatgtgacttatttcaggagaaagactacattcgcacctgtattatgaacaacggtgtgggctatagaggtaccatggccacaacggtgggtggactatcctgccaagcctggtcacataaattcccgaacgaccacaaatatatgccaacacttcgcaacgggcttgaggaaaacttctgcagaaatccagacggcgatcccggtgggccttggtgccataccaccgatcctgccgttaggttccaaagctgctcaatcaaaagctgtcgcgtggccgcttgtgtatggtgtaatggtgaggaatatagaggggctgttgataggacagagtcggggagggagtgccagaggtgggatctgcaacaccctcatcagcatccttttgagccaggaaaattcctcgaccagggtctggacgataattactgtagaaatcctgacggcagcgagaggccttggtgctacacaacagacccccaaatcgagcgggagttctgtgacttgccccgatgcgggtcagaggcacagcctcgacaagaggctacaagcgtttcatgtttccgaggcaagggggaaggctatcgagggactgctaacaccaccaccggagtgccgtgccagagatgggacgcacagattccccatcagcacagattcacccccgaaaaatatgcctgtaaggatctgcgcgagaacttttgctggaatctagatggttctgaggctccctggtgcttcactctccgtccaggcactagggtcggattttgttatcaaatacgcagatgcacagatgatgtgaggccccaagattgctatcatggtgctggtgaacagtacagaggcacagttagtaagaccaggaagggggtgcagtgccagcgctggtctgccgaaacaccccataagttacaatttacttttacttccgaacctcacgcccagctggaggagaacttttgccagccagatggtgactcccatgggccatggtgctacacgatggacccaaggacccctttcgattattgcgccttacgccgatgtgccgacgatcagccacccagcatccttgaccctccgaatcaggtgcaattcgaaaaatgtgggaagagagtcgaccggctcgatcagcgcagatccaagttgagggtggccggaggtcatcccggaaattcgccctggactgtgagccttaggaatagacagggacagcacttttgtgccggtagcttggtcaaggaacagtggattttgactgccaggcagtgcttttcatcttgccatatgccactgacaggctatgaggtctggctcgggaccctgtttcagaaccctcagcacggggagccaggactgcagagggtgccagtcgccaagatgctgtgtggcccttcagggtcccagttggtcctgttgaaactggaacgttccgtcaccctcaatcagcgggtggctctgatatgtttacccccagagtag

SEQ ID NO: 206951 - DNA, 1434 bp, Artificial Sequence
  derived and/or modified sequence
agtgcagcctccagccagaaggatggggtggctcccactcctgctgcttctgactcaatgcttaggggtccctgggccttccactacaacgtgagcagccatggttgccaactgctgccatggactcaacactcgccccacacgaggctgcggcgttctgggcgctgtgacctcttccagaagaaagactacgtacggacctgcatcatgaacaatggggttgggtaccggggcaccatggccacgaccgtgggtggcctgccctgccaggcttggagccacaagttcccaaatgatcacaagtacacgcccactctccggaatggcctggaagagaacttctgccgtaaccctgatggcgaccccggaggtccttggtgctacacaacagaccctgctgtgcgcttccagagctgcggcatcaaatcctgccgggaggccgcgtgtgtctggtgcaatggcgaggaataccgcggcgcggtagaccgcacggagtcagggcgcgagtgccagcgctgggatcttcagcacccgcaccagcaccccttcgagccgggcaagttcctcgaccaaggtctggacgacaactattgccggaatcctgacggctccgagcggccatggtgctacactacggatccgcagatcgagcgagagttctgtgacctcccccgctgcgggtccgaggcacagccccgccaagaggccacaactgtcagctgcttccgcgggaagggtgagggctaccggggcacagccaataccaccactgcgggcgtaccttgccagcgttgggacgcgcaaatcccgcatcagcaccgatttacgccagaaaaatacgcgtgcaagtgaggtggggggggggggcgggcgttgggacgtgctgctgcgggtgagacgggaggaaggtagtcacgggctcaaggctggaggctggcgggctagggctgagtggagcgcctgcttagagaccttcgggagaacttctgccggaaccccgacggctcagaggcgccctggtgcttcacactgcggcccggcatgcgcgcggccttttgctaccagatccggcgttgtacagacgacgtgcggccccaggactgctaccacggcgcaggggagcagtaccgcggcacggtcagcaagacccgcaagggtgtccagtgccagcgctggtccgctgagacgccgcacaagccgcagttcacgtttacctccgaaccgcatgcacaactggaggagaacttctgccggaacccagatggggatagccatgggccctggtgctacacgatggacccaaggaccccattcgactactgtgccctgcgacgctgcgctgatgaccagccgccatcaatcctggaccccccagaccaggtgcagtttgagaagtgtggcaagagggtggatcggctggatcagcggcgttcc

SEQ ID NO: 206952 - DNA, 2621 bp, Artificial Sequence
  derived and/or modified sequence
gaagctggggcaagtaattttccccaatttacagggaaaaaccgaaattcagaaaagtttaatgtcacccaggggctggagcccagacctctggcagctctcactttcacaatgcccttgggctgactaggctgcagaggggtttcaccccaaccccagggcacctcaagtgtccccaccaaaccttcctaacacctgtccactaagctgtactaggcccttgcaactgacctatgggacctgaggcctggcccctcatggctcctgtcaccaggtctcaggtcagggtccagcaggccctgagctgacgtgtggagccagagccacccaatcccgtagggacaggtttcacaacttcccggatggggctgtggtgggtcacagtgcagcctccagccagaaggatggggtggctcccactcctgctgcttctgactcaatgcttaggggtccctgggcagcgctcgccattgaatgacttccaagtgctccggggcacagagctacagcacctgctacatgcggtggtgcccgggccttggcaggaggatgtggcagatgctgaagagtgtgctggtcgctgtgggcccttaatggactgccgggccttccactacaacgtgagcagccatggttgccaactgctgccatggactcaacactcgccccacacgaggctgcggcgttctgggcgctgtgacctcttccagaagaaagactacgtacggacctgcatcatgaacaatggggttgggtaccggggcaccatggccacgaccgtgggtggcctgccctgccaggcttggagccacaagttcccaaatgatcacaagtacacgcccactctccggaatggcctggaagagaacttctgccgtaaccctgatggcgaccccggaggtccttggtgctacacaacagaccctgctgtgcgcttccagagctgcggcatcaaatcctgccgggaggccgcgtgtgtctggtgcaatggcgaggaataccgcggcgcggtagaccgcacggagtcagggcgcgagtgccagcgctgggatcttcagcacccgcaccagcaccccttcgagccgggcaagttcctcgaccaaggtctggacgacaactattgccggaatcctgacggctccgagcggccatggtgctacactacggatccgcagatcgagcgagagttctgtgacctcccccgctgcgggtccgaggcacagccccgccaagaggccacaactgtcagctgcttccgcgggaagggtgagggctaccggggcacagccaataccaccactgcgggcgtaccttgccagcgttgggacgcgcaaatcccgcatcagcaccgatttacgccagaaaaatacgcgtgcaaagaccttcgggagaacttctgccggaaccccgacggctcagaggcgccctggtgcttcacactgcggcccggcatgcgcgcggccttttgctaccagatccggcgttgtacagacgacgtgcggccccaggactgctaccacggcgcaggggagcagtaccgcggcacggtcagcaagacccgcaagggtgtccagtgccagcgctggtccgctgagacgccgcacaagccgcagttcacgtttacctccgaaccgcatgcacaactggaggagaacttctgccggaacccagatggggatagccatgggccctggtgctacacgatggacccaaggaccccattcgactactgtgccctgcgacgctgcgctgatgaccagccgccatcaatcctggaccccccagaccaggtgcagtttgagaagtgtggcaagagggtggatcggctggatcagcggcgttccaagctgcgcgtggttgggggccatccgggcaactcaccctggacagtcagcttgcggaatcggcagggccagcatttctgcggggggtctctagtgaaggagcagtggatactgactgcccggcagtgcttctcctcctgccatatgcctctcacgggctatgaggtatggttgggcaccctgttccagaacccacagcatggagagccaagcctacagcgggtcccagtagccaagatggtgtgtgggccctcaggctcccagcttgtcctgctcaagctggagagatctgtgaccctgaaccagcgtgtggccctgatctgcctgccccctgaatggtatgtggtgcctccagggaccaagtgtgagattgcaggctggggtgagaccaaaggtacgggtaatgacacagtcctaaatgtggccttgctgaatgtcatctccaaccaggagtgtaacatcaagcaccgaggacgtgtgcgggagagtgagatgtgcactgagggactgttggcccctgtgggggcctgtgagggtgactacgggggcccacttgcctgctttacccacaactgctgggtcctggaaggaattataatccccaaccgagtatgcgcaaggtcccgctggccagctgtcttcacgcgtgtctctgtgtttgtggactggattcacaaggtcatgagactgggttaggcccagccttgatgccatatgccttggggaggacaaaacttcttgtcagacataaagccatgtttcctctttatgcctgta

SEQ ID NO: 206953 - DNA, 4377 bp, Artificial Sequence
  derived and/or modified sequence
atgacttccaggtgctccggggcacagagctacctgctacatgcggtggtgcccgggccttggcaggaggatgtggcagatgctgaagagtgtgctggtcgctgtgggcccttaatggactgctgggcgttccactacaatgtgagcagccatggttgccaactgctgccatggactcaacactcgccccactcaaggctgtggcattctgggcgctgtgacctcttccaggagaaagactacatacggacctgcatcatgaacaatggggttgggtaccggggcaccatggccacgaccgtgggtggcctgtcctgccaggcttggagccacaagttcccgaacgatcacaagtacatgcccacgctccggaatggcctggaagagaacttctgccgtaaccctgatggcgaccccggaggtccttggtgccacacaacagaccctgccgtgcgcttccagagctgcagcatcaaatcctgccgggtggccgcgtgtgtctggtgcaatggcgaggaataccgcggcgcggtagaccgcaccgagtcagggcgcgagtgccagcgctgggatcttcagcacccgcaccagcaccccttcgagccgggcaagttcctcgaccaaggtctggacgacaactattgccggaatcctgacggctccgagcggccatggtgctacactacggatccgcagatcgagcgagagttctgtgacctcccccgctgcgggtccgaggcacagccccgccaagaggccacaagtgtcagctgcttccgcgggaagggtgagggctaccggggcacagccaataccaccaccggcgtaccttgccagcgttgggacgcgcaaatcccacatcagcaccgatttacgccagaaaaatacgcgtgcaaagaccttcgggagaacttctgctggaacctcgacggctcagaggcgccctggtgcttcaccctgcggcccggcacgcgcgtgggcttttgctaccagatccggcgttgtacagacgacgtgcggccccaggactgctaccacggcgcgggggagcagtaccgcggcacggtcagcaagacccgcaagggtgtccagtgccagcgctggtccgctgagacgccgcacaagctgcagttcacatttacctccgaaccgcatgcacaactggaggagaacttctgccagccagatggggatagccatgggccctggtgctacacgatggacccaaggaccccattcgactactgtgccctgcgacgctgcgctgatgaccagccgccatcaatcctggacccccccaaccaggtgcagtttgagaagtgtggcaagagggtggatcggctggatcagcgtcgttccaagctgcgcgtggctgggggccatccgggcaactcaccctggacagtcagcttgcggaatcggcagggccagcatttctgcgcggggtctctagtaaaggagcagtggatactgactgcccggcagtgcttctcctcctgccatatgcctctcacgggctatgaggtatggttgggcaccctgttccagaacccacaacatggagagccaggcctacagcgggtcccagtagccaagatgctgtgtgggccctcaggctcccagcttgtcctgctcaagctggagagatctgtgaccctgaaccagcgtgtggccctgatctgcctgccgcctgaatggtatgtggtgcctccagggaccaagtgtgagattgcaggctggggtgagaccaaaggtacgggtaatgacacagtcctaaatgtggccttgctgaacgtcatctccaaccaggagtgtaacatcaagcaccgaggacatgtgcgggagagcgagatgtgcactgagggactgttggcccctgtgggggcctgtgagggtgactacgggggcccacttgcctgctttacccacaactgctgggtcctgaaaggaattagaatccccaaccgagtatgcacaaggtcgcgctggccagccgtcttcacgcgtgtctctgtgtttgtggactggattcacaaggtcatgagactgggttaggcccagccttgacgccatatgctttggggaggacaaaacttgtaagtacagtcaaggacaagacttgtactcaaggttgagatttaataaaattaatatttttactacttcaccaaggactttcttaaacgaaaatggtttttccccctgcaagtaaacagtaatgaagaagagaattattcctagtgcagtttgttttcatggtcttaatttttgctaagactccactgtttttgccttatcaatacaagtgccaacacagtgaaaaggcaaatatcatcttagtattactctgaaaatagttctgagctaatggcctactgaaaggaaaagagtggctcctgctattctattagacttattacaattatcttaagtattctttctaccctcctttaattgaatggaaacagggatggattggaagagctgtttttctcctttctttcccccggcaatatttaccatttaatgccacttactaacactcaaagaaacaaaaccaaacttctcaattgacagtgcagtgacccaacaaagacacgggttcttgaattcaaagtggagcaggagagacggtaaatacacatttactttaatatatatatatttattatttatgtgtttaaagcacaaattagtttggtaaaaaacatctcatgtctgttttatttccacatccctgagactgacaatgggatgcctatcaattaattcatttagagagccatacaccacaagaaacaaattatttgtcctctggagcttgtcacagggggatttttaaaaaaccattaaacagaaagacaactgtgcatcttagaaagataaaaggccaattcttcctctccggctgataggttcttaataatagtgatatctactaataaggtgttttacatagtgtaaagcatgttcacatacaaattacttagcctctttgagcctcagttttcttatatgtaaaactggattaatagtacattttgtgtttaaaaagataatgtatatgaagtgtttaccatttttgcttggcatctagttcagttctcagtaactgatgtggtggtggtggtggtcatagtagcagtaagatccgtagtaatagtagcagcagttgttttagaaattagtaactgaggcctggcaaagttaaaggctctttcattaacacccagaggggaagaaatgaagctggtcttcagaggcaggctattttcactctgtgtcccaaattttcccccctagaccgtttttatacttctggggcctcagaaaatattctcagctattctgttagcttgatctcctaccatctgagagtgggcttccttcaaacaaccaaatttccaggtatttctaaactgcccttcccctacaccattctttggttcagtatttcaagacccctaagagaaatggtacatttacatgtaagcacaggatagtgaagtatttacaacaagtgctttggagccagcaaatatgaatcagaatccagctttcctttcctacatacatgacattgggcagctaatttctaagattttacttctttatctatgaaagtggagtactagtacttgctctgtgcaactgtgatggttgttacatgaggtagcatctagaagcagcttgcacattgccagacacccagtggaaggtcaatgaatgactatttgaggactaactattacagaaatgtttactcttctgagtcctgatttctagtctcctggactaaataggttcactgttttcctcccggttcagtttccagacacatcacagaattataagaatattaaaaactcaggcttatacctacacaggattttctataaccctctttctgctttgagctcctaaaggtatttcatagaaaaatgaccttatttttaaatagagggggcagttgaaaatcagtgaacgggcctaccccctaatgatttttttctcagacctaattataataattagcattataaagtgctaattatctttggacacagaggacctgcacaccagagacagaggtccgcattaagtaaagtggatttcactttcttcagttgtgagatttctcttttttcttctttgtaatgatgcaaagatatatcttccaccaagcctcatttaaaagctttttccagttaaggaaactatctcttggccatccacagccagactgcatattgagattatggatattcaaagaaattgtctttcctttgtatattgtcataactttttgtgaaatgttcgttttatagttccaggccagcacctagaacctggctagaataaaaaactgcagaaatc

SEQ ID NO: 206954 - protein, 214 aa, Artificial Sequence
  derived and/or modified sequence
MTPQPSGAPTVQVTRETERSFPRASEDEVTCPTSAPPSPTRTRGNCAEAEEGGCRGAPRKLRARRGGRSRPKSELALSKQRRSRRKKANDRERNRMHNLNSALDALRGVLPTFPDDAKLTKIETLRFAHNYIWALTQTLRIADHSLYALEPPAPHCGELGSPGGSPGDWGSLYSPVSQAGSLSPAASLEERPGLLGATFSACLSPGSLAFSDFL

SEQ ID NO: 206955 - DNA, 1167 bp, Artificial Sequence
  derived and/or modified sequence
cctcggaccccattctctcttcttttctcctttggggctggggcaactcccaggcgggggcgcctgcagctcagctgaacttggcgaccagaagcccgctgagctccccacggccctcgctgctcatcgctctctattcttttgcgccggtagaaaggatgacgcctcaaccctcgggtgcgcccactgtccaagtgacccgtgagacggagcggtccttccccagagcctcggaagacgaagtgacctgccccacgtccgccccgcccagccccactcgcacacgggggaactgcgcagaggcggaagagggaggctgccgaggggccccgaggaagctccgggcacggcgcgggggacgcagccggcctaagagcgagttggcactgagcaagcagcgacggagtcggcgaaagaaggccaacgaccgcgagcgcaatcgaatgcacaacctcaactcggcactggacgccctgcgcggtgtcctgcccaccttcccagacgacgcgaagctcaccaagatcgagacgctgcgcttcgcccacaactacatctgggcgctgactcaaacgctgcgcatagcggaccacagcttgtacgcgctggagccgccggcgccgcactgcggggagctgggcagcccaggcggttcccccggggactgggggtccctctactccccagtctcccaggctggcagcctgagtcccgccgcgtcgctggaggagcgacccgggctgctgggggccaccttttccgcctgcttgagcccaggcagtctggctttctcagattttctgtgaaaggacctgtctgtcgctgggctgtgggtgctaagggtaagggagagggagggagccgggagccgtagagggtggccgacggcggcggccctcaaaagcacttgttccttctgcttctccctggctgacccctggccggcccaggcctccacgggggcggcaggctgggttcattccccggccctccgagccgcgccaacgcacgcaacccttgctgctgcccgcgcgaagtgggcattgcaaagtgcgctcattttaggcctcctctctgccaccaccccataatctcattcaaagaatactagaatggtagcactacccggccggagccgcccaccgtcttgggtcgccctaccctcactca

SEQ ID NO: 206956 - DNA, 477 bp, Artificial Sequence
  derived and/or modified sequence
atggatctggctagcgaaatcacctccgcaacccagacatcctcactctgctccagcggtcgtgggcacgccggatatcctgctcctggcatagtcgcccacggcttcgagacccatggaaccgccagggtggcccaaggccatctgctgcctccttgtctgctgcctccacctcaaatgcccgtgctggcagcactgcgagacctgagcaggcgcgggagcacctccagctcccggtccccttcgcggccagtgtcaacaagcgcgtccaaaccatgtcttccagcctcgtgtttgggtgagacctggtctatctcaataaatctggtggggagtagcggacacctacagtcccccggcgctcagagggacgcccagcgggagacaggctgcctgggtcccagttggctcccccatcaccaggggcgagacgaggagttgagcctatctcattccgctcagggtgaggagttttag

SEQ ID NO: 206957 - DNA, 645 bp, Artificial Sequence
  derived and/or modified sequence
atgacaccacagccaagtggcgcgccaaccgtccaagttacaagggaaaccgagcgatcattccctagggccagcgaagacgaggtcacatgtccgactagcgctcccccttcacccactcgcacgcggggcaattgtgcagaggcggaggaaggaggttgtcggggcgctccacgtaagctgagggctcgccgagggggccgaagcaggcctaagagtgagctcgcgctctccaagcagagaaggagtcgtaggaaaaaggctaatgaccgagaaagaaatcggatgcataacttaaactccgcattggacgcgctgagaggggtgttgcctacctttcccgacgacgccaaattgactaagatcgaaacactgaggtttgctcataattacatttgggcgcttacccagaccctgcgtattgcggaccactctctgtacgccctcgaaccacccgcaccccactgcggcgagctgggctcacccggcgggagccccggggattgggggtctctctactcaccggtgagtcaggccggctccctttctcccgccgcatccctcgaagagcgtcctggcctgttgggggctactttctccgcatgcttgtcgcctgggtccttggccttcagcgacttcctgtag

SEQ ID NO: 206958 - DNA, 645 bp, Artificial Sequence
  derived and/or modified sequence
atgaccccccagcccagcggggcccccaccgtgcaggtgacccgggagacagagaggagcttcccccgggcctctgaagatgaggtgacctgccccaccagcgccccacccagccccaccaggacccggggcaactgtgccgaggccgaggagggcggctgccgcggggcccccaggaagctgcgggcccggcggggcggccgcagccggcccaagtctgagctggccctgagcaagcagaggaggagcaggaggaagaaggccaatgaccgggagaggaacaggatgcacaacctgaacagcgccctggatgccctgcggggcgtgctgcccaccttcccagatgatgccaagctgaccaagattgagaccctgcgctttgcccacaactacatctgggccctgacccagaccctgagaattgctgaccacagcctgtatgccctggagcccccagccccccactgtggggagctgggcagccctgggggcagccctggggactggggcagcctgtacagccctgtgtcccaggccggcagcctgagccctgctgccagcctggaggagcggcccggcctgctgggcgccaccttcagcgcctgcctgagccctggcagcctggccttcagtgacttcctgtag

SEQ ID NO: 206959 - DNA, 645 bp, Artificial Sequence
  derived and/or modified sequence
atgaccccccagcccagcggcgcccccaccgtgcaggtgacccgggagaccgagaggtcttttccccgtgcctcagaagacgaagtcacctgccccacctctgctcctcctagcccaaccagaactcgtggtaactgcgctgaggcagaggagggcggctgcagaggagcacctaggaagctaagagccaggcgcggcggtcggtctcggcccaaatccgagctggctctcagcaagcagcgccgaagccgccggaaaaaagctaacgatcgcgagcgcaatcgcatgcataatctcaattccgcactggacgcgctcaggggagttctccccaccttccctgacgacgccaagctgactaaaatcgaaacgttgcgtttcgctcacaactatatctgggctctgacccagaccctccgtatcgctgaccacagcttatacgctctcgaaccaccagccccccattgcggtgagctggggtcccctggcggcagtcccggggattggggctcgttgtattcacctgtgtcccaggctgggtcactgtcgcccgcagcatccttagaagagcgacccgggcttttgggagctactttcagcgcttgtctgagccccgggtcactggcattcagcgactttctatag

SEQ ID NO: 206960 - DNA, 1376 bp, Artificial Sequence
  derived and/or modified sequence
gctctctattcttttgcgccggtagaaaggatgacgcctcaaccctcgggtgcgcccactgtccaagtgacccgtgagacggagcggtccttccccagagcctcggaagacgaagtgacctgccccacgtccgccccgcccagccccactcgcacacgggggaactgcgcagaggcggaagagggaggctgccgaggggccccgaggaagctccgggcacggcgcgggggacgcagccggcctaagagcgagttggcactgagcaagcagcgacggagtcggcgaaagaaggccaacgaccgcgagcgcaatcgaatgcacaacctcaactcggcactggacgccctgcgcggtgtcctgcccaccttcccagacgacgcgaagctcaccaagatcgagacgctgcgcttcgcccacaactacatctgggcgctgactcaaacgctgcgcatagcggaccacagcttgtacgcgctggagccgccggcgccgcactgcggggagctgggcagcccaggcggttcccccggggactgggggtccctctactccccagtctcccaggctggcagcctgagtcccgccgcgtcgctggaggagcgacccgggctgctgggggccaccttttccgcctgcttgagcccaggcagtctggctttctcagattttctgtgaaaggacctgtctgtcgctgggctgtgggtgctaagggtaagggagagggagggagccgggagccgtagagggtggccgacggcggcggccctcaaaagcacttgttccttctgcttctccctggctgacccctggccggcccaggcctccacgggggcggcaggctgggttcattccccggccctccgagccgcgccaacgcacgcaacccttgctgctgcccgcgcgaagtgggcattgcaaagtgcgctcattttaggcctcctctctgccaccaccccataatctcattcaaagaatactagaatggtagcactacccggccggagccgcccaccgtcttgggtcgccctaccctcactcaagtctgtctgcctctcagtctcttaccacccctcctccaatgtgattcaatccaatgtttggtctctcagcgcttactccccttgccttgctccaaagacgctgccgatctgctctactcccaatcaggtccgggatttcagggcgcctcactctgccttaaagccacgaaggcgaccctctgccttctcctcgtgcacttttcggagccattgccctcccggggcggaagaccaggctgtgaactgggaaagcgctagcccggccagggagcatctccccagcctccctgcgaactgcgcctgaaacgtgagctgcgctgcaggtgcctggagcac

SEQ ID NO: 206961 - DNA, 645 bp, Artificial Sequence
  derived and/or modified sequence
atgactccccagccaagtggagctccaaccgtgcaggttacacgggaaacagagaggtcttttcctagagcctctgaagatgaggtaacatgtccgacctcagctcctcccagcccaacgaggactaggggcaattgtgccgaagctgaagaaggcggttgcagaggcgcacccaggaagctgcgcgctagacgcggaggtaggtcacggcctaagagcgaactcgccctcagtaaacagcggagatcgcggagaaagaaggccaatgatagagagcgcaatcgtatgcacaatttgaattccgcattagacgcactgcgcggtgtgcttccaaccttcccagatgacgcaaagctgaccaaaatagagactctccgatttgcgcacaattatatatgggccctcacacagaccttacgaattgccgatcactccctttacgcattggaaccaccagcgcctcactgtggcgagctggggtcaccaggcggatctcctggggactgggggtctctgtactcacctgtaagtcaagccggatcactgagcccagcggcatcacttgaagaacggccaggccttctgggggcaactttttctgcttgcttgtctccagggtcattggctttctcagatttcctctag

SEQ ID NO: 206962 - DNA, 645 bp, Artificial Sequence
  derived and/or modified sequence
atgaccccccagcccagcggcgcccccaccgtgcaggtgaccagagagaccgagagaagcttccccagagccagcgaggacgaggtgacctgccccaccagcgccccccccagccccaccagaaccagaggcaactgcgccgaggccgaggagggcggctgcagaggcgcccccagaaagctgagagccagaagaggcggcagaagcagacccaagagcgagctggccctgagcaagcagagaagaagcagaagaaagaaggccaacgacagagagagaaacagaatgcacaacctgaacagcgccctggacgccctgagaggcgtgctgcccaccttccccgacgacgccaagctgaccaagatcgagaccctgagattcgcccacaactacatctgggccctgacccagaccctgagaatcgccgaccacagcctgtacgccctggagccccccgccccccactgcggcgagctgggcagccccggcggcagccccggcgactggggcagcctgtacagccccgtgagccaggccggcagcctgagccccgccgccagcctggaggagagacccggcctgctgggcgccaccttcagcgcctgcctgagccccggcagcctggccttcagcgacttcctgtag

SEQ ID NO: 206963 - protein, 189 aa, Artificial Sequence
  derived and/or modified sequence
MALPFALLMALVVLSCKSSCSLDCDLPQTHSLGHRRTMMLLAQMRRISLFSCLKDRHDFRFPQEEFDGNQFQKAEAISVLHEVIQQTFNLFSTKDSSVAWDERLLDKLYTELYQQLNDLEACVMQEVWVGGTPLMNEDSILAVRKYFQRITLYLTEKKYSPCAWEVVRAEIMRSFSSSRNLQERLRRKE

SEQ ID NO: 206964 - DNA, 570 bp, Artificial Sequence
  derived and/or modified sequence
atggccctgcccttcgccctgctgatggccctggtggtgctgagctgcaagagcagctgcagcctggactgcgacctgccccagacccacagcctgggccacagaagaaccatgatgctgctggcccagatgagaagaatcagcctgttcagctgcctgaaggacagacacgacttcagattcccccaggaggagttcgacggcaaccagttccagaaggccgaggccatcagcgtgctgcacgaggtgatccagcagaccttcaacctgttcagcaccaaggacagcagcgtggcctgggacgagagactgctggacaagctgtacaccgagctgtaccagcagctgaacgacctggaggcctgcgtgatgcaggaggtgtgggtgggcggcacccccctgatgaacgaggacagcatcctggccgtgagaaagtacttccagagaatcaccctgtacctgaccgagaagaagtacagcccctgcgcctgggaggtggtgagagccgagatcatgagaagcttcagcagcagcagaaacctgcaggagagactgagaagaaaggagtag

SEQ ID NO: 206965 - DNA, 570 bp, Artificial Sequence
  derived and/or modified sequence
atggcattacctttcgcattgctcatggcgttggtcgtgctgtcttgtaagtcatcctgcagcctggattgtgacctcccgcaaacccatagcctgggacatagaaggacaatgatgctgctcgcccagatgaggcgaatttcactattttcctgcctcaaggatagacatgactttagatttccacaggaggaattcgacgggaatcaatttcagaaagctgaagccatttcagtcctgcacgaagtgattcagcaaactttcaatctattctctacaaaggactcgtcagttgcttgggacgagagattgctggacaagctgtatactgagctgtaccagcagcttaacgacctggaggcttgtgtgatgcaggaggtctgggtgggagggacacccttaatgaacgaagactcaatccttgcagtcaggaagtatttccaacggattactctgtaccttaccgaaaagaagtactcgccatgtgcatgggaagtggtgagagccgagatcatgaggtcttttagcagctcccgaaacctgcaagagcgactgcggaggaaagagtag

SEQ ID NO: 206966 - DNA, 570 bp, Artificial Sequence
  derived and/or modified sequence
atggccctgccctttgccctgctgatggccctggtggtgctgagctgcaagagcagctgcagcctggactgtgacctgccccagacccacagcctgggccacaggaggaccatgatgctgctggcccagatgaggcgcatcagcctcttcagctgcctgaaggacagacatgacttccgcttcccccaggaggagtttgatggcaaccagttccagaaggccgaggccatctctgtgctgcatgaagtcatccagcagaccttcaacctcttcagcaccaaggacagctctgtggcctgggatgagcggctgctggacaagctgtacacagagctgtaccagcagctgaatgacctggaggcctgtgtgatgcaggaggtgtgggtgggcggcacccccctgatgaatgaagattccatcctggccgtgaggaagtacttccagaggatcaccctgtacctgacagagaagaagtacagcccctgtgcctgggaggtggtgcgggcagagatcatgaggagcttcagcagcagcaggaacctgcaggagcggctgcggaggaaggagtag

SEQ ID NO: 206967 - DNA, 570 bp, Artificial Sequence
  derived and/or modified sequence
atggccctgcccttcgccctgctgatggccctggtggtgctgagctgcaaaagctcctgcagtctggattgtgacctcccccagactcactcactaggtcacagacgtacaatgatgttgttggcacagatgcgtaggatcagcctgttcagctgcctgaaagatcgacatgattttagatttccccaggaggagtttgatggaaaccagtttcaaaaggccgaagctattagcgtcctgcacgaagttatccagcagacctttaatctgttctccaccaaggattcaagcgtggcctgggacgagagactactcgacaagctctacacagaactatatcagcaactgaacgatctggaagcatgcgttatgcaagaagtctgggtagggggtacacctctgatgaatgaggatagcatcctcgctgtgcggaaatatttccagcgcatcaccctttatttaaccgaaaaaaagtattcaccgtgtgcctgggaggttgtgagagctgagatcatgcgttccttttctagctcccggaatctccaggagcgactcaggcgcaaggagtag

SEQ ID NO: 206968 - DNA, 570 bp, Artificial Sequence
  derived and/or modified sequence
atggccctgcctttcgccctgcttatggccttggtggtcctctcttgtaaatctagctgtagtcttgattgcgatctgccccagacccattctctggggcaccgccgaacaatgatgctgttagcgcaaatgagaagaattagtttattctcttgtctcaaggatcgtcacgactttcgatttccgcaggaagaatttgacggtaatcagttccagaaagccgaagcaatctctgtgcttcacgaagtgatccagcagacctttaacctattttctaccaaggattcttctgtggcctgggacgagcggttactcgacaagttgtataccgagctataccagcagctgaacgacctggaagcctgcgtgatgcaggaagtgtgggtagggggaacgcccctgatgaatgaggattctatattggccgtcaggaagtactttcagcgcatcactctttacctaacagaaaagaagtactctccctgtgcgtgggaggtggtgcgggcagaaatcatgagaagcttcagcagcagcagaaacctccaggaaagacttcggaggaaagaatag

SEQ ID NO: 206969 - DNA, 1544 bp, Artificial Sequence
  derived and/or modified sequence
tgctcagagttaagttaaatgtcaaatttttaaaaatttaacttttagttaaattactttgccattcctaacagatcaagaaataataaaagtaaactttatgctttttcttttagtgtgcaaagtagacatacatacagtacataaggagatatacaatatatttgttattaaaatttaataaaaatttaatttcaattaagaaaaaaatttcttaaaagactctggaggcaggcaagagaagggagtgtcaataatgaccacatacacacacaaacacacacacaaaactggttgaaaaactactctatacccatgtagagagtaaataaatgaaagcaaaatcagacgtagaaagtaaattctgaaaatggaaactagtatgttccctatttaagacctacacataaagcaaggtcttcagagaacctagagctgaaggttcagagtcacccatctcaacaagtccaacagcatctgcaacatctacaatggctttgccttttgctttactgatggccctggtggtgctcagctgcaagtcaagctgctctctggactgtgatctgcctcagacccacagcctgggtcacaggaggaccatgatgctcctggcacaaatgaggagaatctctcttttctcctgtctgaaggacagacatgacttcagatttccccaggaggagtttgatggcaaccagttccagaaggctgaagccatctctgtcctccatgaggtgattcagcagaccttcaacctcttcagcacaaaggactcatctgttgcttgggatgagaggcttctagacaaactctatactgaactttaccagcagctgaatgacctggaagcctgtgtgatgcaggaggtgtgggtgggagggactcccctgatgaatgaggactccatcctggctgtgagaaaatacttccaaagaatcactctctacctgacagagaaaaagtacagcccttgtgcctgggaggttgtcagagcagaaatcatgagatccttctcttcatcaagaaacttgcaagaaaggttaaggaggaaggaataagacctgatccaacacagaaacgactcccattgacgactacaccagcttgcactttcatgatctgccattttaaagactcttgtttctgctataaccataccatgagttgaatcaaacgcgtcaagtattttcaagtgtgttaagcaacatcgtgttcagttgcacaggaactagtcccttacagatgactaagctgatggatctatttatctatttattaaatgtatatttatttgactataatatttaattttttgcccatataaaagcataaaatgtatacctttatattgttgataacataacaaaatatattttctatgtttagtcgatgtattattttgtttagtttattaaatatttactatagaaaacttcttggatttgtttattctctaaggagaaacaccaagccgattctccaacatgatttaaaaatgtatggttcaattcattgattcattgttattatactcaagttat

SEQ ID NO: 206970 - DNA, 570 bp, Artificial Sequence
  derived and/or modified sequence
atggccctcccattcgcactgctgatggccctggttgtcctatcctgtaagagcagctgcagccttgactgtgacctcccacagactcactccctaggccaccgaaggactatgatgctccttgcgcagatgaggcgaataagtctatttagctgcctcaaagatcgccacgatttcaggtttcctcaggaagagtttgatggaaatcagttccagaaagctgaggctatatccgtgctccacgaagttattcagcagacgtttaatttgtttagtaccaaggactcctccgttgcctgggacgaacgcctcctggataaactttatacggaattgtaccaacaactaaacgacctcgaagcgtgcgtgatgcaagaagtatgggtgggtggtactccgctcatgaacgaagattcaattttagcagttcgcaaatattttcagaggatcaccctgtacctaactgagaagaaatactccccttgcgcttgggaggtggtaagagccgaaataatgcgctcgttttccagttcgaggaacctccaggaaagactgaggcgaaaggagtag

SEQ ID NO: 206971 - DNA, 570 bp, Artificial Sequence
  derived and/or modified sequence
atggcactccccttcgccttgttgatggcattagtggttttgtcgtgtaaatcctcatgttctttagactgcgacctccctcagacccatagtctgggccacaggcggacaatgatgttgctcgcacagatgcgacgcatctctctattctcatgcctgaaggacagacacgatttccgattcccacaggaagaattcgatggcaatcagttccaaaaggcagaagctataagtgtccttcacgaagttatccagcagactttcaacttgttctcaactaaggattcctcagtagcatgggacgagcgactgttggataaattatatacagaactctatcaacagctgaacgatttggaggcgtgcgttatgcaggaagtctgggtggggggaacaccactcatgaacgaggactctatcctggccgtgcgcaaatacttccagcgtattacattgtacttaaccgaaaagaaatactcaccatgtgcctgggaggtggtcagagctgaaattatgcgatctttctctagctcccggaacttgcaggaacggcttaggcggaaggaatag

SEQ ID NO: 206972 - RNA, 570 nt, Artificial Sequence
  derived and/or modified sequence
auggcccucccauucgcacugcugauggcccugguuguccuauccuguaagagcagcugcagccuugacugugaccucccacagacucacucccuaggccaccgaaggacuaugaugcuccuugcgcagaugaggcgaauaagucuauuuagcugccucaaagaucgccacgauuucagguuuccucaggaagaguuugauggaaaucaguuccagaaagcugaggcuauauccgugcuccacgaaguuauucagcagacguuuaauuuguuuaguaccaaggacuccuccguugccugggacgaacgccuccuggauaaacuuuauacggaauuguaccaacaacuaaacgaccucgaagcgugcgugaugcaagaaguaugggugggugguacuccgcucaugaacgaagauucaauuuuagcaguucgcaaauauuuucagaggaucacccuguaccuaacugagaagaaauacuccccuugcgcuugggaggugguaagagccgaaauaaugcgcucguuuuccaguucgaggaaccuccaggaaagacugaggcgaaaggaguag

SEQ ID NO: 206973 - RNA, 570 nt, Artificial Sequence
  derived and/or modified sequence
auggcacuccccuucgccuuguugauggcauuagugguuuugucguguaaauccucauguucuuuagacugcgaccucccucagacccauagucugggccacaggcggacaaugauguugcucgcacagaugcgacgcaucucucuauucucaugccugaaggacagacacgauuuccgauucccacaggaagaauucgauggcaaucaguuccaaaaggcagaagcuauaaguguccuucacgaaguuauccagcagacuuucaacuuguucucaacuaaggauuccucaguagcaugggacgagcgacuguuggauaaauuauauacagaacucuaucaacagcugaacgauuuggaggcgugcguuaugcaggaagucuggguggggggaacaccacucaugaacgaggacucuauccuggccgugcgcaaauacuuccagcguauuacauuguacuuaaccgaaaagaaauacucaccaugugccugggagguggucagagcugaaauuaugcgaucuuucucuagcucccggaacuugcaggaacggcuuaggcggaaggaauag

SEQ ID NO: 206974 - DNA, 1149 bp, Artificial Sequence
  derived and/or modified sequence
atgggcgccttcctggacaagcccaagatggagaagcacaacgcccagggccagggcaacggcctgagatacggcctgagcagcatgcagggctggagagtggagatggaggacgcccacaccgccgtgatcggcctgcccagcggcctggagagctggagcttcttcgccgtgtacgacggccacgccggcagccaggtggccaagtactgctgcgagcacctgctggaccacatcaccaacaaccaggacttcaagggcagcgccggcgcccccagcgtggagaacgtgaagaacggcatcagaaccggcttcctggagatcgacgagcacatgagagtgatgagcgagaagaagcacggcgccgacagaagcggcagcaccgccgtgggcgtgctgatcagcccccagcacacctacttcatcaactgcggcgacagcagaggcctgctgtgcagaaacagaaaggtgcacttcttcacccaggaccacaagcccagcaaccccctggagaaggagagaatccagaacgccggcggcagcgtgatgatccagagagtgaacggcagcctggccgtgagcagagccctgggcgacttcgactacaagtgcgtgcacggcaagggccccaccgagcagctggtgagccccgagcccgaggtgcacgacatcgagagaagcgaggaggacgaccagttcatcatcctggcctgcgacggcatctgggacgtgatgggcaacgaggagctgtgcgacttcgtgagaagcagactggaggtgaccgacgacctggagaaggtgtgcaacgaggtggtggacacctgcctgtacaagggcagcagagacaacatgagcgtgatcctgatctgcttccccaacgcccccaaggtgagccccgaggccgtgaagaaggaggccgagctggacaagtacctggagtgcagagtggaggagatcatcaagaagcagggcgagggcgtgcccgacctggtgcacgtgatgagaaccctggccagcgagaacatccccagcctgccccccggcggcgagctggccagcaagagaaacgtgatcgaggccgtgtacaacagactgaacccctacaagaacgacgacaccgacagcaccagcaccgacgacatgtggtag

SEQ ID NO: 206975 - DNA, 1149 bp, Artificial Sequence
  derived and/or modified sequence
atgggcgccttcctggacaaaccaaagatggagaagcacaatgcgcagggccaggggaatggactgaggtatggtctcagctctatgcagggatggagggtggaaatggaggacgcccatacggccgttatagggctaccctcaggcttggagagctggtccttctttgccgtgtacgacggccacgccggaagtcaagtggcaaaatactgctgcgagcaccttcttgaccatattacaaacaatcaggacttcaaaggctctgctggcgctccaagcgtcgaaaacgttaagaatggaatacgcacaggtttcctcgagatcgatgagcatatgcgtgttatgtcagagaagaagcatggtgccgacagatccgggagcaccgccgtcggagtccttatatccccacaacacacatacttcattaattgtggcgacagtagaggcttgttatgcaggaaccgaaaagtgcattttttcactcaggaccacaagccttccaaccctctcgagaaggagagaattcagaacgctgggggctccgtgatgattcaacgtgtcaacggttcattggctgtgagccgggcgttgggagatttcgattacaagtgcgtccatgggaaaggccccactgaacagctggtatcacctgagccagaggtgcacgatattgagcgatcagaggaggacgaccagtttataatattagcatgtgatgggatctgggatgtcatgggcaacgaggagctgtgtgattttgtgcgctcacgcctcgaagtcacagatgacctagagaaggtgtgcaacgaagtagtagatacatgtctttataaagggagccgggacaacatgtctgtgattctgatctgttttccgaacgctcctaaggtctcgcccgaggcggtcaaaaaagaagcggagctcgacaaatacctcgaatgcagagtggaggaaatcatcaagaagcagggagagggagtgcctgaccttgtgcatgtaatgagaacactagcgagcgagaacattcccagtctgccgcctggcggcgaactggcatcaaaacggaacgtaatcgaggctgtatataaccgccttaacccatacaaaaatgatgatactgacagtacttctacggatgacatgtggtag

SEQ ID NO: 206976 - DNA, 1149 bp, Artificial Sequence
  derived and/or modified sequence
atgggggcctttctagacaaacccaagatggagaaacataacgctcagggacagggcaacgggctcagatatgggttatcctcaatgcagggctggagagtggaaatggaggacgcacatactgctgtgatcggtctgcctagcggtctggaaagctggagcttctttgcggtgtacgacggtcacgccggatcccaagtggccaagtattgttgtgaacacctgttggatcatattactaacaatcaggacttcaaaggttccgctggagctcccagtgttgagaatgtcaagaacggcatccggactggattcctggagatcgacgagcacatgcgcgtcatgagtgaaaagaagcatggagctgaccgctctggaagcacggcagtcggggtgctcatctcaccacagcacacctactttattaactgcggtgattcaaggggtttgttatgccgcaaccggaaggtgcacttttttacccaggaccacaagcctagtaaccctctcgagaaagagcgcatccagaatgccggtggaagtgttatgattcagcgagtgaatgggagccttgcggtttcacgggcactgggagattttgattacaaatgcgtacatggcaaaggccccactgagcagttggtgagccctgagcccgaggtccacgatattgagaggtctgaggaggacgatcagttcatcattctagcctgtgatggtatatgggatgtgatgggcaacgaagaactttgcgacttcgtccgctctcgacttgaagtgaccgacgatctggaaaaggtgtgcaacgaagtagtggatacctgcctttacaagggctcccgcgacaacatgtccgtgattctgatttgcttccccaacgcacctaaagtttcccctgaagccgtgaaaaaagaagcagaactcgacaagtacttagaatgccgggttgaggagatcatcaaaaagcaaggcgagggcgttccagatctggtgcacgttatgagaactttggcatctgagaacataccatccctcccaccagggggtgagctggcaagcaagcgcaacgtcatcgaagccgtctataataggcttaacccatataagaacgatgacacagatagcaccagcaccgacgatatgtggtag

SEQ ID NO: 206977 - DNA, 1149 bp, Artificial Sequence
  derived and/or modified sequence
atgggcgccttcctggacaagcccaagatggagaagcacaatgcccagggccagggcaatggcctgcgctatggcctgagctccatgcagggctggagggtggagatggaggatgcccacacagctgtgattggcctgcccagcggcctggagagctggagcttctttgctgtgtatgatggccatgctggcagccaggtggccaagtactgctgtgagcacctgctggaccacatcaccaacaaccaggacttcaagggcagcgctggggcccccagcgtggagaatgtgaagaatggcatcagaacaggcttcctggagattgatgagcacatgagggtgatgtctgagaagaagcacggggctgacagaagtggcagcacagctgtgggcgtgctgatcagcccccagcacacctacttcatcaactgtggggacagccggggcctgctgtgcaggaacaggaaggtgcacttcttcacccaggaccacaagcccagcaaccccctggagaaggagcgcatccagaatgctgggggctctgtgatgatccagagggtgaatggcagcctggccgtgtcccgggccctgggggactttgactacaagtgtgtgcacggcaagggccccacagagcagctggtgtccccagagcctgaggtgcatgacatcgagaggagtgaagaagatgaccagttcatcatcctggcctgtgatggcatctgggatgtgatgggaaatgaggagctgtgtgactttgtgcgcagccggctggaggtgacagatgacctggagaaggtgtgcaatgaggtggtggacacctgcctgtacaagggcagccgggacaacatgtctgtcatcctgatctgcttccccaatgcccccaaggtgtccccagaggccgtgaagaaggaggccgagctggacaagtacctggagtgccgggtggaggagatcatcaagaagcagggcgagggcgtgcctgacctggtgcacgtgatgaggaccctggccagcgagaacatccccagcctgcccccaggaggagagctggccagcaagagaaatgtcatcgaggccgtgtacaaccggctgaacccctacaagaatgatgacacagacagcaccagcacagatgacatgtggtag

SEQ ID NO: 206978 - DNA, 1149 bp, Artificial Sequence
  derived and/or modified sequence
atgggcgccttcctggacaagcccaagatggagaagcacaacgcccaaggccagggaaacgggttgcggtacggactcagcagcatgcagggctggcgggtcgagatggaggatgcccacaccgccgtgatcggcctgccctcagggcttgagtcctggtccttttttgccgtttatgacggccatgccggaagccaggttgcaaagtattgctgcgagcacctgctcgaccacatcaccaataaccaagattttaagggaagcgcaggggcccccagcgtggagaatgtcaaaaacggtatacgcacagggtttctggagattgatgaacatatgagagtgatgtccgaaaaaaaacacggggcagacaggagcggctctacagctgtgggggtcctcatttctccgcagcatacttatttcattaactgtggagatagcagggggctgctctgccgaaataggaaagtgcacttcttcactcaagaccataaaccgagcaatcctctagaaaaggaacggatacaaaatgctggggggagtgtgatgatccagagggttaatggtagtctggccgtcagtcgggccctgggggattttgactacaagtgcgtccatggaaagggccccacagagcaactcgtgagtccagagcctgaagtgcacgacatagagcgatcagaggaagatgatcagtttataattctggcatgcgatggaatttgggatgtgatggggaacgaagagttgtgcgattttgtacgcagtagactggaagtcaccgatgacctggaaaaggtgtgtaatgaggtggtcgacacatgcctgtataagggttcacgtgacaacatgtctgtaatcctgatctgctttcctaacgcacctaaggtttcccccgaggcagtcaagaaggaagccgaactcgataagtacctggagtgtagagtggaagagataattaaaaaacagggcgaaggggtgcccgacctggtgcacgttatgcgaacacttgcctctgagaatattccttcattgcccccaggcggagagctggcgtccaaacgaaatgtgatcgaagcagtatacaatagactcaacccctacaaaaatgatgatacagatagtaccagcaccgacgacatgtggtag

SEQ ID NO: 206979 - DNA, 1149 bp, Artificial Sequence
  derived and/or modified sequence
atgggcgccttcctggacaagcccaagatggagaagcacaacgcccaaggccagggcaacggactgcgttacggtcttagtagcatgcaaggatggagggtcgagatggaggacgcacatacagccgttatagggcttccaagcgggctcgagagctggagcttttttgccgtgtacgatgggcacgccggctctcaagtggcaaaatactgctgcgaacacctgcttgatcacatcactaataaccaggattttaaaggctcagctggcgcaccctctgttgagaacgtcaagaacgggatcaggaccggcttcttagaaatcgatgaacatatgcgggtcatgtcagagaagaaacatggagctgaccgatctggatccacagcagtcggcgttctgatctcaccccagcatacatacttcattaattgcggggactcccgcggtctgctctgccgtaatcgaaaagtgcatttcttcacacaggaccataaaccttccaatccactggaaaaggagaggatccagaacgcaggaggttcagttatgatacagcgggtcaacggatccctcgccgtgagtagagccctcggtgacttcgactacaaatgcgtgcacggtaagggacccacggagcagttagtgtcccctgagcctgaagtccatgatatagagaggtcggaagaggatgatcagtttatcattttggcatgtgatggaatatgggatgttatgggcaacgaggaactgtgcgacttcgtccgcagcagactagaagtcactgatgatttagagaaagtttgtaatgaagtcgttgatacttgcttatacaaaggatcaagggataatatgtcagttattttgatctgcttccccaacgctcctaaagtctcccctgaagccgtgaagaaggaggctgaactggataaatatctagagtgcagggtggaagagataataaaaaagcagggcgaaggagtgccagatctagttcatgtcatgcgaaccttggcgagcgagaatatcccttcactgccaccggggggggaacttgcctctaagagaaatgtgatcgaggccgtttacaaccgcctgaacccctacaaaaatgacgacaccgactcaacatctacagacgacatgtggtag

SEQ ID NO: 206980 - DNA, 1149 bp, Artificial Sequence
  derived and/or modified sequence
atgggagcattccttgacaaacccaagatggaaaagcataatgctcaggggcaggggaacgggctgcgatacgggctatctagtatgcaaggctggcgcgtcgaaatggaggatgcccacaccgccgtcatcggactcccctctggactggaatcctggagcttcttcgccgtgtacgatggccatgcaggctctcaggtcgccaagtactgctgcgaacacttgcttgaccatatcaccaacaatcaggattttaaagggtctgctggcgcaccgagcgtggagaatgtgaagaacggcattaggaccggttttttggagattgacgaacacatgcgtgtcatgtctgagaaaaaacacggcgctgaccggtctggtagcacggccgtgggggtgctgattagccctcaacacacctattttattaactgtggagactcacgaggcctgctgtgtcggaatcggaaggtgcattttttcacccaggaccataagccaagtaatcccttagaaaaagagcgcatccagaacgcaggaggtagcgtcatgattcagagagtgaacggatcactagcagtgagtagggctctgggtgactttgactataaatgcgtgcacggtaaaggccctaccgaacaattggtctcccctgagcccgaggtgcacgacatagagaggagtgaggaagatgaccagttcattatcctggcgtgcgatggcatctgggatgttatgggtaacgaggagctgtgtgacttcgtgagatcaagactggaggtcactgacgacctcgaaaaggtgtgtaacgaagtggttgacacctgtttgtacaagggtagcagagataacatgtcagtgattcttatctgctttccgaatgcgccaaaggtgagcccagaggctgtgaaaaaagaggctgaactggataagtacctagagtgccgcgtggaagaaatcatcaaaaagcaaggtgaaggggtccccgacctcgtccatgtcatgcgcacactagccagtgagaacatcccatctctgccgccaggaggagagctcgcctccaagcggaatgtgattgaggccgtgtataatcgtttaaacccctataaaaacgatgacactgacagcacctcaactgatgacatgtggtag

SEQ ID NO: 206981 - DNA, 1149 bp, Artificial Sequence
  derived and/or modified sequence
atgggggcattcctcgataaacctaaaatggagaaacataatgcccaaggccagggtaatgggctgagatatggacttagttcaatgcaaggctggagagtcgaaatggaagacgcccacactgctgtgattgggctgccatcagggcttgaaagctggagcttttttgcagtttatgacggtcacgcaggatctcaggtggcaaagtattgctgtgagcatctgcttgatcacattactaacaatcaggacttcaagggcagcgccggagcacctagcgttgagaatgttaagaatggcatcaggacagggttcctggagatagatgagcatatgcgggtgatgtcagagaaaaagcacggcgctgacaggagcggtagcactgccgttggggtccttatttccccacagcacacctatttcattaattgcggtgactctcggggacttctgtgcagaaacagaaaagtacacttctttacgcaggaccacaaacctagcaatcctctcgagaaggaacgcattcaaaatgcaggcggaagtgtgatgatccagagagtgaatggatcactggccgtatcccgcgcattaggggactttgattacaaatgtgtgcatgggaagggtcccacagagcagcttgtctcccctgaacctgaggtgcacgacatagaaaggagcgaagaagatgaccagttcatcatcctggcttgcgatgggatttgggacgttatggggaacgaggagctttgcgactttgtgaggagccggctggaagtgacggacgatctggagaaagtctgtaatgaagtcgtggatacctgcctgtacaaagggtcaagggataacatgagcgtaatccttatctgtttccccaacgcgcctaaagtctctccagaggcagtgaaaaaggaggccgagctggacaagtacctagagtgcagggttgaggaaataattaaaaagcaaggggaaggggtgcccgacctagtgcacgtcatgcggactctggcctcggaaaatatcccttcactgcctcctggcggagaactcgccagcaaaaggaatgtgatagaggcggtctataaccgtctgaatccttacaagaacgatgatactgatagcacctctactgacgacatgtggtag

SEQ ID NO: 206982 - protein, 257 aa, Artificial Sequence
  derived and/or modified sequence
MARLLGLCAWARKSVRMASSRMTRRDPLTNKVALVTASTDGIGFAIARRLAQDRAHVVVSSRKQQNVDQAVATLQGEGLSVTGTVCHVGKAEDRERLVAMAVKLHGGIDILVSNAAVNPFFGSLMDVTEEVWDKTLDINVKAPALMTKAVVPEMEKRGGGSVVIVSSIAAFSPSPGFSPYNVSKTALLGLNNTLAIELAPRNIRVNCLHLDLSRLASAGWLGEPEDCAGIVSFLCSEDASYITGETVVVGGGTPSRL

SEQ ID NO: 206983 - protein, 278 aa, Artificial Sequence
  derived and/or modified sequence
MHKAGLLGLCARAWNSVRMASSGMTRRDPLANKVALVTASTDGIGFAIARRLAQDGAHVVVSSRKQQNVDQAVATLQGEGLSVTGTVCHVGKAEDRERLVATAVKLHGGIDILVSNAAVNPFFGSIMDVTEEVWDKTLDINVKAPALMTKAVVPEMEKRGGGSVVIVSSIAAFSPSPGFSPYNVSKTALLGLTKTLAIELAPRNIRVNCLAPGLIKTSFSRMLWMDKEKEESMKETLRIRRLGEPEDCAGIVSFLCSEDASYITGETVVVGGGTPSRL

SEQ ID NO: 206984 - DNA, 837 bp, Artificial Sequence
  derived and/or modified sequence
atgcataaagccggtctgctaggcctgtgtgctcgcgcttggaactccgttaggatggcttcatccggaatgactagaagggatcctcttgccaacaaggtggcactggttacagcttcaacagatggtatcggcttcgctatcgctcggaggctggcccaggatggagcacatgttgtggttagttccaggaaacagcaaaatgtagatcaagccgtcgcaaccctccagggagaaggtctctctgtgactggcactgtttgtcatgtggggaaagcagaggatagagagagactggtcgccacagccgttaaactgcatggggggattgatatcctggtgtctaatgcggcagtcaaccctttttttggtagcattatggacgtgactgaagaggtttgggataaaactctggatattaatgtgaaagctcctgccctcatgactaaggccgtggtgcccgaaatggaaaaaaggggtggaggttccgtcgtaattgtgagcagtattgcggcttttagtccatctcccggattttctccatacaatgtgagtaagaccgcgctgctgggcctgaccaagactctcgccattgaactggccccaagaaacatccgggtcaactgtctcgcccccggcctaattaagacaagtttctcacggatgctgtggatggacaaggagaaggaagagagcatgaaggagactctcagaatccgacggctgggtgaaccagaagactgcgccgggattgtgtcctttctgtgttcagaggacgcctcctacatcaccggggagacagttgttgtcggcggcggcactcctagccggctgtag

SEQ ID NO: 206985 - DNA, 837 bp, Artificial Sequence
  derived and/or modified sequence
atgcacaaggccggcctgctgggcctgtgtgcccgggcctggaacagcgtgaggatggccagcagcggcatgacccggcgggaccccctggccaacaaggtggccctggtgacagccagcacagatggcatcggctttgccatcgcccggcggctggcccaggatggagcccacgtggtggtgagcagcaggaagcagcagaatgtggaccaggccgtggccaccctgcagggcgagggcctgtctgtgacaggcaccgtgtgccacgtgggcaaggccgaggaccgggagcggctggtggccacagctgtgaagctgcatggaggcatcgacatcctggtgtccaatgctgctgtgaaccccttcttcggcagcatcatggatgtgacagaggaggtgtgggacaagaccctggacatcaacgtgaaggccccagccctgatgaccaaggctgtggtgcctgagatggagaagaggggcggcggctctgtggtgattgtgagcagcattgctgccttcagccccagccctggcttcagcccctacaacgtgtccaagacagccctgctgggcctgaccaagaccctggccatcgagctggcccccaggaacatccgggtgaactgcctggcccctggcctcatcaagaccagcttcagcaggatgctgtggatggacaaggagaaggaggagagcatgaaggagaccctgcgcatccggcggctgggggagcctgaggactgtgccggcatcgtgtccttcctgtgcagtgaagatgccagctacatcaccggggagaccgtggtggtgggcggcggcacccccagccggctgtag

SEQ ID NO: 206986 - DNA, 837 bp, Artificial Sequence
  derived and/or modified sequence
atgcacaaggccggcctgctgggcctgtgcgcccgggcctggaactctgtgcgcatggcctccagcggcatgactagacgcgaccctctggcaaataaggtcgcgctcgtcacagccagcaccgacggcattggttttgcgatcgctagacgcctggcccaggatggcgctcacgttgtggtctcttcacgcaaacaacaaaatgtggaccaagcagtggcaactctgcaaggagaaggacttagtgtgactgggacggtctgtcacgtgggaaaggctgaggatcgcgagaggctggtggccactgctgttaagctccacggagggattgatatactggtatcaaacgccgccgttaaccctttttttggctctataatggacgtgaccgaagaggtgtgggacaaaactttagatataaatgtcaaggccccagctctcatgaccaaagctgtggttcctgaaatggaaaagcgcggcggcggaagcgtggtgatagtgagttcaatagcagcctttagcccctcccccggattcagcccatataatgtttcaaagaccgcccttttaggtttgacaaagaccttggccattgaactagccccgcgaaacatccgggtcaactgtctagcacccggtctcatcaaaacatcattctcgaggatgctttggatggataaggagaaagaggagagcatgaaggagaccctgcgcattagacgcttgggagagccagaggattgtgccggcatcgtctcattcctgtgttccgaagacgcctcttacattacgggagaaaccgtagttgttggaggtggtacgcctagtagactatag

SEQ ID NO: 206987 - DNA, 837 bp, Artificial Sequence
  derived and/or modified sequence
atgcacaaggccggtctactgggcctgtgcgccagagcttggaacagcgttcgcatggcgagcagcggaatgacccggcgtgatcccctggcaaacaaggtagcacttgttacggcatccaccgacgggataggctttgctattgcccgaaggctggcccaggacggggctcatgtggtggtgagcagccgcaagcaacagaacgtggatcaggcagtggccacccttcaaggggagggcctgtccgtcactgggacagtgtgtcatgtgggcaaggctgaagacagggagcgactggtggccactgctgtcaaactccacggaggaattgacatactggtgagcaacgctgcagttaaccctttcttcggttccatcatggacgtgaccgaagaggtctgggacaaaactctagatataaatgtgaaggctccagcactcatgactaaggccgtggttcctgagatggagaaaagaggcggtggctcggtagtaatcgtgagtagcattgccgcttttagtcctagtcccggtttcagtccatataacgtatctaaaacagctctgctcggacttacgaagactcttgcgatcgagctcgcaccgcgaaatattagggtgaattgccttgcacccggactgattaaaacatctttctctcggatgctctggatggacaaagaaaaggaggagagcatgaaggaaacccttcggataaggcggctgggggagcctgaggactgtgcagggatcgtcagtttcctgtgcagcgaggacgcctcatatatcacaggagagacagttgtcgtcggagggggtacaccctccaggctgtag

SEQ ID NO: 206988 - DNA, 837 bp, Artificial Sequence
  derived and/or modified sequence
atgcacaaggccggcctgctgggcctgtgcgccagagcctggaacagcgtgagaatggccagcagcggcatgaccagaagagaccccctggccaacaaggtggccctggtgaccgccagcaccgacggcatcggcttcgccatcgccagaagactggcccaggacggcgcccacgtggtggtgagcagcagaaagcagcagaacgtggaccaggccgtggccaccctgcagggcgagggcctgagcgtgaccggcaccgtgtgccacgtgggcaaggccgaggacagagagagactggtggccaccgccgtgaagctgcacggcggcatcgacatcctggtgagcaacgccgccgtgaaccccttcttcggcagcatcatggacgtgaccgaggaggtgtgggacaagaccctggacatcaacgtgaaggcccccgccctgatgaccaaggccgtggtgcccgagatggagaagagaggcggcggcagcgtggtgatcgtgagcagcatcgccgccttcagccccagccccggcttcagcccctacaacgtgagcaagaccgccctgctgggcctgaccaagaccctggccatcgagctggcccccagaaacatcagagtgaactgcctggcccccggcctgatcaagaccagcttcagcagaatgctgtggatggacaaggagaaggaggagagcatgaaggagaccctgagaatcagaagactgggcgagcccgaggactgcgccggcatcgtgagcttcctgtgcagcgaggacgccagctacatcaccggcgagaccgtggtggtgggcggcggcacccccagcagactgtag

SEQ ID NO: 206989 - DNA, 1443 bp, Artificial Sequence
  derived and/or modified sequence
aaaggcaagccccagtcaggcggaaggtagatggtggaggggcgccgcggcggatggaggtgcccagggccacagaccgctcacagcggtaccggggcggggagcagggcgggcagggaatcggcccgcccttcgtcctgcccctcgccctactctgtcaccgcccctgggaagagtggaacccatacttgctggtctgatccatgcacaaggcggggctgctaggcctctgtgcccgggcttggaattcggtgcggatggccagctccgggatgacccgccgggacccgctcgcaaataaggtggccctggtaacggcctccaccgacgggatcggcttcgccatcgcccggcgtttggcccaggacggggcccatgtggtcgtcagcagccggaagcagcagaatgtggaccaggcggtggccacgctgcagggggaggggctgagcgtgacgggcaccgtgtgccatgtggggaaggcggaggaccgggagcggctggtggccacggctgtgaagcttcatggaggtatcgatatcctagtctccaatgctgctgtcaaccctttctttggaagcataatggatgtcactgaggaggtgtgggacaagactctggacattaatgtgaaggccccagccctgatgacaaaggcagtggtgccagaaatggagaaacgaggaggcggctcagtggtgatcgtgtcttccatagcagccttcagtccatctcctggcttcagtccttacaatgtcagtaaaacagccttgctgggcctgaccaagaccctggccatagagctggccccaaggaacattagggtgaactgcctagcacctggacttatcaagactagcttcagcaggatgctctggatggacaaggaaaaagaggaaagcatgaaagaaaccctgcggataagaaggttaggcgagccagaggattgtgctggcatcgtgtctttcctgtgctctgaagatgccagctacatcactggggaaacagtggtggtgggtggaggaaccccgtcccgcctctgaggaccgggagacagcccacaggccagagttgggctctagctcctggtgctgttcccgcattcacccactggcctttcccacctctgctcaccttactgttcacctcatcaaatcagttctgccctgtgaaaagatccagccttccctgccgtcaaggtggcgtcttactcgggatttctgctgttgttgtggccttgggtaaaggcctcccctgagaacacaggacaggcctgctgacaaggctgagtctaccttggcaaagaccaagatattttttcccgggccactggggaatctgaggggtgatgggagagaaggaacctggagtggaaggagcagagttgcaaattaacaacttgcaaatgaggtgcaaataaaatgcagatgattgcgcggctttgaa

SEQ ID NO: 206990 - protein, 414 aa, Artificial Sequence
  derived and/or modified sequence
MAMVVSTWRDPQDEVPGSQGSQASQAPPVPGPPPGAPHTPQTPGQGGPASTPAQTAAGGQGGPGGPGSDKQQQQQHIECVVCGDKSSGKHYGQFTCEGCKSFFKRSVRRNLSYTCRANRNCPIDQHHRNQCQYCRLKKCLKVGMRREAVQRGRMPPTQPTHGQFALTNGDPLNCHSYLSGYISLLLRAEPYPTSRFGSQCMQPNNIMGIENICELAARMLFSAVEWARNIPFFPDLQITDQVALLRLTWSELFVLNAAQCSMPLHVAPLLAAAGLHASPMSADRVVAFMDHIRIFQEQVEKLKALHVDSAEYSCLKAIVLFTSDACGLSDVAHVESLQEKSQCALEEYVRSQYPNQPTRFGKLLLRLPSLRTVSSSVIEQLFFVRLVGKTPIETLIRDMLLSGSSFNWPYMAIQ

SEQ ID NO: 206991 - DNA, 5110 bp, Artificial Sequence
  derived and/or modified sequence
gccgtactgccttttttcccctctttcattctttctctccgtctttttctcccccctctgcgcacgaaggatgtgcttctaggtggtgatctgccctcctctctctcttttatcatttctcccccgccgccggcgagttgactctttccctatgtgtgtgaggcggcggcggcagcagcagcagcagcggctccggcggcggcagcagcggcagcagcgacttcagcggcggcggcggcgctagacgcagcggctccgggcccgacccggcggcttcggcggcggctccggcggcagcggcggcccgggcggcccgcagggaacggcgagcggcctccacccagcgactgcgggcggcggcggccggagagagcgaggcgcgcgccggacgcccggggcaggcggcggcggcggcggcccagcgccaggacgacgccgcgcagcgcccgacgcggaccactttcatgctgattcccccggacccgggcagcgctccggccactccgcgggccgccggcctccgccccggcctgcctggctccctgggcgcgcccgcacccggcgcctccgatctcctagtcctcctgatttcgatggctttcctgaatggctgactgtgggctgccctggacttggcccccggacagtcgcctctcctcctcctctacctcctccttcaccaccacctcctcttcctcctcctcctcctcctcctcctccgccaactcctcggctgcacaccagctctaagagcgagagtgaacgagagagggagggagagagtgagagcgagcgagatctttggagagatttttttttttgcctcctacttctgtcttgaagccagacaatcgacttcagctctccctcccctccctctttctccacgttctgctcccactcgctctcctgtccccttcccctcccctcccggcggaaagccccccgaaaccaacaaagctgagccgagagaaacaaacaaaacaaacacaccgggccagacaagccatcgacaaaactttgcaaaagcaaaaacaaaaaaggaaaaactaaccaacctcaaccaaccagcccccgagccacccggggcgccctcccgcgccctcttgcaccctcgcacacacaaaaggcggcgcgccggagcccgagacccggggagccgccgccgccccgccgccgcccgcagccaggggagcaggaagtccggacgcagcccccatagatatggcaatggtagtcagcacgtggcgcgacccccaggacgaggtgcccggctcacagggcagccaggcctcgcaggcgccgcccgtgcccggcccgccgcccggcgccccgcacacgccacagacgcccggccaagggggcccagccagcacgccagcccagacggcggccggtggccagggcggccctggcggcccgggtagcgacaagcagcagcagcagcaacacatcgagtgcgtggtgtgcggagacaagtcgagcggcaagcactacggccagttcacgtgcgagggctgcaagagcttcttcaagcgcagcgtgcggaggaacctgagctacacgtgccgcgccaaccggaactgtcccatcgaccagcaccatcgcaaccagtgccagtactgccgcctcaaaaagtgcctcaaagtgggcatgagacgggaagcggtgcagaggggcaggatgccgccgacccagccgacccacgggcagttcgcgctgaccaacggggatcccctcaactgccactcgtacctgtccggatatatttccctgctgttgcgcgcggagccctatcccacgtcgcgcttcggcagccaatgcatgcagcccaacaacatcatgggtatcgagaacatttgcgaactggccgcgaggatgctcttcagcgccgtcgagtgggcccggaacatccccttcttccccgacctgcagatcacggaccaggtggccctgcttcgcctcacctggagcgagctgtttgtgttgaatgcggcgcagtgctccatgcccctccacgtcgccccgctcctggccgccgccggcctgcatgcttcgcccatgtccgccgaccgggtggtcgcctttatggaccacatacggatcttccaagagcaagtggagaagctcaaggcgctgcacgttgactcagccgagtacagctgcctcaaggccatagtcctgttcacctcagatgcctgtggtctctctgatgtagcccatgtggaaagcttgcaggaaaagtctcagtgtgctttggaagaatacgttaggagccagtaccccaaccagccgacgagattcggaaagcttttgcttcgcctcccttccctccgcaccgtctcctcctcagtcatagagcaattgtttttcgtccgtttggtaggtaaaacccccatcgaaaccctcatccgggatatgttactgtccggcagcagttttaactggccgtatatggcaattcaataaataaataaaataagaagggggagtgaaacagagaaagaaaaggcaaaagactggtttgtttgcttaatttccttctgttaagaaaggatataaaaggatgttacaagtttgctaaaagaagagaggggaagaatttaatggactgtgaatttcaaaaaaaaaaaaaaagactgtcaaatgaacttttacagaatgcattaaaaaaaaaaaaaaactcctgtgtcggtcagaacaacttgctacttatcatttttgtataaaaaggaaattagtctttttctttttttggtaaatttttgaaaaatattgctaaaagtgcatttaaggagattgggagacaattagcagaatggagaaagtaagtcttttttttttccaaattattaattgtcctgtgtctatgtacctctagctgttcttttttgtacttttctggttccaaaccagtttattctgtggttctataataagttttgatataatcttggcttcttaaaaactgtgtatcattaaaatatatgttctgcaagaattaaaactgagtccatgaaaataccataggaagacataaaactttaaaaggcaactcaaagatgatggaaacgcacttacaagtggtgaccaaaatttttaggtgaagtcgagcactctaattagagaactggaggaaccacatataacacttaacttcccctaccctgcccctccccaaaagaaaccatgacaaacctagcttttaaaaaatattttaagaaagagaatgaactgtggaatttattggcagccaaggaatgtgtccaagacacatgctgaggttttgaataaaaagtgaacttttgtaatttgaattgggtcccgcttagttcttgaattgttatgaaaatcctatatctgtttgtatatttgcaaaccctttgtattataattgttgatattttccctttttaaaaaataccattgaaatcagcatgacaaaaataacactgttggcacttataggtaacgtgattgattcagtatcttagagtttacagtttgtgttttaaaaaaactgaaggttttttttttaagtgcaacatttctgtatactgtaaaagttataataactgaactgtttggtcgagtctttgtgtgttatattccaaggaaaattgaaagtattcagaaattaaaatattatttgatatctgaaacctggctgtccccactcactgtctttacatctagaagagcccctgtgagctctcgcttagctggccgggcggggggtggtgggggggggcatttgtttactcccctcagtcagtttgttcaaaggtggactactgtatttgcctgtttaatttgggtgtgtgtgtgttggggggggagctgaagttaatggtttatctatggtttaggaagtgccatactgatatagtaaaccacccccattcacctaatcctccttttaattaaaaatggattttccaggaaaaaaaaaaaggcccttatatttgtcacacttaagtgcctgcttagggaaggtattgtgaaaaagtattagaaatcttgagatcagtatctattttatgatcagaaaaaaatactcttttgtacatttctgacagttactcagaagatcgttcaagcaagctaatcacagcattgtaactagaggacagttgtttgcagtgagtttttccttaagtaggtacgattttttaaaatattctgtgattctactctagcgtggttgttgagagagtttcaaattcagtgatacaggttctaagactgaaaggtctacttttaatgtatatatgataacttgcagttggtttccctctcccctccccccctttaccttcagtctgtgagagcatgaccacagggtcaagggaatcttttccattggagttatgtacataaaaacacatcgacattttgacatttcagattgtgtggctacaatctgtactgctcttgggatcctttgtccttagaagccaaattaaggaagagaaagcaggacagagaaaaagaaagaaggaaggagggaaactttacagggtgtgctgatttggaagtagtaactatttcttttggagtctttttttcatttttcctctttctcttttcctggtttggaggaagctcggtgctgggagcttgcaattttgttcttattcaaggtttccaacccacccccccaccgccagtacttcatcatgttgtggtttaattctaattggtgggggggggggaggactagtgagggaggtgaaagaacagggataattttgtaaagtgtattaaacgttaatattcagatccagtcaatacatgcagaccagtaaaatctgatttgtgcagagttctccatctgactctcacttatttctgtagatatatacatatataaatacaagtatgttcttacggcacagtattgctgacctttagttcgaggttttgtcggttgttgttgattttcttcctcttgcaagtgctatccatgtgagtgtgtgaagtttctctaataagtaaaacacaggcccttttccttgtttgttttgtgttagtttattgtaaacagccatttgttgtaaattattattggcattaaattataatttatgattttcaaagcaaaagacaa

SEQ ID NO: 206992 - DNA, 1245 bp, Artificial Sequence
  derived and/or modified sequence
atggcaatggtggtgtctacctggcgggacccccaggatgaggtcccagggtcgcaggggagtcaagccagccaggcccccccagtcccgggtccgccacctggagcacctcacaccccgcagacccccggccaaggaggcccagcctctacgcctgcgcagaccgcagccggcggtcaagggggacccgggggccctggcagcgacaaacagcagcagcagcaacacatagaatgtgtggtttgcggggacaaaagtagcggtaagcattacggacagtttacatgcgaaggttgtaaatcctttttcaagcgtagtgtccggaggaatctgtcgtacacgtgtagagcaaacagaaattgccccatcgaccaacaccaccgcaaccagtgccaatactgcagactcaagaagtgtcttaaagttggtatgcgaagagaagcagtgcagagaggccgcatgccaccgacccaaccaacccatggccagttcgcactgaccaatggcgatcccctgaattgtcattcatacctgagtggatatatctccctgctgctgcgcgctgagccctaccctacttcacgctttggctcccagtgcatgcagcctaacaacatcatggggattgagaatatatgcgaactggccgctcgcatgctgttcagtgcagtggaatgggcccggaacatccccttctttcctgatctgcaaattactgaccaggtagcactgttgcgactgacatggagtgaactgtttgtgctgaatgcagcacagtgctcaatgccgctgcacgttgctcctctactggcagctgcaggactgcacgcatcgccaatgtcagccgatagggtggtggcttttatggaccatattagaattttccaggaacaagtggaaaagctcaaagcgctccacgtggactcagctgagtactcttgcctcaaggccattgttctttttacctctgacgcgtgtgggctgagcgacgtggcgcatgtggagtcccttcaggaaaagtctcagtgtgccctcgaggagtacgtgcgaagtcagtacccaaaccagccaactcggtttgggaagctgctgctgagactgccctctctgcgcacggtctcgtcatccgtcattgaacagctctttttcgtcagactagtgggcaagacaccaatagaaactttaattagggatatgttgttatcgggatcttctttcaactggccatacatggctatccagtag

SEQ ID NO: 206993 - DNA, 1245 bp, Artificial Sequence
  derived and/or modified sequence
atggccatggtggtgtccacctggagggacccccaggatgaggtgcccggcagccagggcagccaggccagccaggcccctcctgtgcccggccccccacctggggccccccacaccccccagaccccaggccagggcggccctgccagcaccccagcccagacagctgctgggggccagggcggccctgggggccctggcagtgacaagcagcagcagcagcagcacattgaatgtgtggtgtgtggggacaagagcagcggcaagcactacggccagttcacctgtgagggctgcaagagcttcttcaagaggtctgtgagaagaaacctgagctacacctgccgggccaacagaaactgccccatcgaccagcaccacaggaaccagtgccagtactgccgcctgaagaagtgcctgaaggtgggcatgagaagagaggccgtgcagaggggccgcatgccacccacccagcccacccacggccagtttgccctgaccaacggggaccccctgaactgccacagctacctgagcggctacatcagcctgctgctgcgggcagagccctaccccaccagccgcttcggcagccagtgcatgcagcccaacaacatcatgggcatcgagaacatctgtgagctggccgccaggatgctgttctctgctgtggagtgggccaggaacatccccttcttcccagacctgcagatcacagaccaggtggccctgctgcggctgacctggagcgagctgtttgtgctgaatgctgcccagtgcagcatgcccctgcacgtggcccccctgctggccgctgctggcctgcacgccagccccatgtctgctgacagagtggtggccttcatggaccacatccgcatcttccaggagcaggtggagaagctgaaggccctgcacgtggacagcgctgagtacagctgcctgaaggccatcgtgctcttcaccagtgatgcctgtggcctgagtgatgtggcccacgtggagagcctgcaggagaagagccagtgtgccctggaggagtatgtgcgcagccagtaccccaaccagcccaccaggtttgggaagctgctgctgcggctgcccagcctgaggacagtgagcagcagcgtcatcgagcagctgttctttgtgcggctggtgggcaagacccccatcgagaccctcatccgggacatgctgctgagcggcagcagcttcaactggccctacatggccatccagtag

SEQ ID NO: 206994 - DNA, 1245 bp, Artificial Sequence
  derived and/or modified sequence
atggccatggtggtgagcacctggcgggacccccaggacgaggtgcccgggtcacaaggttcacaggccagccaggccccccccgtgcccggccctcctcctggcgcacctcacacccctcaaactcccggacagggaggcccagcttccacaccagcacagactgctgctggaggccagggcggccccggtggtcccgggagcgataagcagcaacaacagcaacacatagagtgtgtagtctgtggcgacaaatcctccggtaagcattacggccaatttacctgcgagggctgtaagtctttttttaaaaggagcgtgaggcggaatttgtcctatacttgccgggccaatcgtaactgccctatcgaccagcaccatcgtaatcagtgccaatattgtcgcttgaagaaatgtttgaaagttgggatgcgacgagaagccgtccagcgtggtcggatgcccccaactcagcccactcatggtcaatttgcgttgactaatggcgatccacttaattgtcattcctatctgagcggatacatatctctgctgcttcgcgctgagccatacccaacaagccgttttggatctcaatgtatgcaaccaaataatattatgggtattgaaaacatttgtgagctggctgccagaatgttattcagtgccgtggagtgggcgcgaaatataccattcttccctgacctccaaattacagatcaggtggctctgcttcgtctgacatggtccgaactgttcgtccttaatgccgcgcagtgttctatgcccctccacgtcgcccccctgctggcagctgccggcctgcatgcctcaccaatgagtgctgatcgagttgtggccttcatggaccatatcagaatttttcaagaacaggtggagaaactgaaagcgctgcatgtagattcagcagagtacagctgcctgaaggccattgtgttattcacgtcagacgcctgcgggctatcagacgtggctcacgtagagagcctgcaggagaagtcccagtgcgctctcgaagaatacgtgcgatcacaatatccgaatcagcctacccggtttggcaaacttttactccggttacccagcttaaggacagtttccagtagcgtgatcgagcaactcttcttcgtcaggctcgtgggtaagacacctatcgagaccctaatcagagatatgctcctctccggcagttccttcaactggccttatatggccatccagtag

SEQ ID NO: 206995 - DNA, 5275 bp, Artificial Sequence
  derived and/or modified sequence
agccccggcgcctataaatcgcattccctcccgcgcccccctttttagcatatttgatcactttgattctctgttcttttctctccgcggtgtgtgtgtgcgtgcgcgcgtgtgtgttttcttcttctcctcctcctctccccgagttgcctcctttctccgggtgccgtactgccttttttcccctctttcattctttctctccgtctttttctcccccctctgcgcacgaaggatgtgcttctaggtggtgatctgccctcctctctctcttttatcatttctcccccgccgccggcgagttgactctttccctatgtgtgtgaggcggcggcggcagcagcagcagcagcggctccggcggcggcagcagcggcagcagcgacttcagcggcggcggcggcgctagacgcagcggctccgggcccgacccggcggcttcggcggcggctccggcggcagcggcggcccgggcggcccgcagggaacggcgagcggcctccacccagcgactgcgggcggcggcggccggagagagcgaggcgcgcgccggacgcccggggcaggcggcggcggcggcggcccagcgccaggacgacgccgcgcagcgcccgacgcggaccactttcatgctgattcccccggacccgggcagcgctccggccactccgcgggccgccggcctccgccccggcctgcctggctccctgggcgcgcccgcacccggcgcctccgatctcctagtcctcctgatttcgatggctttcctgaatggctgactgtgggctgccctggacttggcccccggacagtcgcctctcctcctcctctacctcctccttcaccaccacctcctcttcctcctcctcctcctcctcctcctccgccaactcctcggctgcacaccagctctaagagcgagagtgaacgagagagggagggagagagtgagagcgagcgagatctttggagagatttttttttttgcctcctacttctgtcttgaagccagacaatcgacttcagctctccctcccctccctctttctccacgttctgctcccactcgctctcctgtccccttcccctcccctcccggcggaaagccccccgaaaccaacaaagctgagccgagagaaacaaacaaaacaaacacaccgggccagacaagccatcgacaaaactttgcaaaagcaaaaacaaaaaaggaaaaactaaccaacctcaaccaaccagcccccgagccacccggggcgccctcccgcgccctcttgcaccctcgcacacacaaaaggcggcgcgccggagcccgagacccggggagccgccgccgccccgccgccgcccgcagccaggggagcaggaagtccggacgcagcccccatagatatggcaatggtagtcagcacgtggcgcgacccccaggacgaggtgcccggctcacagggcagccaggcctcgcaggcgccgcccgtgcccggcccgccgcccggcgccccgcacacgccacagacgcccggccaagggggcccagccagcacgccagcccagacggcggccggtggccagggcggccctggcggcccgggtagcgacaagcagcagcagcagcaacacatcgagtgcgtggtgtgcggagacaagtcgagcggcaagcactacggccagttcacgtgcgagggctgcaagagcttcttcaagcgcagcgtgcggaggaacctgagctacacgtgccgcgccaaccggaactgtcccatcgaccagcaccatcgcaaccagtgccagtactgccgcctcaaaaagtgcctcaaagtgggcatgagacgggaagcggtgcagaggggcaggatgccgccgacccagccgacccacgggcagttcgcgctgaccaacggggatcccctcaactgccactcgtacctgtccggatatatttccctgctgttgcgcgcggagccctatcccacgtcgcgcttcggcagccaatgcatgcagcccaacaacatcatgggtatcgagaacatttgcgaactggccgcgaggatgctcttcagcgccgtcgagtgggcccggaacatccccttcttccccgacctgcagatcacggaccaggtggccctgcttcgcctcacctggagcgagctgtttgtgttgaatgcggcgcagtgctccatgcccctccacgtcgccccgctcctggccgccgccggcctgcatgcttcgcccatgtccgccgaccgggtggtcgcctttatggaccacatacggatcttccaagagcaagtggagaagctcaaggcgctgcacgttgactcagccgagtacagctgcctcaaggccatagtcctgttcacctcagatgcctgtggtctctctgatgtagcccatgtggaaagcttgcaggaaaagtctcagtgtgctttggaagaatacgttaggagccagtaccccaaccagccgacgagattcggaaagcttttgcttcgcctcccttccctccgcaccgtctcctcctcagtcatagagcaattgtttttcgtccgtttggtaggtaaaacccccatcgaaaccctcatccgggatatgttactgtccggcagcagttttaactggccgtatatggcaattcaataaataaataaaataagaagggggagtgaaacagagaaagaaaaggcaaaagactggtttgtttgcttaatttccttctgttaagaaaggatataaaaggatgttacaagtttgctaaaagaagagaggggaagaatttaatggactgtgaatttcaaaaaaaaaaaaaaagactgtcaaatgaacttttacagaatgcattaaaaaaaaaaaaaaactcctgtgtcggtcagaacaacttgctacttatcatttttgtataaaaaggaaattagtctttttctttttttggtaaatttttgaaaaatattgctaaaagtgcatttaaggagattgggagacaattagcagaatggagaaagtaagtcttttttttttccaaattattaattgtcctgtgtctatgtacctctagctgttcttttttgtacttttctggttccaaaccagtttattctgtggttctataataagttttgatataatcttggcttcttaaaaactgtgtatcattaaaatatatgttctgcaagaattaaaactgagtccatgaaaataccataggaagacataaaactttaaaaggcaactcaaagatgatggaaacgcacttacaagtggtgaccaaaatttttaggtgaagtcgagcactctaattagagaactggaggaaccacatataacacttaacttcccctaccctgcccctccccaaaagaaaccatgacaaacctagcttttaaaaaatattttaagaaagagaatgaactgtggaatttattggcagccaaggaatgtgtccaagacacatgctgaggttttgaataaaaagtgaacttttgtaatttgaattgggtcccgcttagttcttgaattgttatgaaaatcctatatctgtttgtatatttgcaaaccctttgtattataattgttgatattttccctttttaaaaaataccattgaaatcagcatgacaaaaataacactgttggcacttataggtaacgtgattgattcagtatcttagagtttacagtttgtgttttaaaaaaactgaaggttttttttttaagtgcaacatttctgtatactgtaaaagttataataactgaactgtttggtcgagtctttgtgtgttatattccaaggaaaattgaaagtattcagaaattaaaatattatttgatatctgaaacctggctgtccccactcactgtctttacatctagaagagcccctgtgagctctcgcttagctggccgggcggggggtggtgggggggggcatttgtttactcccctcagtcagtttgttcaaaggtggactactgtatttgcctgtttaatttgggtgtgtgtgtgttggggggggagctgaagttaatggtttatctatggtttaggaagtgccatactgatatagtaaaccacccccattcacctaatcctccttttaattaaaaatggattttccaggaaaaaaaaaaaggcccttatatttgtcacacttaagtgcctgcttagggaaggtattgtgaaaaagtattagaaatcttgagatcagtatctattttatgatcagaaaaaaatactcttttgtacatttctgacagttactcagaagatcgttcaagcaagctaatcacagcattgtaactagaggacagttgtttgcagtgagtttttccttaagtaggtacgattttttaaaatattctgtgattctactctagcgtggttgttgagagagtttcaaattcagtgatacaggttctaagactgaaaggtctacttttaatgtatatatgataacttgcagttggtttccctctcccctccccccctttaccttcagtctgtgagagcatgaccacagggtcaagggaatcttttccattggagttatgtacataaaaacacatcgacattttgacatttcagattgtgtggctacaatctgtactgctcttgggatcctttgtccttagaagccaaattaaggaagagaaagcaggacagagaaaaagaaagaaggaaggagggaaactttacagggtgtgctgatttggaagtagtaactatttcttttggagtctttttttcatttttcctctttctcttttcctggtttggaggaagctcggtgctgggagcttgcaattttgttcttattcaaggtttccaacccacccccccaccgccagtacttcatcatgttgtggtttaattctaattggtgggggggggggaggactagtgagggaggtgaaagaacagggataattttgtaaagtgtattaaacgttaatattcagatccagtcaatacatgcagaccagtaaaatctgatttgtgcagagttctccatctgactctcacttatttctgtagatatatacatatataaatacaagtatgttcttacggcacagtattgctgacctttagttcgaggttttgtcggttgttgttgattttcttcctcttgcaagtgctatccatgtgagtgtgtgaagtttctctaataagtaaaacacaggcccttttccttgtttgttttgtgttagtttattgtaaacagccatttgttgtaaattattattggcattaaattataatttatgattttcaaagcaaaagacaa

SEQ ID NO: 206996 - DNA, 1245 bp, Artificial Sequence
  derived and/or modified sequence
atggcgatggttgtatccacctggcgcgatcctcaggacgaggtgcccggatctcagggaagccaagcaagccaggcccctcccgtacccggtccaccaccaggcgcacctcatacccctcagaccccagggcagggcggaccagcttctacccccgctcagactgctgcgggtggacagggaggccctggtggcccaggttcggataagcagcaacaacaacagcatatcgaatgcgtagtttgtggcgacaaatcttctgggaagcattacggtcaattcacatgtgagggctgcaaatctttcttcaagagatccgtccgtagaaacctctcctatacgtgcagggccaatagaaactgtcctatagaccaacatcatcggaaccagtgccaatattgtcggctcaagaaatgtcttaaagttggaatgaggcgcgaagccgtccagagagggagaatgcctccgactcagcccacccacgggcagtttgccctcaccaatggtgaccccctcaattgtcacagttacctgtccggctacataagcttgcttttgagggccgagccataccccacaagcagattcggttcacagtgtatgcagccaaataatattatggggatcgagaatatatgtgagctggccgcacggatgctcttcagcgctgttgagtgggccaggaacataccatttttccctgatttgcagattacagaccaggtggcactgctcaggcttacatggtctgaattgtttgtgctcaatgctgcccagtgtagcatgccattgcacgtggctcccctgctcgctgctgcaggcctgcatgcatccccaatgtccgccgaccgcgtcgtggccttcatggatcatatccgtattttccaagagcaggtggaaaagttgaaggccctgcacgtggattccgcagaatacagttgtctcaaggccatcgttttattcacgtcggacgcctgcggcttaagcgacgtggcacacgtcgagtctctgcaggaaaagtcacagtgtgctttggaagagtacgtgcgcagtcaatacccaaatcagcctactcggtttggaaaactgctcttgagactaccttcactgaggacagtgagctcaagtgtaatcgagcagctcttcttcgtacgcctggtgggaaaaacccctatcgagactctgatcagagacatgctcctgagcggaagctccttcaattggccatacatggcaatccagtag

SEQ ID NO: 206997 - DNA, 1245 bp, Artificial Sequence
  derived and/or modified sequence
atggccatggtggtgagcacctggagagacccccaggacgaggtgcccggcagccagggcagccaggccagccaggccccccccgtgcccggccccccccccggcgccccccacaccccccagacccccggccagggcggccccgccagcacccccgcccagaccgccgccggcggccagggcggccccggcggccccggcagcgacaagcagcagcagcagcagcacatcgagtgcgtggtgtgcggcgacaagagcagcggcaagcactacggccagttcacctgcgagggctgcaagagcttcttcaagagaagcgtgagaagaaacctgagctacacctgcagagccaacagaaactgccccatcgaccagcaccacagaaaccagtgccagtactgcagactgaagaagtgcctgaaggtgggcatgagaagagaggccgtgcagagaggcagaatgccccccacccagcccacccacggccagttcgccctgaccaacggcgaccccctgaactgccacagctacctgagcggctacatcagcctgctgctgagagccgagccctaccccaccagcagattcggcagccagtgcatgcagcccaacaacatcatgggcatcgagaacatctgcgagctggccgccagaatgctgttcagcgccgtggagtgggccagaaacatccccttcttccccgacctgcagatcaccgaccaggtggccctgctgagactgacctggagcgagctgttcgtgctgaacgccgcccagtgcagcatgcccctgcacgtggcccccctgctggccgccgccggcctgcacgccagccccatgagcgccgacagagtggtggccttcatggaccacatcagaatcttccaggagcaggtggagaagctgaaggccctgcacgtggacagcgccgagtacagctgcctgaaggccatcgtgctgttcaccagcgacgcctgcggcctgagcgacgtggcccacgtggagagcctgcaggagaagagccagtgcgccctggaggagtacgtgagaagccagtaccccaaccagcccaccagattcggcaagctgctgctgagactgcccagcctgagaaccgtgagcagcagcgtgatcgagcagctgttcttcgtgagactggtgggcaagacccccatcgagaccctgatcagagacatgctgctgagcggcagcagcttcaactggccctacatggccatccagtag

SEQ ID NO: 206998 - protein, 551 aa, Artificial Sequence [sequence omitted]

SEQ ID NO: 206999 - protein, 565 aa, Artificial Sequence
  derived and/or modified sequence
MEDSDSAAKQLGLAEAAAVAAAAAVAAAAAAAAGGEAEEPVLSRDEDSEEDADSEAERETPRVTAVAVMAAEPGHMDMGAEALPGPDEAAAAAAFAEVTTVTVANVGAAADNVFTTSVANAASISGHVLSGRTALQIGDSLNTEKATLIVVHTDGSIVETTGLKGPAAPLTPGPQSPPTPLAPGQEKGGTKYNWDPSVYDSELPVRCRNISGTLYKNRLGSGGRGRCIKQGENWYSPTEFEAMAGRASSKDWKRSIRYAGRPLQCLIQDGILNPHAASCTCAACCDDMTLSGPVRLFVPYKRRKKENELPTTPVKKDSPKNITLLPATAATTFTVTPSGQITTSGALTFDRASTVEATAVISESPAQGDVFAGATVQEASVQPPCRASHPEPHYPGYQDSCQIAPFPEAALPTSHPKIVLTSLPALAVPPPTPTKAAPPALVNGLELSEPRSWLYLEEMVNSLLNTAQQLKTLFEQAKHASTYREAATNQAKIHADAERKEQSCVNCGREAMSECTGCHKVNYCSTFCQRKDWKDHQHICGQSAAVTVQADEVHVAESVMEKVTV

SEQ ID NO: 207000 - protein, 484 aa, Artificial Sequence
  derived and/or modified sequence
MGAEALPGPDEAAAAAAFAEVTTVTVANVGAAADNVFTTSVANAASISGHVLSGRTALQIGDSLNTEKATLIVVHTDGSIVETTGLKGPAAPLTPGPQSPPTPLAPGQEKGGTKYNWDPSVYDSELPVRCRNISGTLYKNRLGSGGRGRCIKQGENWYSPTEFEAMAGRASSKDWKRSIRYAGRPLQCLIQDGILNPHAASCTCAACCDDMTLSGPVRLFVPYKRRKKENELPTTPVKKDSPKNITLLPATAATTFTVTPSGQITTSGALTFDRASTVEATAVISESPAQGDVFAGATVQEASVQPPCRASHPEPHYPGYQDSCQIAPFPEAALPTSHPKIVLTSLPALAVPPPTPTKAAPPALVNGLELSEPRSWLYLEEMVNSLLNTAQQLKTLFEQAKHASTYREAATNQAKIHADAERKEQSCVNCGREAMSECTGCHKVNYCSTFCQRKRWSLTMLTSLVSISWLRAILPCQPPKVLGL

SEQ ID NO: 207001 - protein, 349 aa, Artificial Sequence
  derived and/or modified sequence
  misc_feature (1)..(1): Xaa can be any naturally occurring amino acid
XLYKNRLGSGGRGRCIKQGENWYSPTEFEAMAGRASSKDWKRSIRYAGRPLQCLIQDGILNPHAASCTCAACCDDMTLSGPVRLFVPYKRRKKENELPTTPVKKDSPKNITLLPATAATTFTVTPSGQITTSGALTFDRASTVEATAVISESPAQGDVFAGATVQEASVQPPCRASHPEPHYPGYQDSCQIAPFPEAALPTSHPKIVLTSLPALAVPPPTPTKAAPPALVNGLELSEPRSWLYLEEMVNSLLNTAQQLKTLFEQAKHASTYREAATNQAKIHADAERKEQSCVNCGREAMSECTGCHKVNYCSTFCQRKRWSLTMLTSLVSISWLRAILPCQPPKVLGL

SEQ ID NO: 207002 - DNA, 2737 bp, Artificial Sequence
  derived and/or modified sequence
tgacgaaggggcccgaccgcgccgcgtttcgggagcggacgtccgagccacggccgaggcccgattagtccgtccggcaccgctcgggcactttcggaagggaagaggtggagaaccgacgttcgggagcattcggcctcggggacattcggctcgtctcggctcggcctcgggctgactcggcttccgccggcggcgggaacgggcgaaacccgcggcactaagctctctctgagaggcagaattgcgccggccgccggcgagaatctgcctagagccgtccagccctgtcggccggggacgacagccgcctcagcctgtcaggacagtgaggagagcaggggccgagtctctcggaagccctcgtgaggactcggacctattcggactgattcggcttcccacttcggggaacttcgaccctcctcggttcaggactcggtctcggctcggcggcttcgtgcaggttcggctcctactcgggcagcctctgttcgcctcggctccgctccgcgggcggactcggctcggctctgctcggcggctggctgccttttcggtccctattcgggcggcggcttcgggcggcctcggcccagctcgggcgtcctcttcgggccccgcttcgggctccgcgaccggcgcttcgggcggtcccggacggcgccttcgggaaggctcggcggagtccggatggaggactcggactcggcggcaaagcagctgggcctggctgaggcggcggcggtggcggccgcggccgctgtggcggcggcggccgcggccgcggcaggaggcgaggcggaggagccggtgctgagcagggacgaggactcggaggaggacgcagactcggaggcggagcgggagacgccgcgggtcacggcagtggcggtgatggcggcggagcccgggcacatggacatgggcgccgaggccctgcccggccccgacgaggccgccgctgccgcagccttcgcagaggtgaccacagtgacagtggccaacgtgggggctgctgcagacaatgtcttcaccacgtctgtggcgaacgcggcatccatctcaggacatgttctgtctggtaggacggcccttcagatcggggacagcctgaacaccgaaaaagcgacactgattgtcgtccacacagatgggagcatcgtggagaccaccgggctgaaaggcccggcagctcccctcaccccaggtcctcagtctcctccaacccctctggctcccggccaagaaaaaggtggaactaaatacaactgggacccttctgtgtacgacagtgagctgcccgtacggtgccggaacatcagcggcactctgtacaagaacaggctcggctcaggcggccggggacggtgcatcaagcagggggagaactggtacagtcccaccgagtttgaggccatggcaggaagagccagcagtaaggactggaaaagaagcattcgctacgcgggccgacccttgcagtgcctcatccaggatgggatcttaaaccctcacgctgcctcttgcacctgtgctgcctgctgcgacgacatgaccttaagtggcccagtcaggctttttgtgccttacaaaaggcgcaagaaggagaatgaactgcccacaactcccgtgaagaaggactcccccaagaacatcacattgcttccagccaccgcggctaccaccttcaccgtgaccccctcgggacagatcacgacctcgggggcactgacctttgaccgagcgtccacggtagaggccactgctgtcatatcagagagtccggcccagggcgacgtcttcgcaggggccacagtccaagaggccagcgtgcagcccccatgcagggccagccaccctgagcctcactaccccggctatcaggacagctgccagatcgcaccgtttccagaagctgcgttgccaacgtcacatcccaaaatagtgttgacatccctgcctgcgctggcggtcccacccccgactcccaccaaagcggcacctcccgcgttggtcaatgggctggagctgtcagagccgcggagctggctgtacctagaagagatggtcaactccttgctcaacacagcgcagcagctgaagacgctgtttgagcaagccaagcatgccagcacctaccgagaagctgccacaaaccaggccaagatccacgctgacgcagagcggaaggagcagtcctgcgttaactgcggccgggaggctatgagcgagtgcaccggctgccacaaggtcaactactgctccaccttctgccaacgcaaggactggaaggatcaccagcacatatgcggccagtcagcagctgtcaccgtccaggcagacgaagtccacgtggctgaaagcgtgatggagaaggtgaccgtgtgaggctccatcggccgccctgggagctggggcccctcgcactcctgtgaggcttttgcaggtcgaaggcccccctgaggactctggggggacgttgagaagaggggtgtgggaaggtaaagaaacttgctggacaagtcattaacacactttaagcgaatggtgccctgggaagcgcactccccctgcccgggccccctgcccgctcgcggacagattttttatccctgggatcatgagcgtccggtcttgcccacagggcctgtgctgcgacgcacatacatacgtgttgtgtctgtcaataaagtgtaaataaggtctccctgccaaaaaaaaaaaaaaaaaaaaa

SEQ ID NO: 207003 - DNA, 1656 bp, Artificial Sequence
  derived and/or modified sequence
atggaagattctgatagcgccgctaaacagctcgggttagccgaagctgcggcagcagggggagaagccgaagagcccgtgctgagtcgtgacgaagattccgaagaagatgccgactctgaggccgaacgcgaaacgcccagagttactgcagtggccgtgatggcggctgagcccggacacatggatatgggggctgaggcactccctggaccagacgaagctgcagcggctgcagcctttgccgaggtcaccacagtaacagtcgctaacgtgggggctgcagctgacaacgtgttcacaacgagtgtggctaacgcagccagtatcagtggtcatgtgctgtcgggcagaaccgccctccagataggtgactcactcaacaccgagaaagcaacattgatcgtagtccacactgatgggtccattgtggagaccactgggctgaagggaccagctgctccattgacccccggaccccagtcccctcctacacccttggctcccggacaggagaagggaggtactaagtacaactgggatccttctgtgtacgattctgagttgcctgtgaggtgccggaatattagcggcactctgtataaaaacagactgggatccggcggacggggaagatgcatcaaacaaggagagaactggtatagccccacagagtttgaggccatggctggcagagccagtagtaaggactggaaaagatctattcgttatgccggacgcccactgcagtgtctgatccaagatggaattttgaatccacacgcagcaagttgcacttgtgccgcttgctgtgacgatatgacactcagtggaccagtgcggctcttcgtgccgtataagaggcgaaaaaaggagaatgaactgcccaccactcctgtgaagaaagactcgcctaaaaacattacattgctgccagcaacagccgctactactttcaccgtgacccccagcggccagataaccacatcgggtgcacttacctttgatcgggcaagcactgtcgaggccactgctgtaatatctgagtcacccgctcagggagatgtttttgccggagcaaccgtccaggaagctagtgtgcagcctccctgccgtgcatctcaccccgaaccacattacccagggtaccaggatagttgccaaattgcacccttcccagaggcagcactgccaacctctcatcctaagattgttttgacttctctccccgcactcgctgtaccacctccaactccgactaaggctgcgccaccagcccttgtcaatggtctcgaactctcggagccaagaagctggctgtacctggaagagatggtgaatagcctgctgaacacagctcagcagctgaaaaccctatttgaacaggcaaaacatgctagcacttatcgagaggctgcgacaaaccaggctaaaatccatgctgacgcggagaggaaggaacaatcatgcgtcaactgcggcagagaagcgatgtcagagtgtacagggtgtcacaaggtcaattactgttccacattttgtcagcgaaaggactggaaagaccatcagcatatctgcggtcagagtgctgccgtgactgttcaggcagacgaagtgcacgtcgctgagtctgttatggagaaggtgactgtgtag

SEQ ID NO: 207004 - DNA, 1698 bp, Artificial Sequence
  derived and/or modified sequence
atggaggattctgattccgcagctaagcaactcggcctggccgaggcggcagcagtagccgcagctgccgctgtcgcggctgcggcagctgctgctgccggaggcgaagccgaggagccagtgttgtcccgcgatgaagactctgaagaggacgctgatagcgaggctgaacgggaaaccccccgagttacagctgtcgccgtaatggccgcagagcccggtcatatggatatgggagccgaagcactgccgggtccggacgaagccgcagccgcagccgctttcgctgaagtcaccactgtgacagtggccaatgtgggagcagccgctgataacgtgtttaccacttcagtggcaaacgctgcctcaatcagtgggcacgtgctgagcggcagaacagctctgcaaatcggcgattcactgaataccgagaaagcaacactgatcgtcgttcacacggacggctctattgtggaaacaaccgggcttaaaggacccgctgctcctctgactcccggaccacagagtcctcctacacctttagcaccagggcaggagaagggcggaaccaagtataattgggacccttccgtgtacgacagcgagctgcctgttaggtgtaggaacatttctggaactctttataagaaccggctcgggagtgggggacggggaaggtgtatcaagcaaggcgaaaattggtacagccccaccgagtttgaagccatggcaggcagggcaagctctaaagactggaaacggtccatccggtatgctggcaggccactgcaatgtctgatccaggacgggatactcaacccacacgccgcaagttgcacctgtgcggcatgctgtgacgacatgacactgagcggtccggtaagattattcgtcccttacaaaagaaggaagaaagaaaatgaactgccaactacccccgtgaaaaaggacagtcctaagaacatcactctcctgcctgcaacggccgcaacaacgtttaccgtgactccttctggccaaatcacgacctccggagcactcacctttgatcgggcaagcactgtagaggccacagctgtgattagcgagagccccgctcaaggagacgttttcgctggggctacagtccaggaagcaagcgtacagcccccttgtcgcgcatcccatcccgaaccacattatccaggttatcaggatagttgccagattgccccattcccagaggctgccctccccacctctcatccaaagattgtgcttacttctcttccagccttagcagtgcccccacctacaccaacaaaagcagctcccccagccctagtaaacggtctggagctgtcagagcctcggtcatggctctatttggaggaaatggtgaactctctgctgaacacagcccagcagctgaaaacgctttttgaacaagccaagcatgccagcacctaccgggaggccgcaacaaatcaggctaaaatacatgccgacgctgaacgcaaagagcaaagctgcgttaactgtgggagggaggctatgtctgaatgcaccggctgtcacaaagtgaactactgttcgaccttctgtcagcgcaaagattggaaggatcaccagcacatctgtggtcagtcagccgctgttactgtgcaagcagacgaggttcacgtggccgaaagcgtgatggaaaaggtgaccgtgtag

SEQ ID NO: 207005 - DNA, 1455 bp, Artificial Sequence
  derived and/or modified sequence
atgggggctgaagcactcccaggacctgacgaagccgcagcagccgctgcgtttgccgaagtcactaccgtgactgtggcaaacgtcggtgcagccgcagataacgtcttcactacctccgtagctaatgccgcatctattagtgggcatgttctctcagggaggactgctctgcagattggtgatagcttgaatactgagaaagccacactgattgttgtacacactgatggttctattgttgaaacgaccggtctcaagggccctgcagctccgctcactcctggcccacagagcccgcctactcccctggcgcctggtcaggaaaagggagggaccaaatacaactgggatccctctgtatacgactccgagctgcccgtccggtgcagaaacatcagcggcacgctttataagaacagactcggtagcggtgggagggggcgatgtattaagcagggcgaaaattggtacagcccaacagaatttgaggcgatggctggacgggcttccagcaaagattggaaaagaagtatccgctatgccggacgcccactgcagtgtcttattcaggatggcatactcaacccacatgctgccagctgcacttgtgcagcatgttgtgatgacatgactctaagcggcccagtgcgacttttcgtgccgtacaagcgccgtaaaaaagaaaatgagctgcccactacaccagtgaaaaaggactcccccaaaaacatcactctactccccgctaccgccgcaaccacattcaccgttacgccctctggccaaataaccacatcaggagcactgacctttgaccgtgctagtacggtggaagcgacagcagtcatctcagaatcaccggctcagggggacgtcttcgccggagcaaccgtgcaggaggcgtctgttcaacctccatgccgggcttcacaccctgagccgcactacccaggatatcaggacagctgccaaattgctccctttcccgaagcggcactgcctaccagccatccgaagattgttctcaccagtttgccggctttggcagtgccaccgccaacccctacgaaggccgctccacccgctttagtgaatggactcgaactcagtgagccccgttcctggctttacttggaggaaatggttaactcccttctaaataccgctcagcagctcaaaaccctgttcgaacaagccaagcacgcctccacgtaccgcgaggccgcaacaaatcaggccaagatccacgccgacgctgagcggaaggaacagtcttgtgttaactgtggccgagaagccatgtctgaatgcactggttgccacaaagttaattactgtagtactttctgccaaagaaaaaggtggtctctcactatgctgacgtcactggtgtctatctcatggctgcgggctatcctgccatgccagcctccaaaagtcctgggactatag

SEQ ID NO: 207006 - DNA, 1050 bp, Artificial Sequence
  derived and/or modified sequence
taattgtataaaaaccggctggggtccggcggtagaggacgctgtatcaagcaaggagaaaactggtactcccccaccgaatttgaagctatggcagggcgagccagttccaaggattggaagcggtcgatacgctacgctggcaggccacttcaatgcctaatacaagacgggatcttgaacccccatgcagctagctgcacatgtgctgcttgttgtgacgatatgactctcagtgggccagtgcgtcttttcgtgccctacaaacggcgaaagaaagaaaatgaacttccaaccaccccagtcaagaaggactcgccaaagaatatcactctgcttccggcaacagcagctactacgtttaccgtcactcctagcggccaaatcactacaagtggggctttaacttttgatagagcgagcacagtcgaggccaccgccgttatctctgagtccccagctcagggagacgtgttcgctggcgcaacagttcaggaagcctccgtgcagccgccttgcagggcctcccatcctgaaccccattatccaggttaccaggactcctgccagattgcgccattccccgaggctgctctcccgacttcccatcccaagattgtccttacctctcttccggcactggctgtgccaccgcctacgcctacaaaggcagcccctccggctctcgtgaatgggctggagcttagcgagccaagaagttggctgtatctggaggagatggttaactccctcctgaatacagcacaacagctaaaaacactgtttgagcaagcaaaacacgcgtctacttaccgcgaagccgcaaccaatcaagctaaaatacacgccgatgctgagcgaaaggaacaaagttgtgttaactgcggcagggaggctatgtccgagtgcacaggctgccacaaggtgaactactgctctactttctgccaacgaaaacgctggtctttgactatgctcaccagcttggtgtccattagttggctacgcgcaatactcccatgtcagccccctaaagtgttagggctctag

SEQ ID NO: 207007 - DNA, 1656 bp, Artificial Sequence
  derived and/or modified sequence
atggaggatagtgattctgcagccaaacaactggggttagcggaggccgctgccgcaggaggcgaggccgaagaacctgtgctgtcccgtgacgaagatagtgaggaagacgcagactccgaagctgagcgtgagaccccccgcgttaccgcagttgcggtcatggctgccgagcctggacatatggacatgggcgctgaagccctcccaggtcctgatgaagctgctgcagccgccgcttttgctgaagttacaacagtcacagtggcgaatgtgggggccgccgcagacaacgtttttactacttctgtcgctaatgcagcctccatcagcggtcacgtcttgtctgggcgcaccgccctgcaaattggagatagtttgaataccgagaaggcaaccctcatagtcgttcatacagatggatccattgttgaaaccaccggactgaagggtccggcagcccccttgacaccaggacctcagtcaccccccacacccctggccccaggacaggagaaaggcgggaccaaatataattgggacccttcggtttatgattcagaactgcctgtccgatgcagaaacatcagtggaaccctttacaagaatcgcctgggatcaggcggccgcggaagatgtatcaaacagggtgaaaactggtattccccaactgagttcgaggcaatggctgggagagcaagcagtaaggactggaaacgttctatccgttacgccgggaggcctctgcaatgcctgatccaggacggaatacttaatccccacgctgcaagttgcacatgtgccgcctgctgcgacgacatgaccctatccgggccagttagactgtttgtaccttacaagcggaggaagaaagaaaacgaactgccaaccaccccggtcaaaaaggactcacccaaaaacatcactctgctaccagcaacagctgctacgacatttactgtgactccttcaggccagatcacaacctctggggccttgacatttgatcgtgcctcaacagttgaagcaaccgcggtaatcagcgaatctcctgctcagggggacgtgtttgcaggtgccacagtgcaagaggcttctgttcagcctccatgtcgggcttcacatcccgagcctcactaccctggataccaagacagctgccagattgcccccttccctgaagcggccctgcccacttcccatccaaaaatcgtgctaacaagcctacctgccctagcagttccccctcctacaccaaccaaagcggctcccccagccctggtcaacggcctggagcttagcgaaccacgttcttggctttacctcgaggagatggtgaatagcctgttgaatacggctcagcagctgaagactctatttgagcaagctaagcatgcatcaacctatagagaggccgccaccaaccaagccaagattcatgcagacgcagagagaaaagagcagtcatgtgtcaactgtggaagggaagcaatgagcgaatgcaccggatgccacaaagtaaattactgctccaccttttgtcagcgaaaggattggaaggaccaccagcacatctgcggccagtcggctgccgtgaccgttcaggctgatgaagtgcacgtggcagagtccgtgatggagaaggtcaccgtctag

SEQ ID NO: 207008 - DNA, 1698 bp, Artificial Sequence
  derived and/or modified sequence
atggaagacagcgatagcgcagccaaacagctgggcctggccgaagcagctgctgtggcagctgccgcagccgtggccgcggccgctgcagctgccgccggtggcgaagccgaggaaccagtgctgtccagggacgaggacagcgaggaagatgcagattctgaagctgagcgagagaccccacgggttacagccgtggccgtaatggccgccgaaccaggccacatggatatgggcgcggaggctctgcctggacctgacgaagccgctgccgccgccgcttttgctgaagtgacgaccgtcacagtcgccaacgtaggagctgcagctgacaacgtatttacaacctcagtggccaatgctgcaagcatcagtggacacgttctttctggcaggaccgccctacagattggcgattcccttaacactgaaaaggccacccttatcgtggtccatacggatggtagtattgtagaaacaaccggcctaaagggaccagccgcccctctcacccccggtcctcagtctccacccacaccccttgcccctggtcaggaaaaaggcgggaccaagtataactgggatccctccgtatatgatagcgaactaccagtccgatgcagaaatatctccggaacactgtacaaaaatagactcgggtcagggggacgcggccgatgtataaagcagggcgaaaattggtatagtccaaccgagttcgaagcaatggcaggcagggctagctcaaaggactggaagcgcagcattaggtacgcaggcagacctctgcagtgcttgatccaggacggtatcctgaatccccacgccgcctcatgcacctgcgccgcatgttgcgacgacatgaccttgtccggaccagtcaggttgttcgtgccatacaaaaggcgaaagaaagaaaacgagctgcccactacccctgtgaaaaaagatagtcccaaaaacattactctgctacctgctacggcagcaacaacatttactgtgacaccatccgggcagattaccacctccggcgctctcaccttcgaccgcgcttccaccgtggaggctacagcagtgatttccgaaagccctgcgcaaggcgatgtgtttgccggagccaccgtgcaagaggcaagcgtgcaacccccttgtagagccagccaccctgaacctcattaccctgggtatcaggactcatgtcagattgcccctttcccagaagccgcactgcccaccagtcaccccaaaattgtgttgacctctctgccagcgcttgctgtcccaccaccaacacccacaaaggcagcccccccagccctagtcaacggtctcgaactatcggaaccccgatcttggctctatctggaggaaatggtgaattcccttttaaataccgcgcagcagctgaagacgctctttgaacaggccaagcatgccagcacatacagagaggcggccacgaatcaggctaaaattcatgctgatgcagaacgaaaagaacaaagctgtgtgaattgtggacgggaggctatgagcgagtgcacaggttgtcataaagttaattactgtagcaccttttgtcaaaggaaagactggaaggaccatcagcacatttgcggccagagcgcagcagtgacagtgcaggccgacgaagtccacgtcgcagagtccgttatggaaaaggtaactgtgtag

SEQ ID NO: 207009 - DNA, 1455 bp, Artificial Sequence
  derived and/or modified sequence
atgggcgccgaggccctgcccggtcctgacgaggctgctgccgccgccgcgtttgccgaggttacaaccgtcaccgtcgcgaacgtcggtgccgccgcggataacgtgtttacgacctcggtggccaatgccgcatccattagtggacatgtgttgagtgggaggaccgccctgcaaataggtgatagccttaacactgaaaaagccactcttatcgtagtgcacactgacggaagtattgtggaaaccactggcttaaaggggccagctgcccctctgactcccggcccccaatcccctcctacacccctggcacctggacaggaaaaaggcggtacaaagtacaactgggacccctccgtgtacgattcagaattgccagtccggtgtcgtaacatttcagggacattatacaaaaataggctcggatccggaggacggggtcgatgcattaagcagggagaaaactggtactccccaaccgaatttgaagccatggccggccgcgcctcatctaaagactggaagcgaagtattaggtatgctgggaggccactgcaatgtctcattcaggatggcatcctaaatccacatgctgctagctgcacttgcgccgcttgttgcgatgatatgaccctaagtggtcctgtccgactgtttgtgccttacaagagacggaagaaggagaacgagcttcctaccacgcccgtaaagaaagattcgcccaaaaacataacgttactgcctgccactgccgccactacttttactgttaccccatcgggacaaataactactagtggcgccttgacctttgacagggctagcaccgtggaggccaccgccgtgattagcgagtcccccgctcagggagatgttttcgctggagctactgtccaagaagcctcggtgcagcctccgtgtcgggcaagccatcccgagcctcactaccccggatatcaggacagctgccagatcgccccttttcctgaagccgctctgccgaccagtcatcctaagatcgtcttgacaagcctccctgccttggccgtacccccccctacgccaacaaaagccgctccacccgcactggtaaatggactagagttgagcgaacctcggtcctggctctacctggaggagatggtgaattcactgcttaatactgcccagcagctgaaaaccctgtttgagcaggccaagcacgcctccacttaccgcgaggccgctacaaaccaggcaaaaatccatgctgatgccgagagaaaggagcagagttgcgtgaattgcggccgcgaagccatgtccgaatgcaccggatgccataaggtaaactactgcagcaccttctgccagaggaagcggtggtccctgacgatgctgacgagtctggtctctatttcttggctgcgcgctatcctgccttgccagccccccaaagttcttggtctgtag

SEQ ID NO: 207010 - DNA, 1050 bp, Artificial Sequence
  derived and/or modified sequence
tgactctataagaaccgcttggggtctggcggtcgcggccgatgcatcaagcagggagaaaattggtattctccaacggaatttgaagctatggccggccgtgcatcatcaaaagactggaagagatccataaggtatgctggtaggcccttacagtgcctcatccaggacggcattctaaacccccacgccgccagctgtacatgtgctgcatgctgcgatgatatgactctgtccggcccggtgagattatttgtgccgtataagaggcgtaaaaaggagaatgagttaccaaccacccctgtgaagaaggactcccctaagaatatcactcttctccccgccactgccgctacaaccttcactgtaacaccaagtggccagattacaacctccggagccctcaccttcgaccgcgccagcacagttgaagcaacagccgtgatttccgagtctccagcccagggggatgtcttcgcaggcgcaacagtgcaagaggccagcgtgcagcccccatgcagggcaagtcatcccgagccccattaccccggataccaggattcttgtcagatagctccctttcctgaagctgcgctgcccacgagccaccccaagattgtgctcacctcccttcccgcgttagccgtaccaccccccacaccaacaaaggcagcgccacctgccctcgtgaacggcttggagcttagcgagcctcgatcctggctgtatctcgaagaaatggtgaactccctgctcaatactgctcaacagctgaagacactgtttgagcaagctaaacacgcaagtacctatagagaagccgcaacgaaccaagctaagatccacgctgacgcagaaagaaaggaacagagctgcgtaaactgcgggcgagaggcaatgagcgaatgcactggttgccacaaggtgaactactgtagcaccttctgtcagcgcaaaaggtggtctcttacgatgctcacttcgctagtctcaatttcatggcttcgcgcgattttgccttgccaacctccaaaggtcctagggctgtag

SEQ ID NO: 207011 - DNA, 1656 bp, Artificial Sequence
  derived and/or modified sequence
atggaggactctgattccgcagcgaagcagctaggcctcgcagaagctgccgccgccggcggagaggcagaggaacccgtgctcagccgagatgaagattctgaggaagacgctgattccgaagctgaaagagagacaccacgtgttacggctgttgcagttatggccgcagagccaggccacatggatatgggggctgaagcccttcctggtcccgacgaggccgccgccgccgctgccttcgccgaggtgaccaccgtgactgtagcaaatgtgggagcagccgcagataacgtatttacaacctccgtggctaatgccgcgtccatcagcggccacgttctgtctggccgcaccgccctgcagattggagactcgttgaatactgaaaaggccactcttatcgtggttcacactgacggttccatagtcgagacaactggcctgaagggacctgctgccccactgactcccggaccacagagcccacctaccccactcgcccctggacaagaaaaaggcggaactaaatataactgggatccatccgtttatgattccgaactgcccgtgcgctgccgcaacatatcagggaccctgtacaaaaatcgacttggttcgggcggaagggggagatgtataaagcagggagagaactggtattcacctacagagtttgaggccatggccggaagagcctcctctaaggactggaaacgaagcatcagatacgctggaaggcccctgcagtgcctgatccaggatggaattctcaatccccacgcagcttcctgcacttgtgctgcgtgttgtgatgacatgactctcagtggcccagtacgactttttgttccatacaagcgaagaaagaaagagaatgagttaccaaccacgccagtgaaaaaagatagtccaaaaaatataactctgctcccagctacagccgccaccacctttactgtcaccccctctggacaaatcaccacgtccggcgccctgacctttgaccgcgcttctaccgttgaggccacagccgtcatatccgaatcgcctgcccaaggagatgtgttcgccggggcgaccgtacaggaagccagcgtgcagcccccatgtcgggcctcacacccagaaccccattatccaggttaccaggactcctgccaaattgccccttttccagaagccgcactgccaacatcccaccctaagatagtactgacctcgttgcccgcccttgcagtgccaccccccacccctacaaaagcagcccccccagccctagtcaacggactggaattgagtgaaccgagatcgtggctctacttggaagaaatggttaattctctccttaatactgctcaacagctcaagactctgttcgaacaggctaagcatgcatcgacttacagggaggccgccacaaatcaggctaaaattcacgcagacgccgaacggaaggaacagtcctgtgtaaactgtggccgcgaggccatgtcagagtgtaccggatgtcacaaggtgaattactgcagcacattttgtcaaagaaaagattggaaggaccatcagcacatctgtgggcagtccgccgccgtcactgttcaagccgacgaagtccacgtagccgagtccgttatggaaaaggtgacagtgtag

SEQ ID NO: 207012 - DNA, 1698 bp, Artificial Sequence
  derived and/or modified sequence
atggaggattccgactcggcagccaagcagctgggactggcggaggctgctgccgtggccgccgccgctgcggttgccgctgccgccgccgccgccgccggaggagaagccgaagaacccgtgctttcgcgcgatgaggactccgaagaagacgctgacagcgaagccgagagagaaacaccgagggtaaccgccgtggcagttatggccgctgaaccagggcatatggacatgggagctgaagccttgccaggaccggacgaggcagccgccgccgccgctttcgccgaagtcacaactgtcacagtcgccaacgtaggagctgcagctgacaacgtatttacaacctcagtggccaatgctgcaagcatcagtggacacgttctttctggcaggaccgccctacagattggcgattcccttaacactgaaaaggccacccttatcgtggtccatacggatggtagtattgtagaaacaaccggcctaaagggaccagccgcccctctcacccccggtcctcagtctccacccacaccccttgcccctggtcaggaaaaaggcgggaccaagtataactgggatccctccgtatatgattccgagttacctgttcgttgtcggaatatcagcggaacactctataaaaaccggttaggaagcggggggcgtggtaggtgcattaaacagggtgagaattggtacagccccacggagttcgaagctatggcagggagggctagctcaaaagactggaagaggtcaatccgctatgccggccgtccattacaatgcctaatccaagatggcatattaaatccccacgctgcttcttgcacctgcgctgcatgctgcgacgatatgaccctatcaggcccagtgagacttttcgtaccttataaaagacgcaagaaagaaaacgagttaccaaccacacccgtgaaaaaggatagccctaaaaacatcaccctcctgccagcgaccgcagctacaacatttaccgtcaccccctctggtcagatcactactagcggcgccctaactttcgatagagcaagtaccgtagaggcgactgccgttatctccgaatctcccgcgcaaggtgatgtctttgccggcgctacagtgcaagaggctagcgtccagccaccctgccgtgcttcccaccccgaaccacattaccctggatatcaggacagttgtcagatagctccgttcccggaggccgctctgccaacatcacacccaaagattgtcctgacgtcccttcccgccctggctgtacccccccccacaccaaccaaagcagccccacctgcccttgtaaatggactggaactgtccgagccacgatcttggttatatctcgaagagatggtaaattccttgttaaatactgcacaacaactcaaaacccttttcgagcaggctaagcatgcgtccacttatagagaagcagccactaaccaagccaaaatccacgccgacgccgaaagaaaagaacagagttgtgttaattgtggaagggaggcaatgtcagagtgcaccggttgtcacaaagtaaactattgtagtacattttgccagagaaaagactggaaggaccatcaacatatctgtggccaaagcgctgctgttaccgtgcaagcagatgaagttcatgtggctgagtccgtgatggagaaagtgacagtgtag

SEQ ID NO: 207013 - DNA, 1455 bp, Artificial Sequence
  derived and/or modified sequence
atgggcgcagaggccctgcctggaccagacgaggctgccgcagctgctgcctttgccgaggtgaccaccgtcaccgtagctaacgtcggagccgcagccgataatgtttttactacatcagtcgcaaatgctgcttccatctctggacatgtgctctcgggaaggacagctctccagattggtgacagtctgaacaccgagaaggcaaccctcatagtagtgcacaccgacggctccatcgttgagaccacaggactaaagggtccagccgcaccactcacacccggaccacagtcaccacctacacccctggcacctggacaggaaaaaggcggtacaaagtacaactgggacccctccgtgtacgattcagaattgccagtccggtgtcgtaacatttcagggacattatacaaaaataggctcggatccggaggacggggtcgatgcattaagcagggagaaaactggtactccccaaccgaatttgaagccatggccggccgcgcctcatctaaagactggaagcgaagtattaggtatgctgggaggccactgcaatgtctcattcaggatggcatcctaaatccacatgctgcttcttgcacctgcgctgcctgttgcgacgatatgaccctgtcaggccctgttaggctgttcgtgccttacaagagacgcaaaaaggaaaatgagctgcctacaacacctgtgaaaaaagatagtcctaaaaatataactctgctccccgcaacagccgctactacttttacagttacgccctctggacagattaccacttcaggcgctcttacttttgatcgcgcgtccacggttgaggccacagcagtaatatctgaatcacctgcccaaggggacgtttttgccggggctacagtccaggaggcatccgttcagccgccctgtcgagcgtcccatcctgaaccgcactaccccggctaccaagattcatgtcaaatcgctccattccctgaggccgctctgcctacctctcacccaaagattgtgcttacaagcttaccagctctcgccgtcccccctccaaccccaacaaaggctgctccacctgccctcgttaacggtttagaacttagcgagccacgctcctggctctatctcgaggaaatggtgaactccttgctcaacactgctcaacaactcaaaacattgtttgaacaggccaaacatgcttcaacctacagggaagccgccactaatcaagccaaaatccacgctgacgccgagcgcaaagaacaatcttgtgtgaactgcggcagagaggccatgagcgagtgtacaggctgtcacaaggttaattactgttccacattttgccagagaaaaaggtggagtcttactatgttaacgtccctcgtgtctataagttggttaagggccatcttaccatgccagccacccaaggtcctcgggctgtag

SEQ ID NO: 207014 - DNA, 1050 bp, Artificial Sequence
  derived and/or modified sequence
tgactgtacaaaaatcgcttgggatccggaggcaggggaagatgtatcaagcaaggggagaattggtactcgcccacagaattcgaggcaatggcaggacgcgcatcctctaaagattggaaacgctctatccgctacgcaggaagaccactacagtgcctgatccaggacggaatacttaacccacacgctgctagttgcacctgtgcagcctgctgtgacgatatgacattatccggccctgtgaggctgttcgtcccttacaagcgaaggaagaaggagaacgaactccccaccacaccagtcaagaaagactcaccaaaaaacatcaccctcctccctgctactgccgcgacgactttcaccgtaaccccaagtggccaaatcaccacaagcggagctctgacgttcgaccgcgcatctaccgtcgaggcaacagccgtaatcagtgagagtccagcccagggcgacgtcttcgccggagcaactgtccaggaagcatcagtgcagcctccgtgcagagcgtcacacccagaaccccactaccccggatatcaggacagctgccagatagcacctttcccagaagctgccctccccacaagtcaccccaaaatagtcctgacctcactcccagcccttgccgttccacccccaacacccaccaaagctgcacctcctgcactggttaacggcctagaactctctgagccccgctcctggctgtatctggaagaaatggtgaactctctgctgaacacagcccagcaactcaaaaccctgtttgagcaagctaagcacgcgagcacttaccgagaagccgccacaaatcaggctaagatacatgctgacgccgaacggaaagagcagagctgcgtgaattgtggaagagaagcaatgtctgaatgcacaggttgtcataaggtcaactattgttcaaccttttgtcaaagaaaaagatggtcactgactatgctgacttctctcgtgtctatttcatggctccgcgctatcctgccttgccaaccgccaaaagtgttaggtctctag

SEQ ID NO: 207015 - DNA, 1623 bp, Artificial Sequence
  derived and/or modified sequence
tctgtacaagaacaggctcggctcaggcggccggggacggtgcatcaagcagggggagaactggtacagtcccaccgagtttgaggccatggcaggaagagccagcagtaaggactggaaaagaagcattcgctacgcgggccgacccttgcagtgcctcatccaggatgggatcttaaaccctcacgctgcctcttgcacctgtgctgcctgctgcgacgacatgaccttaagtggcccagtcaggctttttgtgccttacaaaaggcgcaagaaggagaatgaactgcccacaactcccgtgaagaaggactcccccaagaacatcacattgcttccagccaccgcggctaccaccttcaccgtgaccccctcgggacagatcacgacctcgggggcactgacctttgaccgagcgtccacggtagaggccactgctgtcatatcagagagtccggcccagggcgacgtcttcgcaggggccacagtccaagaggccagcgtgcagcccccatgcagggccagccaccctgagcctcactaccccggctatcaggacagctgccagatcgcaccgtttccagaagctgcgttgccaacgtcacatcccaaaatagtgttgacatccctgcctgcgctggcggtcccacccccgactcccaccaaagcggcacctcccgcgttggtcaatgggctggagctgtcagagccgcggagctggctgtacctagaagagatggtcaactccttgctcaacacagcgcagcagctgaagacgctgtttgagcaagccaagcatgccagcacctaccgagaagctgccacaaaccaggccaagatccacgctgacgcagagcggaaggagcagtcctgcgttaactgcggccgggaggctatgagcgagtgcaccggctgccacaaggtcaactactgctccaccttctgccaacgcaagagatggagtcttactatgttgaccagcctggtctccatctcctggcttcgggcgatcctcccatgtcagcctcccaaagtgctaggattataggcatgaggcactacaccagccaacagaagtttttatattaaaatttactttttctagctgggcacagtggctcacgcctgtcatcccagcactttgggaggctgaggcaggtggatcaccggtcgggagtttgagaccagcttggctaacatggactggaaggatcaccagcacatatgcggccagtcagcagctgtcaccgtccaggcagacgaagtccacgtggctgaaagcgtgatggagaaggtgaccgtgtgaggctccatcggccgccctgggagctggggcccctcgcactcctgtgaggcttttgcaggtcgaaggcccccctgaggactctggggggacgttgagaagaggggtgtgggaaggtaaagaaacttgctggacaagtcattaacacactttaagcgaatggtgccctgggaagcgcactccccctgcccgggccccctgcccgctcgcggacagattttttatccctgggatcatgagcgtccggtcttgcccacagggcctgtgctgcgacgcacatacatacgtgttgtgtctgtcaataaagtgtaaataaggtc

SEQ ID NO: 207016 - DNA, 1656 bp, Artificial Sequence
  derived and/or modified sequence
atggaggacagcgacagcgccgccaagcagctgggcctggccgaggccgccgccgccggcggcgaggccgaggagcccgtgctgagcagagacgaggacagcgaggaggacgccgacagcgaggccgagagagagacccccagagtgaccgccgtggccgtgatggccgccgagcccggccacatggacatgggcgccgaggccctgcccggccccgacgaggccgccgccgccgccgccttcgccgaggtgaccaccgtgaccgtggccaacgtgggcgccgccgccgacaacgtgttcaccaccagcgtggccaacgccgccagcatcagcggccacgtgctgagcggcagaaccgccctgcagatcggcgacagcctgaacaccgagaaggccaccctgatcgtggtgcacaccgacggcagcatcgtggagaccaccggcctgaagggccccgccgcccccctgacccccggcccccagagcccccccacccccctggcccccggccaggagaagggcggcaccaagtacaactgggaccccagcgtgtacgacagcgagctgcccgtgagatgcagaaacatcagcggcaccctgtacaagaacagactgggcagcggcggcagaggcagatgcatcaagcagggcgagaactggtacagccccaccgagttcgaggccatggccggcagagccagcagcaaggactggaagagaagcatcagatacgccggcagacccctgcagtgcctgatccaggacggcatcctgaacccccacgccgccagctgcacctgcgccgcctgctgcgacgacatgaccctgagcggccccgtgagactgttcgtgccctacaagagaagaaagaaggagaacgagctgcccaccacccccgtgaagaaggacagccccaagaacatcaccctgctgcccgccaccgccgccaccaccttcaccgtgacccccagcggccagatcaccaccagcggcgccctgaccttcgacagagccagcaccgtggaggccaccgccgtgatcagcgagagccccgcccagggcgacgtgttcgccggcgccaccgtgcaggaggccagcgtgcagcccccctgcagagccagccaccccgagccccactaccccggctaccaggacagctgccagatcgcccccttccccgaggccgccctgcccaccagccaccccaagatcgtgctgaccagcctgcccgccctggccgtgcccccccccacccccaccaaggccgccccccccgccctggtgaacggcctggagctgagcgagcccagaagctggctgtacctggaggagatggtgaacagcctgctgaacaccgcccagcagctgaagaccctgttcgagcaggccaagcacgccagcacctacagagaggccgccaccaaccaggccaagatccacgccgacgccgagagaaaggagcagagctgcgtgaactgcggcagagaggccatgagcgagtgcaccggctgccacaaggtgaactactgcagcaccttctgccagagaaaggactggaaggaccaccagcacatctgcggccagagcgccgccgtgaccgtgcaggccgacgaggtgcacgtggccgagagcgtgatggagaaggtgaccgtgtag

SEQ ID NO: 207017 - DNA, 1698 bp, Artificial Sequence
  derived and/or modified sequence
atggaggacagcgacagcgccgccaagcagctgggcctggccgaggccgccgccgtggccgccgccgccgccgtggccgccgccgccgccgccgccgccggcggcgaggccgaggagcccgtgctgagcagagacgaggacagcgaggaggacgccgacagcgaggccgagagagagacccccagagtgaccgccgtggccgtgatggccgccgagcccggccacatggacatgggcgccgaggccctgcccggccccgacgaggccgccgccgccgccgccttcgccgaggtgaccaccgtgaccgtggccaacgtgggcgccgccgccgacaacgtgttcaccaccagcgtggccaacgccgccagcatcagcggccacgtgctgagcggcagaaccgccctgcagatcggcgacagcctgaacaccgagaaggccaccctgatcgtggtgcacaccgacggcagcatcgtggagaccaccggcctgaagggccccgccgcccccctgacccccggcccccagagcccccccacccccctggcccccggccaggagaagggcggcaccaagtacaactgggaccccagcgtgtacgacagcgagctgcccgtgagatgcagaaacatcagcggcaccctgtacaagaacagactgggcagcggcggcagaggcagatgcatcaagcagggcgagaactggtacagccccaccgagttcgaggccatggccggcagagccagcagcaaggactggaagagaagcatcagatacgccggcagacccctgcagtgcctgatccaggacggcatcctgaacccccacgccgccagctgcacctgcgccgcctgctgcgacgacatgaccctgagcggccccgtgagactgttcgtgccctacaagagaagaaagaaggagaacgagctgcccaccacccccgtgaagaaggacagccccaagaacatcaccctgctgcccgccaccgccgccaccaccttcaccgtgacccccagcggccagatcaccaccagcggcgccctgaccttcgacagagccagcaccgtggaggccaccgccgtgatcagcgagagccccgcccagggcgacgtgttcgccggcgccaccgtgcaggaggccagcgtgcagcccccctgcagagccagccaccccgagccccactaccccggctaccaggacagctgccagatcgcccccttccccgaggccgccctgcccaccagccaccccaagatcgtgctgaccagcctgcccgccctggccgtgcccccccccacccccaccaaggccgccccccccgccctggtgaacggcctggagctgagcgagcccagaagctggctgtacctggaggagatggtgaacagcctgctgaacaccgcccagcagctgaagaccctgttcgagcaggccaagcacgccagcacctacagagaggccgccaccaaccaggccaagatccacgccgacgccgagagaaaggagcagagctgcgtgaactgcggcagagaggccatgagcgagtgcaccggctgccacaaggtgaactactgcagcaccttctgccagagaaaggactggaaggaccaccagcacatctgcggccagagcgccgccgtgaccgtgcaggccgacgaggtgcacgtggccgagagcgtgatggagaaggtgaccgtgtag

SEQ ID NO: 207018 - DNA, 1455 bp, Artificial Sequence
  derived and/or modified sequence
atgggcgccgaggccctgcccggccccgacgaggccgccgccgccgccgccttcgccgaggtgaccaccgtgaccgtggccaacgtgggcgccgccgccgacaacgtgttcaccaccagcgtggccaacgccgccagcatcagcggccacgtgctgagcggcagaaccgccctgcagatcggcgacagcctgaacaccgagaaggccaccctgatcgtggtgcacaccgacggcagcatcgtggagaccaccggcctgaagggccccgccgcccccctgacccccggcccccagagcccccccacccccctggcccccggccaggagaagggcggcaccaagtacaactgggaccccagcgtgtacgacagcgagctgcccgtgagatgcagaaacatcagcggcaccctgtacaagaacagactgggcagcggcggcagaggcagatgcatcaagcagggcgagaactggtacagccccaccgagttcgaggccatggccggcagagccagcagcaaggactggaagagaagcatcagatacgccggcagacccctgcagtgcctgatccaggacggcatcctgaacccccacgccgccagctgcacctgcgccgcctgctgcgacgacatgaccctgagcggccccgtgagactgttcgtgccctacaagagaagaaagaaggagaacgagctgcccaccacccccgtgaagaaggacagccccaagaacatcaccctgctgcccgccaccgccgccaccaccttcaccgtgacccccagcggccagatcaccaccagcggcgccctgaccttcgacagagccagcaccgtggaggccaccgccgtgatcagcgagagccccgcccagggcgacgtgttcgccggcgccaccgtgcaggaggccagcgtgcagcccccctgcagagccagccaccccgagccccactaccccggctaccaggacagctgccagatcgcccccttccccgaggccgccctgcccaccagccaccccaagatcgtgctgaccagcctgcccgccctggccgtgcccccccccacccccaccaaggccgccccccccgccctggtgaacggcctggagctgagcgagcccagaagctggctgtacctggaggagatggtgaacagcctgctgaacaccgcccagcagctgaagaccctgttcgagcaggccaagcacgccagcacctacagagaggccgccaccaaccaggccaagatccacgccgacgccgagagaaaggagcagagctgcgtgaactgcggcagagaggccatgagcgagtgcaccggctgccacaaggtgaactactgcagcaccttctgccagagaaagagatggagcctgaccatgctgaccagcctggtgagcatcagctggctgagagccatcctgccctgccagccccccaaggtgctgggcctgtag

SEQ ID NO: 207019 - DNA, 1050 bp, Artificial Sequence
  derived and/or modified sequence
tgactgtacaagaacagactgggcagcggcggcagaggcagatgcatcaagcagggcgagaactggtacagccccaccgagttcgaggccatggccggcagagccagcagcaaggactggaagagaagcatcagatacgccggcagacccctgcagtgcctgatccaggacggcatcctgaacccccacgccgccagctgcacctgcgccgcctgctgcgacgacatgaccctgagcggccccgtgagactgttcgtgccctacaagagaagaaagaaggagaacgagctgcccaccacccccgtgaagaaggacagccccaagaacatcaccctgctgcccgccaccgccgccaccaccttcaccgtgacccccagcggccagatcaccaccagcggcgccctgaccttcgacagagccagcaccgtggaggccaccgccgtgatcagcgagagccccgcccagggcgacgtgttcgccggcgccaccgtgcaggaggccagcgtgcagcccccctgcagagccagccaccccgagccccactaccccggctaccaggacagctgccagatcgcccccttccccgaggccgccctgcccaccagccaccccaagatcgtgctgaccagcctgcccgccctggccgtgcccccccccacccccaccaaggccgccccccccgccctggtgaacggcctggagctgagcgagcccagaagctggctgtacctggaggagatggtgaacagcctgctgaacaccgcccagcagctgaagaccctgttcgagcaggccaagcacgccagcacctacagagaggccgccaccaaccaggccaagatccacgccgacgccgagagaaaggagcagagctgcgtgaactgcggcagagaggccatgagcgagtgcaccggctgccacaaggtgaactactgcagcaccttctgccagagaaagagatggagcctgaccatgctgaccagcctggtgagcatcagctggctgagagccatcctgccctgccagccccccaaggtgctgggcctgtag

SEQ ID NO: 207020 - DNA, 1656 bp, Artificial Sequence
  derived and/or modified sequence
atggaagacagcgattcagcagctaagcagttgggactggccgaggcggctgcagccggcggcgaagccgaggagcccgtcctttctagagacgaagattcagaggaagacgcagatagcgaagccgaacgcgagacgcctcgggtaacagccgtcgccgtgatggccgccgagcctggacatatggacatgggtgccgaggccctgcctgggccagatgaagcggctgctgccgccgcctttgctgaggtcactacagttaccgtcgctaatgtgggggccgctgcagacaacgtgttcactaccagcgtggccaatgctgcctccatctcagggcacgtccttagcggaagaactgctttgcaaatcggggacagtcttaacacagagaaggccaccttgattgtcgtgcatactgatggatccatagtcgagacaacaggccttaaaggccctgctgcacctctcactcccggaccgcagagcccgcctaccccgctggcccccggacaagaaaagggcggtacgaagtacaactgggacccttcggtgtatgactctgaactgcccgtgcgctgtcgcaatatctctggtactctctataagaatcggctgggttcaggtgggaggggccggtgtatcaagcagggggagaattggtactctcccacggaattcgaagcaatggccggccgtgcttcctccaaggactggaagcgctcaatccgctatgccggacggcctttacagtgtcttattcaggatggaatcctaaacccacacgctgccagctgtacgtgtgccgcttgttgcgatgacatgaccttgagcgggcccgtccgattgtttgtaccatacaagcgtcgcaaaaaagaaaatgaattgccgaccacccccgttaagaaggacagccctaagaatatcacacttttacctgcaacagccgccacaacgttcaccgtcacaccaagtggtcagatcactacaagcggcgccttgaccttcgatcgagcttccactgtcgaggccactgccgtcatctcagaaagtcctgcccagggagatgtatttgctggggccaccgttcaggaagccagcgtgcagcccccttgtcgggcctcacatcctgagccgcattacccaggctatcaagattcttgccagattgcccctttccctgaggccgcactcccaacaagccacccaaagatcgtcctcacctctctccccgcacttgccgtcccccccccaactccgaccaaagcggcccctcctgcactggtgaatggattggaattgagtgagcctcgaagctggctgtacctggaggagatggtcaactcgctgctgaacacagctcaacagttgaaaacactgttcgaacaggcgaagcacgcctccacataccgagaagccgctactaaccaggcgaagattcatgccgatgccgagcggaaagagcagtcatgcgtgaactgtggccgcgaggctatgagcgagtgcaccggctgtcataaagtcaattactgttcaactttttgccagaggaaagactggaaggaccatcagcatatctgtgggcaatccgctgccgtcacagtacaggccgatgaggttcacgtcgctgagagcgttatggagaaggttactgtttag

SEQ ID NO: 207021 - DNA, 1698 bp, Artificial Sequence
  derived and/or modified sequence
atggaggactccgactcagccgctaagcagctcggtcttgccgaggccgcagccgttgctgcagctgcggccgttgccgccgcggccgccgcagctgctggaggggaggcagaagagccagttctgagtagggacgaggatagcgaggaagatgccgacagtgaggccgagcgggaaaccccccgtgttacagcagtggccgtgatggcggccgagcccggacatatggacatgggggcggaagccttacctggtcctgacgaggccgcggcagccgccgcatttgccgaggtaaccactgtcaccgtggccaacgttggggccgctgccgacaatgtattcactaccagcgtggcgaatgcggcgtccatttcaggccatgtcctgtccggtcgaacggctttgcagattggagattcactgaataccgaaaaagcaaccctcatcgtggtgcacacagacggctctattgtggagaccaccggactgaagggacccgctgcacctttgacaccaggacctcaatccccaccgacacctttggctcctgggcaggaaaagggaggcacaaaatataactgggacccatccgtgtacgacagtgaactgccagtaagatgccgaaatatttccgggacgctttacaaaaacaggctcgggtccggaggcagggggcgttgcattaagcagggcgaaaactggtacagccctaccgagttcgaggcaatggcagggcgcgccagtagcaaggactggaagcggtctattcgctatgccggaaggccacttcagtgcttgattcaggacggtatcctcaatccacatgctgctagctgtacttgcgctgcatgttgcgatgatatgactttgtcagggcccgtgaggctgttcgtgccttacaagcggcggaagaaggaaaacgagctgccaaccactcccgtgaaaaaggatagccctaaaaacatcacgctgctgcctgctaccgcggcgacgacgtttaccgttactcccagcggccagattaccacttccggggcattgacatttgaccgcgcaagtactgtggaagctaccgcagtgatctctgagagtccagctcagggagatgtttttgccggtgctactgtccaggaggccagcgttcaacctccttgccgcgctagccaccctgaaccccactaccccggctatcaagactcatgccagatcgcacccttcccggaagcggccctgccaacctctcacccaaagattgtgcttacatcattaccagccctggctgtcccacccccgactccgactaaggctgcaccacccgccttggtgaatggcctggagctctccgagccccgctcctggctatacttagaggaaatggtgaattctctgctgaatacagcgcaacagctgaagacgctctttgaacaggcaaaacatgcctcaacatatagagaggctgccacaaatcaagctaaaatacatgccgacgcggagcgcaaagaacagagttgtgtgaattgtggccgggaggccatgagcgagtgtacaggatgtcacaaggtgaactactgcagtacattttgtcagcggaaggattggaaagatcatcagcatatctgtgggcaatcagccgcagttaccgtgcaggcggacgaggtgcatgtcgccgagtccgtgatggaaaaagtgacagtttag

SEQ ID NO: 207022 - DNA, 1455 bp, Artificial Sequence
  derived and/or modified sequence
atgggggctgaagccctccctggaccggacgaagcagccgccgccgctgcatttgctgaagtcactactgtgacagttgccaacgtgggcgcagcggccgacaacgtgtttaccacgtcggtggccaatgcagcctcaatttccggacatgtgttgtccggccgtaccgcactccagatcggtgactccctaaatacggaaaaggcaactctgattgtggttcacaccgacggctcaatcgtggagaccacaggactaaaaggacccgctgcaccgttgactccgggtcctcagagtcctccgacacccctcgctcccggccaggagaaaggcgggactaagtataactgggaccccagcgtctatgacagcgagcttccagtgagatgccggaacatttccggaacactgtacaagaacagactgggaagtggcgggcgtggtaggtgtattaaacagggcgagaactggtactcacccaccgaattcgaagcaatggctggacgtgcttcctccaaagattggaagcgttctatcaggtatgccggaagaccattgcagtgtctgatccaagatgggattctgaacccacacgcagcctcctgtacatgtgcggcctgttgtgacgatatgaccctgtccggtccggtgcggttgttcgtcccctataagagacgcaagaaagaaaacgagttgcccacaacgcccgttaagaaagatagtccaaaaaatattactcttcttcccgccactgctgcaaccacctttacagtgaccccaagcggtcagatcacgacctccggcgccctgacattcgacagggcgtcaacggtggaggccacggcagttatttcagaaagcccagcccagggagacgtgtttgcaggcgccacagtgcaggaggcgagcgtccagcccccatgccgggcttcccacccagagccgcattacccggggtaccaagatagctgccaaatagctccctttcccgaagccgcacttcccacttctcaccccaagatcgtgttgacgtctctaccggctctggccgttcccccaccaacacctacaaaagccgcccctcctgccctagtcaatggactggagttgtcagagcccagatcttggctgtacttggaggagatggtgaacagtttgctgaacaccgcccagcagttgaagacactgtttgaacaagcaaaacacgcaagcacatatcgtgaggctgccacaaaccaggccaagatccatgctgacgcggagagaaaagaacagagctgcgtgaattgcggtcgagaggctatgtccgagtgtaccggctgtcacaaagtaaactactgttctaccttctgtcagcgtaaacgctggagcctgacaatgcttactagcctggtaagtatctcctggttaagggccattctcccctgtcagcctccaaaggtgctgggcttatag

SEQ ID NO: 207023 - DNA, 1050 bp, Artificial Sequence
  derived and/or modified sequence
tagctgtataagaatcggcttggaagcggggggagaggccggtgcataaagcaaggagaaaactggtactctcccaccgaattcgaggccatggcaggacgagccagttccaaagattggaaaaggagtataagatatgctggtcggccccttcagtgcctcatccaggacgggattttaaacccacatgctgcgagctgcacttgtgccgcttgctgtgacgatatgaccttgagtggtcccgtgcggttatttgtcccttataaaaggcgcaagaaggagaacgaactcccgactacccccgtgaagaaagactccccgaagaatataaccctcctgcccgctaccgccgccacaacttttaccgttactccctccggtcagatcacaacatcaggtgccctgaccttcgaccgcgcttcaaccgtggaggccacagctgtgatctctgagagccccgctcaaggcgatgtctttgcaggtgccactgtgcaggaggcctcagtccagccaccctgcagggcttcacaccccgaacctcactatccgggataccaggactcctgtcagatagctccattccctgaggcagcgttacccacaagtcatcctaaaatcgtcctgacctccctgcccgccctggccgtcccacctcccacccctaccaaagcagcaccacctgcactcgttaatgggctagagctctctgagcctaggtcttggctctatcttgaggaaatggttaactctctgttgaacacggcccagcagctgaagacccttttcgagcaggccaaacacgcctccacttaccgagaggccgctacaaaccaggcaaagattcacgccgatgctgaaagaaaggagcagtcatgtgtgaactgtggacgtgaggccatgtctgagtgtacgggctgccataaggtgaactattgcagtactttttgccagcgcaagcggtggtccctcaccatgctgacgagtctggtgagcatatcctggctgagagctattctcccctgccagcccccaaaagtactcggcctgtag

SEQ ID NO: 207024 - DNA, 1973 bp, Artificial Sequence
  derived and/or modified sequence
atggaggactcggactcggcggcaaagcagctgggcctggctgaggcggccgcggcaggaggcgaggcggaggagccggtgctgagcagggacgaggactcggaggaggacgcagactcggaggcggagcgggagacgccgcgggtcacggcagtggcggtgatggcggcggagcccgggcacatggacatgggcgccgaggccctgcccggccccgacgaggccgccgctgccgcagccttcgcagaggtgaccacagtgacagtggccaacgtgggggctgctgcagacaatgtcttcaccacgtctgtggcgaacgcggcatccatctcaggacatgttctgtctggtaggacggcccttcagatcggggacagcctgaacaccgaaaaagcgacactgattgtcgtccacacagatgggagcatcgtggagaccaccgggctgaaaggcccggcagctcccctcaccccaggtcctcagtctcctccaacccctctggctcccggccaagaaaaaggtggaactaaatacaactgggacccttctgtgtacgacagtgagctgcccgtacggtgccggaacatcagcggcactctgtacaagaacaggctcggctcaggcggccggggacggtgcatcaagcagggggagaactggtacagtcccaccgagtttgaggccatggcaggaagagccagcagtaaggactggaaaagaagcattcgctacgcgggccgacccttgcagtgcctcatccaggatgggatcttaaaccctcacgctgcctcttgcacctgtgctgcctgctgcgacgacatgaccttaagtggcccagtcaggctttttgtgccttacaaaaggcgcaagaaggagaatgaactgcccacaactcccgtgaagaaggactcccccaagaacatcacattgcttccagccaccgcggctaccaccttcaccgtgaccccctcgggacagatcacgacctcgggggcactgacctttgaccgagcgtccacggtagaggccactgctgtcatatcagagagtccggcccagggcgacgtcttcgcaggggccacagtccaagaggccagcgtgcagcccccatgcagggccagccaccctgagcctcactaccccggctatcaggacagctgccagatcgcaccgtttccagaagctgcgttgccaacgtcacatcccaaaatagtgttgacatccctgcctgcgctggcggtcccacccccgactcccaccaaagcggcacctcccgcgttggtcaatgggctggagctgtcagagccgcggagctggctgtacctagaagagatggtcaactccttgctcaacacagcgcagcagctgaagacgctgtttgagcaagccaagcatgccagcacctaccgagaagctgccacaaaccaggccaagatccacgctgacgcagagcggaaggagcagtcctgcgttaactgcggccgggaggctatgagcgagtgcaccggctgccacaaggtcaactactgctccaccttctgccaacgcaaggactggaaggatcaccagcacatatgcggccagtcagcagctgtcaccgtccaggcagacgaagtccacgtggctgaaagcgtgatggagaaggtgaccgtgtgaggctccatcggccgccctgggagctggggcccctcgcactcctgtgaggcttttgcaggtcgaaggcccccctgaggactctggggggacgttgagaagaggggtgtgggaaggtaaagaaacttgctggacaagtcattaacacactttaagcgaatggtgccctgggaagcgcactccccctgcccgggccccctgcccgctcgcggacagattttttatccctgggatcatgagcgtccggtcttgcccacagggcctgtgctgcgacgcacatacatacgtgttgtgtctgtcaataaagtgtaaataaggtc

SEQ ID NO: 207025 - DNA, 1656 bp, Artificial Sequence
  derived and/or modified sequence
atggaggacagcgacagcgctgccaagcagctgggcctggccgaggccgctgctgctggaggagaggccgaggagcctgtgctgagcagagatgaggacagcgaggaggatgctgacagcgaggccgagcgggagaccccccgggtgacagctgtggccgtgatggctgctgagcccggccacatggacatgggcgctgaggccctgcccggcccagatgaagctgctgctgctgctgcctttgctgaggtgaccaccgtgacagtggccaacgtgggcgctgctgctgacaacgtgttcaccacctctgtggccaatgctgccagcatcagcggccacgtgctgagcggccgcacagccctgcagattggagacagcctgaacacagagaaggccaccctgattgtggtgcacacagatggcagcatcgtggagaccaccggcctgaagggccctgctgcccccctgaccccaggcccccagagcccccccacccccctggcccctggccaggagaagggcggcaccaagtacaactgggaccccagcgtgtatgattctgagctgcctgtgcgctgcaggaacatcagcggcaccctgtacaagaaccggctgggcagcggcggccggggccgctgcatcaagcagggcgagaactggtacagccccacagaatttgaggccatggccggccgggccagcagcaaggactggaagaggagcatccgctatgccggccggcccctgcagtgcctgatccaggacggcatcctgaacccccacgccgccagctgcacctgtgccgcctgctgtgatgacatgaccctgagcggccctgtgcggctgtttgtgccctacaagaggaggaagaaggaaaatgagctgcccaccacccctgtgaagaaggacagccccaagaacatcaccctgctgcctgccacagctgccaccaccttcaccgtgacccccagcggccagatcaccaccagcggggccctgacctttgaccgggccagcacagtggaggccacagctgtgatcagcgagagccctgcccagggagatgtgtttgctggggccaccgtgcaggaggcctctgtgcagcccccctgccgggccagccaccctgagccccactacccaggctaccaggacagctgccagatcgcccccttccctgaggccgccctgcccaccagccaccccaagatcgtgctgaccagcctgcctgccctggccgtgcccccacccacccccaccaaggccgcccccccagccctggtgaatggcctggagctgtctgagcccaggtcctggctgtacctggaggagatggtgaacagcctgctgaacacagcccagcagctgaagaccctgtttgagcaggccaagcacgccagcacctaccgggaggccgccaccaaccaggccaagatccatgctgatgctgagaggaaggagcagagctgtgtgaactgtggccgggaggccatgtctgagtgcaccggctgccacaaggtgaactactgcagcaccttctgccagaggaaggactggaaggaccaccagcacatctgtggccagagcgctgctgtgacagtgcaggctgatgaggtgcacgtggccgagagcgtgatggagaaggtgacagtgtag

SEQ ID NO: 207026 - DNA, 1698 bp, Artificial Sequence
  derived and/or modified sequence
atggaggacagcgacagcgctgccaagcagctgggcctggccgaggccgctgctgtggccgctgctgctgctgtggccgctgctgctgctgctgctgctggaggagaggccgaggagcctgtgctgagcagagatgaggacagcgaggaggatgctgacagcgaggccgagcgggagaccccccgggtgacagctgtggccgtgatggctgctgagcccggccacatggacatgggcgctgaggccctgcccggcccagatgaagctgctgctgctgctgcctttgctgaggtgaccaccgtgacagtggccaacgtgggcgctgctgctgacaacgtgttcaccacctctgtggccaatgctgccagcatcagcggccacgtgctgagcggccgcacagccctgcagattggagacagcctgaacacagagaaggccaccctgattgtggtgcacacagatggcagcatcgtggagaccaccggcctgaagggccctgctgcccccctgaccccaggcccccagagcccccccacccccctggcccctggccaggagaagggcggcaccaagtacaactgggaccccagcgtgtatgattctgagctgcctgtgcgctgcaggaacatcagcggcaccctgtacaagaaccggctgggcagcggcggccggggccgctgcatcaagcagggcgagaactggtacagccccacagaatttgaggccatggccggccgggccagcagcaaggactggaagaggagcatccgctatgccggccggcccctgcagtgcctgatccaggacggcatcctgaacccccacgccgccagctgcacctgtgccgcctgctgtgatgacatgaccctgagcggccctgtgcggctgtttgtgccctacaagaggaggaagaaggaaaatgagctgcccaccacccctgtgaagaaggacagccccaagaacatcaccctgctgcctgccacagctgccaccaccttcaccgtgacccccagcggccagatcaccaccagcggggccctgacctttgaccgggccagcacagtggaggccacagctgtgatcagcgagagccctgcccagggagatgtgtttgctggggccaccgtgcaggaggcctctgtgcagcccccctgccgggccagccaccctgagccccactacccaggctaccaggacagctgccagatcgcccccttccctgaggccgccctgcccaccagccaccccaagatcgtgctgaccagcctgcctgccctggccgtgcccccacccacccccaccaaggccgcccccccagccctggtgaatggcctggagctgtctgagcccaggtcctggctgtacctggaggagatggtgaacagcctgctgaacacagcccagcagctgaagaccctgtttgagcaggccaagcacgccagcacctaccgggaggccgccaccaaccaggccaagatccatgctgatgctgagaggaaggagcagagctgtgtgaactgtggccgggaggccatgtctgagtgcaccggctgccacaaggtgaactactgcagcaccttctgccagaggaaggactggaaggaccaccagcacatctgtggccagagcgctgctgtgacagtgcaggctgatgaggtgcacgtggccgagagcgtgatggagaaggtgacagtgtag

SEQ ID NO: 207027 - DNA, 1455 bp, Artificial Sequence
  derived and/or modified sequence
atgggcgctgaggccctgcccggcccagatgaggccgctgctgctgctgcctttgctgaggtgaccaccgtgacagtggccaacgtgggcgctgctgctgacaacgtgttcaccacctctgtggccaatgctgccagcatcagcggccacgtgctgagcggccgcacagccctgcagatcggggacagcctgaacacagagaaggccaccctcatcgtggtgcacacagatggcagcatcgtggagaccaccggcctgaagggccctgctgcccccctgaccccaggcccccagagcccccccacccccctggcccctggccaggagaagggcggcaccaagtacaactgggaccccagcgtgtatgacagcgagctgcctgtgcgctgcaggaacatcagcggcaccctgtacaagaaccggctgggcagcggcggccggggccgctgcatcaagcagggcgagaactggtacagccccacagaatttgaggccatggccggccgggccagcagcaaggactggaagaggagcatccgctatgccggccggcccctgcagtgcctgatccaggacggcatcctgaacccccatgctgccagctgcacctgtgccgcctgctgtgatgacatgaccctgagcggccctgtgcggctgtttgtgccctacaagaggaggaagaaggaaaatgagctgcccaccacccctgtgaagaaggacagccccaagaacatcaccctgctgcctgccacagctgccaccaccttcaccgtgaccccatctggccagatcaccaccagcggggccctgacctttgaccgggccagcacagtggaggccacagctgtgatcagcgagagccctgcccagggagatgtgtttgctggggccaccgtgcaggaggcctctgtgcagcccccctgccgggccagccaccctgagccccactacccaggctaccaggacagctgccagatcgcccccttccctgaggccgccctgcccaccagccaccccaagatcgtgctgaccagcctgcctgccctggccgtgcccccacccacccccaccaaggccgcccccccagccctggtgaatggcctggagctgtctgagcccaggtcctggctgtacctggaggagatggtgaacagcctgctgaacacagcccagcagctgaagaccctgtttgagcaggccaagcacgccagcacctaccgggaggccgccaccaaccaggccaagatccacgcagatgctgagaggaaggagcagagctgtgtgaactgtggccgggaggccatgtctgaatgtacaggctgccacaaggtgaactactgcagcaccttctgccagaggaagcgctggagcctgaccatgctgaccagcctggtgtccatctcctggctgcgggccatcctgccctgccagccccccaaggtgctgggcctgtag

SEQ ID NO: 207028 - DNA, 1050 bp, Artificial Sequence
  derived and/or modified sequence
tgactctacaagaaccggctgggcagcggcggccggggccgctgcatcaagcagggcgagaactggtacagccccacagaatttgaggccatggccggccgggccagcagcaaggactggaagaggagcatccgctatgccggccggcccctgcagtgcctgatccaggacggcatcctgaacccccacgccgccagctgcacctgtgccgcctgctgtgatgacatgaccctgagcggccctgtgcggctgtttgtgccctacaagaggaggaagaaggaaaatgagctgcccaccacccctgtgaagaaggacagccccaagaacatcaccctgctgcctgccacagctgccaccaccttcaccgtgacccccagcggccagatcaccaccagcggggccctgacctttgaccgggccagcacagtggaggccacagctgtgatcagcgagagccctgcccagggagatgtgtttgctggggccaccgtgcaggaggcctctgtgcagcccccctgccgggccagccaccctgagccccactacccaggctaccaggacagctgccagatcgcccccttccctgaggccgccctgcccaccagccaccccaagatcgtgctgaccagcctgcctgccctggccgtgcccccacccacccccaccaaggccgcccccccagccctggtgaatggcctggagctgtctgagcccaggtcctggctgtacctggaggagatggtgaacagcctgctgaacacagcccagcagctgaagaccctgtttgagcaggccaagcacgccagcacctaccgggaggccgccaccaaccaggccaagatccatgctgatgctgagaggaaggagcagagctgtgtgaactgtggccgggaggccatgtctgagtgcaccggctgccacaaggtgaactactgcagcaccttctgccagaggaagcgctggagcctgaccatgctgaccagcctggtgtccatctcctggctgcgggccatcctgccctgccagccccccaaggtgctgggcctgtag

SEQ ID NO: 207029 - DNA, 1656 bp, Artificial Sequence
  derived and/or modified sequence
atggaggacagcgacagcgccgccaagcagctgggcctggccgaggcagccgcggcagggggcgaagccgaagagccagttcttagtcgggacgaggattccgaggaggatgctgattcagaagcagagagggaaacccctcgtgtcaccgccgttgcggtcatggcggccgagcccgggcatatggatatgggagctgaggcactgccaggtcctgatgaagccgcggcagccgcggcgttcgccgaggtgacaactgttaccgtcgccaacgtgggggcagcagccgacaatgtgttcaccacttcagtggctaatgcagcctctatttcaggacacgtgctcagtggccgcacggcgctgcagattggtgattcgctgaacactgaaaaagctaccctcattgttgttcacaccgatgggtcgatagtcgaaactacgggtcttaagggacctgcagccccgctgacacccgggccacagtccccacccaccccgctggcccccggacaggagaaaggaggcactaagtacaattgggatccaagcgtctacgatagtgaattaccagtccggtgtcggaatatctctggcacactgtacaagaacaggctaggcagtggtggtcgaggcagatgcatcaaacagggagagaactggtactctccaactgaattcgaagctatggcaggtcgtgccagttcgaaggactggaagaggtctatccggtacgccggacgaccactccagtgtttgattcaggacggaattttgaacccccacgccgcttcttgtacctgtgcggcatgctgtgatgacatgacactcagtggccccgtaagactgtttgttccctacaagcgccggaaaaaggaaaatgaacttcccacaacacccgttaagaaggattctcccaaaaatatcacactgctaccagccacggccgctactacttttaccgttactccaagcgggcagatcaccacgtccggagcactgacttttgatcgagccagtacagttgaagctaccgcagttataagcgaaagccccgcccagggagatgtgtttgccggtgccacggtgcaggaggcctctgtccagcccccctgccgcgcttcgcatcctgagccccattaccctggatatcaggactcgtgccagatcgcacctttcccagaggccgctctgcctactagccaccccaagatcgtgctgaccagtctgcctgccctggccgtccccccccctacaccgacaaaggctgctcctcctgcactcgtcaacgggctcgaactatccgagcctcgttcctggctttacttggaagaaatggttaatagccttctgaatacagcacagcagttgaaaacacttttcgagcaggcaaagcatgctagcacctacagagaagcggctacaaatcaagcaaaaatccacgctgatgccgagagaaaagagcagtcttgtgttaattgcgggcgagaagcgatgtctgaatgtactgggtgccacaaggttaattactgctccacattctgccaacggaaggactggaaggatcaccagcacatctgcggccagtcagccgcggtgaccgtgcaggcggacgaggtgcacgtggccgagtctgttatggagaaggttaccgtttag

SEQ ID NO: 207030 - DNA, 2500 bp, Artificial Sequence
  derived and/or modified sequence
aaacccgcggcactaagctctctctgagaggcagaattgcgccggccgccggcgagaatctgcctagagccgtccagccctgtcggccggggacgacagccgcctcagcctgtcaggacagtgaggagagcaggggccgagtctctcggaagccctcgtgaggactcggacctattcggactgattcggcttcccacttcggggaacttcgaccctcctcggttcaggactcggtctcggctcggcggcttcgtgcaggttcggctcctactcgggcagcctctgttcgcctcggctccgctccgcgggcggactcggctcggctctgctcggcggctggctgccttttcggtccctattcgggcggcggcttcgggcggcctcggcccagctcgggcgtcctcttcgggccccgcttcgggctccgcgaccggcgcttcgggcggtcccggacggcgccttcgggaaggctcggcggagtccggatggaggactcggactcggcggcaaagcagctgggcctggctgaggcggcggcggtggcggccgcggccgctgtggcggcggcggccgcggccgcggcaggaggcgaggcggaggagccggtgctgagcagggacgaggactcggaggaggacgcagactcggaggcggagcgggagacgccgcgggtcacggcagtggcggtgatggcggcggagcccgggcacatggacatgggcgccgaggccctgcccggccccgacgaggccgccgctgccgcagccttcgcagaggtgaccacagtgacagtggccaacgtgggggctgctgcagacaatgtcttcaccacgtctgtggcgaacgcggcatccatctcaggacatgttctgtctggtaggacggcccttcagatcggggacagcctgaacaccgaaaaagcgacactgattgtcgtccacacagatgggagcatcgtggagaccaccgggctgaaaggcccggcagctcccctcaccccaggtcctcagtctcctccaacccctctggctcccggccaagaaaaaggtggaactaaatacaactgggacccttctgtgtacgacagtgagctgcccgtacggtgccggaacatcagcggcactctgtacaagaacaggctcggctcaggcggccggggacggtgcatcaagcagggggagaactggtacagtcccaccgagtttgaggccatggcaggaagagccagcagtaaggactggaaaagaagcattcgctacgcgggccgacccttgcagtgcctcatccaggatgggatcttaaaccctcacgctgcctcttgcacctgtgctgcctgctgcgacgacatgaccttaagtggcccagtcaggctttttgtgccttacaaaaggcgcaagaaggagaatgaactgcccacaactcccgtgaagaaggactcccccaagaacatcacattgcttccagccaccgcggctaccaccttcaccgtgaccccctcgggacagatcacgacctcgggggcactgacctttgaccgagcgtccacggtagaggccactgctgtcatatcagagagtccggcccagggcgacgtcttcgcaggggccacagtccaagaggccagcgtgcagcccccatgcagggccagccaccctgagcctcactaccccggctatcaggacagctgccagatcgcaccgtttccagaagctgcgttgccaacgtcacatcccaaaatagtgttgacatccctgcctgcgctggcggtcccacccccgactcccaccaaagcggcacctcccgcgttggtcaatgggctggagctgtcagagccgcggagctggctgtacctagaagagatggtcaactccttgctcaacacagcgcagcagctgaagacgctgtttgagcaagccaagcatgccagcacctaccgagaagctgccacaaaccaggccaagatccacgctgacgcagagcggaaggagcagtcctgcgttaactgcggccgggaggctatgagcgagtgcaccggctgccacaaggtcaactactgctccaccttctgccaacgcaaggactggaaggatcaccagcacatatgcggccagtcagcagctgtcaccgtccaggcagacgaagtccacgtggctgaaagcgtgatggagaaggtgaccgtgtgaggctccatcggccgccctgggagctggggcccctcgcactcctgtgaggcttttgcaggtcgaaggcccccctgaggactctggggggacgttgagaagaggggtgtgggaaggtaaagaaacttgctggacaagtcattaacacactttaagcgaatggtgccctgggaagcgcactccccctgcccgggccccctgcccgctcgcggacagattttttatccctgggatcatgagcgtccggtcttgcccacagggcctgtgctgcgacgcacatacatacgtgttgtgtctgtcaataaagtgtaaataaggtc

SEQ ID NO: 207031 - DNA, 1698 bp, Artificial Sequence
  derived and/or modified sequence
atggaggacagcgacagcgccgccaagcagctgggcctggccgaggcagctgctgtggccgctgcagccgcggttgcagcagctgccgccgctgcagctggaggtgaggcagaggagcccgttttgagtagggatgaggacagtgaagaggatgctgacagcgaggcggagcgagaaacgcctcgtgtcactgccgtggccgtgatggcggctgagccggggcacatggatatgggagccgaggctctgcccggaccagatgaagccgccgctgcagccgcttttgcggaggttaccacagtgacagtagcaaatgtgggggccgcagccgacaacgtctttacaaccagcgtggcaaacgcagcgtcaattagtggtcatgtgcttagtgggcgcactgctcttcaaatcggagacagtctaaacacagagaaagcaacactgatcgtagtgcacactgacgggtccattgtggagacgacaggcctgaagggacccgccgctccactgacacccggtcctcagtcacctcccactccgcttgcccctgggcaagaaaagggagggaccaagtataactgggaccctagcgtttatgactccgaactcccagtccggtgcaggaatatttcaggtactttgtacaagaataggctgggctcggggggccgagggagatgcatcaaacaaggggagaattggtactcgccaacagagtttgaggccatggcagggagagcttcctctaaggactggaagagatctattaggtacgctggaagaccactgcagtgcctcattcaggatggaattctcaaccctcatgccgcctcatgcacctgcgccgcatgttgtgacgacatgactctgagcgggccggttcgactgtttgttccgtacaagcgcagaaagaaagagaatgaactgcctacaacacctgtgaaaaaagatagtccaaaaaacataacgctgctgcccgctaccgccgccacaacttttaccgttactccgtccggtcaaatcaccaccagcggggccctgacatttgatcgggctagtaccgttgaagccaccgccgtgatatccgagagccccgcacagggggacgtgtttgccggcgccactgtgcaggaggcgtccgtgcagcccccatgtcgggcttcacaccccgaacctcattatccagggtaccaagattcctgtcagattgccccgttcccagaagctgctctccccacgtcccatcctaagatcgtgctgacctctctacccgctctggccgtccccccacccacaccaacaaaggccgcgcctcccgccctggttaacggcctggagctgtcagagccacgcagctggctatatttggaagagatggtgaactccttactcaataccgctcaacagctcaaaactctgttcgagcaggccaagcatgcttccacttatagagaagctgcaactaaccaggccaaaatccacgccgacgccgagaggaaggaacaatcatgtgtgaactgtggccgggaagccatgtcagagtgcaccgggtgccacaaggttaactattgcagtaccttctgtcagcggaaagactggaaggatcatcagcatatttgtggacaatcagcagcagtgacagtacaagcagacgaggttcatgtggcagagagtgtgatggaaaaagtcaccgtgtag

SEQ ID NO: 207032 - DNA, 1455 bp, Artificial Sequence
  derived and/or modified sequence
atgggcgccgaggccctgcccggccccgacgaggccgccgccgccgctgctttcgccgaggtaactactgtgaccgttgcgaatgttggagctgcagcagataacgtgttcactacttcagtggccaacgcagcaagcatcagcgggcatgtgctaagtggcaggaccgcactacagataggcgattccctcaatacagagaaggctaccctgattgtagtccatacggacggatcgattgttgagaccaccgggctgaaaggccccgccgcacccttgaccccaggcccccaaagccccccgacacccctcgctcctggccaagagaaaggcggcacaaaatacaattgggacccttcagtgtatgactctgagttgcccgtgcgctgtcgcaacatttcaggcaccctgtacaagaaccggctcggctcggggggccgcggacgctgtataaaacagggagaaaactggtattcgcccacagagttcgaggctatggccgggcgcgcttcctctaaagattggaagcggagcatacgctacgccggcagaccgctacaatgccttattcaggacggcattctgaacccgcacgcggctagctgtacatgcgccgcatgttgtgacgacatgacactcagtggaccggttcgtcttttcgtgccctacaaacggcggaagaaagaaaacgagctaccaacgaccccagtcaagaaagacagccccaagaatattaccctgctgccggctacagccgccacaaccttcactgtgaccccgtctggtcagattacaacgagcggagccctaacctttgatcgagcatccaccgtcgaagccactgctgtcatttcagagtcacctgcccagggggatgtgtttgcaggggccactgtgcaggaagcctctgtgcagccaccttgccgggcctctcatcctgagccgcactaccccggataccaggattcatgccagatcgccccttttccagaggcggcccttccaacatcccatccaaagattgtcctcacgtcactgcccgcattagccgtgccgcctcctactcctacaaaagctgcccccccagcgctcgtgaacgggctggaactaagtgaacctcgcagttggctgtatttagaggagatggtgaattccttattaaacacagcgcagcagctcaagactctatttgagcaggctaagcatgcctcaacctatcgagaagcagctactaatcaagctaagatacacgctgacgctgaaagaaaggagcagagttgtgtgaactgcggcagggaagcaatgagcgaatgcactggctgccacaaagtgaactattgcagcactttttgtcagagaaaaaggtggtcattgaccatgctcacaagtctggtctccatttcttggcttcgagctatcttaccgtgtcaaccaccaaaggtgcttggcctctag

SEQ ID NO: 207033 - DNA, 1801 bp, Artificial Sequence
  derived and/or modified sequence
cttcgggcggcctcggcccagctcgggcgtcctcttcgggccccgcttcgggctccgcgaccggcgcttcgggcggtcccggacggcgccttcgggaaggctcggcggagtccggatggaggactcggactcggcggcaaagcagctgggcctggctgaggcggcggcggtggcggccgcggccgctgtggcggcggcggccgcggccgcggcaggaggcgaggcggaggagccggtgctgagcagggacgaggactcggaggaggacgcagactcggaggcggagcgggagacgccgcgggtcacggcagtggcggtgatggcggcggagcccgggcacatggacatgggcgccgaggccctgcccggccccgacgaggccgccgctgccgcagccttcgcagaggtgaccacagtgacagtggccaacgtgggggctgctgcagacaatgtcttcaccacgtctgtggcgaacgcggcatccatctcaggacatgttctgtctggtaggacggcccttcagatcggggacagcctgaacaccgaaaaagcgacactgattgtcgtccacacagatgggagcatcgtggagaccaccgggctgaaaggcccggcagctcccctcaccccaggtcctcagtctcctccaacccctctggctcccggccaagaaaaaggtggaactaaatacaactgggacccttctgtgtacgacagtgagctgcccgtacggtgccggaacatcagcggcactctgtacaagaacaggctcggctcaggcggccggggacggtgcatcaagcagggggagaactggtacagtcccaccgagtttgaggccatggcaggaagagccagcagtaaggactggaaaagaagcattcgctacgcgggccgacccttgcagtgcctcatccaggatgggatcttaaaccctcacgctgcctcttgcacctgtgctgcctgctgcgacgacatgaccttaagtggcccagtcaggctttttgtgccttacaaaaggcgcaagaaggagaatgaactgcccacaactcccgtgaagaaggactcccccaagaacatcacattgcttccagccaccgcggctaccaccttcaccgtgaccccctcgggacagatcacgacctcgggggcactgacctttgaccgagcgtccacggtagaggccactgctgtcatatcagagagtccggcccagggcgacgtcttcgcaggggccacagtccaagaggccagcgtgcagcccccatgcagggccagccaccctgagcctcactaccccggctatcaggacagctgccagatcgcaccgtttccagaagctgcgttgccaacgtcacatcccaaaatagtgttgacatccctgcctgcgctggcggtcccacccccgactcccaccaaagcggcacctcccgcgttggtcaatgggctggagctgtcagagccgcggagctggctgtacctagaagagatggtcaactccttgctcaacacagcgcagcagctgaagacgctgtttgagcaagccaagcatgccagcacctaccgagaagctgccacaaaccaggccaagatccacgctgacgcagagcggaaggagcagtcctgcgttaactgcggccgggaggctatgagcgagtgcaccggctgccacaaggtcaactactgctccaccttctgccaacgcaagagatggagtcttactatgttgaccagcctggtctccatctcctggcttcgggcgatcctcccatgtcagcctcccaaagtgctaggattatag

SEQ ID NO: 207034 - DNA, 1050 bp, Artificial Sequence
  derived and/or modified sequence
tgactgtacaagaaccggctgggcagcggcggccggggccggtgcattaagcagggagagaactggtactccccaacggagttcgaagcgatggcgggacgggctagttctaaagattggaaacggtccattcgctatgccgggcggcctttacaatgtctcattcaggatgggatcctcaatccccacgcagccagttgcacttgcgccgcttgttgtgatgatatgactctcagcgggcctgtacggctgtttgtgccatacaaacggagaaaaaaggagaacgagctccccaccactccagtgaaaaaggacagccctaagaatattacattactgccagccacagccgctactactttcacagtcaccccaagtggccagattacaacgagtggggctctgaccttcgatagggcatctacagtggaggccaccgcagtcatcagcgaaagccctgcgcagggggacgtgtttgcgggcgcaacagtgcaggaagcctctgtgcagcctccctgcagggccagtcacccggagccccactacccaggataccaagatagttgccaaatcgcacccttccccgaggccgctttaccaacctcgcatcctaaaatcgtcctcactagtctcccagccttggctgtccctccacccacccccacgaaagcagctccgccagccttagtgaacgggctcgagctgagcgaacctcggtcatggctttacctagaggagatggtgaactcattgttgaatactgcgcagcaattaaaaacactctttgagcaggccaagcacgcctctacatacagggaagcggccaccaaccaagcgaaaatccatgccgacgcagaaaggaaagaacagagttgcgtcaactgcggacgcgaagccatgagtgagtgcactggatgccataaggtgaattattgttccaccttttgccagcgtaagcgctggtcccttaccatgctcacctctctggtcagcatctcctggctaagggctattctgccatgccaaccgcccaaggttcttggtctatag

SEQ ID NO: 207035 - RNA, 1656 nt, Artificial Sequence
  derived and/or modified sequence
auggaggauagugauucugcagccaaacaacugggguuagcggaggccgcugccgcaggaggcgaggccgaagaaccugugcugucccgugacgaagauagugaggaagacgcagacuccgaagcugagcgugagaccccccgcguuaccgcaguugcggucauggcugccgagccuggacauauggacaugggcgcugaagcccucccagguccugaugaagcugcugcagccgccgcuuuugcugaaguuacaacagucacaguggcgaaugugggggccgccgcagacaacguuuuuacuacuucugucgcuaaugcagccuccaucagcggucacgucuugucugggcgcaccgcccugcaaauuggagauaguuugaauaccgagaaggcaacccucauagucguucauacagauggauccauuguugaaaccaccggacugaaggguccggcagcccccuugacaccaggaccucagucaccccccacaccccuggccccaggacaggagaaaggcgggaccaaauauaauugggacccuucgguuuaugauucagaacugccuguccgaugcagaaacaucaguggaacccuuuacaagaaucgccugggaucaggcggccgcggaagauguaucaaacagggugaaaacugguauuccccaacugaguucgaggcaauggcugggagagcaagcaguaaggacuggaaacguucuauccguuacgccgggaggccucugcaaugccugauccaggacggaauacuuaauccccacgcugcaaguugcacaugugccgccugcugcgacgacaugacccuauccgggccaguuagacuguuuguaccuuacaagcggaggaagaaagaaaacgaacugccaaccaccccggucaaaaaggacucacccaaaaacaucacucugcuaccagcaacagcugcuacgacauuuacugugacuccuucaggccagaucacaaccucuggggccuugacauuugaucgugccucaacaguugaagcaaccgcgguaaucagcgaaucuccugcucagggggacguguuugcaggugccacagugcaagaggcuucuguucagccuccaugucgggcuucacaucccgagccucacuacccuggauaccaagacagcugccagauugcccccuucccugaagcggcccugcccacuucccauccaaaaaucgugcuaacaagccuaccugcccuagcaguucccccuccuacaccaaccaaagcggcucccccagcccuggucaacggccuggagcuuagcgaaccacguucuuggcuuuaccucgaggagauggugaauagccuguugaauacggcucagcagcugaagacucuauuugagcaagcuaagcaugcaucaaccuauagagaggccgccaccaaccaagccaagauucaugcagacgcagagagaaaagagcagucaugugucaacuguggaagggaagcaaugagcgaaugcaccggaugccacaaaguaaauuacugcuccaccuuuugucagcgaaaggauuggaaggaccaccagcacaucugcggccagucggcugccgugaccguucaggcugaugaagugcacguggcagaguccgugauggagaaggucaccgucuag

SEQ ID NO: 207036 - RNA, 1698 nt, Artificial Sequence
  derived and/or modified sequence
auggaagacagcgauagcgcagccaaacagcugggccuggccgaagcagcugcuguggcagcugccgcagccguggccgcggccgcugcagcugccgccgguggcgaagccgaggaaccagugcuguccagggacgaggacagcgaggaagaugcagauucugaagcugagcgagagaccccacggguuacagccguggccguaauggccgccgaaccaggccacauggauaugggcgcggaggcucugccuggaccugacgaagccgcugccgccgccgcuuuugcugaagugacgaccgucacagucgccaacguaggagcugcagcugacaacguauuuacaaccucaguggccaaugcugcaagcaucaguggacacguucuuucuggcaggaccgcccuacagauuggcgauucccuuaacacugaaaaggccacccuuaucgugguccauacggaugguaguauuguagaaacaaccggccuaaagggaccagccgccccucucacccccgguccucagucuccacccacaccccuugccccuggucaggaaaaaggcgggaccaaguauaacugggaucccuccguauaugauagcgaacuaccaguccgaugcagaaauaucuccggaacacuguacaaaaauagacucgggucagggggacgcggccgauguauaaagcagggcgaaaauugguauaguccaaccgaguucgaagcaauggcaggcagggcuagcucaaaggacuggaagcgcagcauuagguacgcaggcagaccucugcagugcuugauccaggacgguauccugaauccccacgccgccucaugcaccugcgccgcauguugcgacgacaugaccuuguccggaccagucagguuguucgugccauacaaaaggcgaaagaaagaaaacgagcugcccacuaccccugugaaaaaagauagucccaaaaacauuacucugcuaccugcuacggcagcaacaacauuuacugugacaccauccgggcagauuaccaccuccggcgcucucaccuucgaccgcgcuuccaccguggaggcuacagcagugauuuccgaaagcccugcgcaaggcgauguguuugccggagccaccgugcaagaggcaagcgugcaacccccuuguagagccagccacccugaaccucauuacccuggguaucaggacucaugucagauugccccuuucccagaagccgcacugcccaccagucaccccaaaauuguguugaccucucugccagcgcuugcugucccaccaccaacacccacaaaggcagcccccccagcccuagucaacggucucgaacuaucggaaccccgaucuuggcucuaucuggaggaaauggugaauucccuuuuaaauaccgcgcagcagcugaagacgcucuuugaacaggccaagcaugccagcacauacagagaggcggccacgaaucaggcuaaaauucaugcugaugcagaacgaaaagaacaaagcugugugaauuguggacgggaggcuaugagcgagugcacagguugucauaaaguuaauuacuguagcaccuuuugucaaaggaaagacuggaaggaccaucagcacauuugcggccagagcgcagcagugacagugcaggccgacgaaguccacgucgcagaguccguuauggaaaagguaacuguguag

SEQ ID NO: 207037 - RNA, 1455 nt, Artificial Sequence
  derived and/or modified sequence
augggcgccgaggcccugcccgguccugacgaggcugcugccgccgccgcguuugccgagguuacaaccgucaccgucgcgaacgucggugccgccgcggauaacguguuuacgaccucgguggccaaugccgcauccauuaguggacauguguugagugggaggaccgcccugcaaauaggugauagccuuaacacugaaaaagccacucuuaucguagugcacacugacggaaguauuguggaaaccacuggcuuaaaggggccagcugccccucugacucccggcccccaauccccuccuacaccccuggcaccuggacaggaaaaaggcgguacaaaguacaacugggaccccuccguguacgauucagaauugccaguccggugucguaacauuucagggacauuauacaaaaauaggcucggauccggaggacggggucgaugcauuaagcagggagaaaacugguacuccccaaccgaauuugaagccauggccggccgcgccucaucuaaagacuggaagcgaaguauuagguaugcugggaggccacugcaaugucucauucaggauggcauccuaaauccacaugcugcuagcugcacuugcgccgcuuguugcgaugauaugacccuaagugguccuguccgacuguuugugccuuacaagagacggaagaaggagaacgagcuuccuaccacgcccguaaagaaagauucgcccaaaaacauaacguuacugccugccacugccgccacuacuuuuacuguuaccccaucgggacaaauaacuacuaguggcgccuugaccuuugacagggcuagcaccguggaggccaccgccgugauuagcgagucccccgcucagggagauguuuucgcuggagcuacuguccaagaagccucggugcagccuccgugucgggcaagccaucccgagccucacuaccccggauaucaggacagcugccagaucgccccuuuuccugaagccgcucugccgaccagucauccuaagaucgucuugacaagccucccugccuuggccguaccccccccuacgccaacaaaagccgcuccacccgcacugguaaauggacuagaguugagcgaaccucgguccuggcucuaccuggaggagauggugaauucacugcuuaauacugcccagcagcugaaaacccuguuugagcaggccaagcacgccuccacuuaccgcgaggccgcuacaaaccaggcaaaaauccaugcugaugccgagagaaaggagcagaguugcgugaauugcggccgcgaagccauguccgaaugcaccggaugccauaagguaaacuacugcagcaccuucugccagaggaagcgguggucccugacgaugcugacgagucuggucucuauuucuuggcugcgcgcuauccugccuugccagccccccaaaguucuuggucuguag

SEQ ID NO: 207038 - RNA, 1050 nt, Artificial Sequence
  derived and/or modified sequence
ugacucuauaagaaccgcuuggggucuggcggucgcggccgaugcaucaagcagggagaaaauugguauucuccaacggaauuugaagcuauggccggccgugcaucaucaaaagacuggaagagauccauaagguaugcugguaggcccuuacagugccucauccaggacggcauucuaaacccccacgccgccagcuguacaugugcugcaugcugcgaugauaugacucuguccggcccggugagauuauuugugccguauaagaggcguaaaaaggagaaugaguuaccaaccaccccugugaagaaggacuccccuaagaauaucacucuucuccccgccacugccgcuacaaccuucacuguaacaccaaguggccagauuacaaccuccggagcccucaccuucgaccgcgccagcacaguugaagcaacagccgugauuuccgagucuccagcccagggggaugucuucgcaggcgcaacagugcaagaggccagcgugcagcccccaugcagggcaagucaucccgagccccauuaccccggauaccaggauucuugucagauagcucccuuuccugaagcugcgcugcccacgagccaccccaagauugugcucaccucccuucccgcguuagccguaccaccccccacaccaacaaaggcagcgccaccugcccucgugaacggcuuggagcuuagcgagccucgauccuggcuguaucucgaagaaauggugaacucccugcucaauacugcucaacagcugaagacacuguuugagcaagcuaaacacgcaaguaccuauagagaagccgcaacgaaccaagcuaagauccacgcugacgcagaaagaaaggaacagagcugcguaaacugcgggcgagaggcaaugagcgaaugcacugguugccacaaggugaacuacuguagcaccuucugucagcgcaaaagguggucucuuacgaugcucacuucgcuagucucaauuucauggcuucgcgcgauuuugccuugccaaccuccaaagguccuagggcuguag

SEQ ID NO: 207039 - RNA, 1656 nt, Artificial Sequence
  derived and/or modified sequence
auggaggacucugauuccgcagcgaagcagcuaggccucgcagaagcugccgccgccggcggagaggcagaggaacccgugcucagccgagaugaagauucugaggaagacgcugauuccgaagcugaaagagagacaccacguguuacggcuguugcaguuauggccgcagagccaggccacauggauaugggggcugaagcccuuccuggucccgacgaggccgccgccgccgcugccuucgccgaggugaccaccgugacuguagcaaaugugggagcagccgcagauaacguauuuacaaccuccguggcuaaugccgcguccaucagcggccacguucugucuggccgcaccgcccugcagauuggagacucguugaauacugaaaaggccacucuuaucgugguucacacugacgguuccauagucgagacaacuggccugaagggaccugcugccccacugacucccggaccacagagcccaccuaccccacucgccccuggacaagaaaaaggcggaacuaaauauaacugggauccauccguuuaugauuccgaacugcccgugcgcugccgcaacauaucagggacccuguacaaaaaucgacuugguucgggcggaagggggagauguauaaagcagggagagaacugguauucaccuacagaguuugaggccauggccggaagagccuccucuaaggacuggaaacgaagcaucagauacgcuggaaggccccugcagugccugauccaggauggaauucucaauccccacgcagcuuccugcacuugugcugcguguugugaugacaugacucucaguggcccaguacgacuuuuuguuccauacaagcgaagaaagaaagagaaugaguuaccaaccacgccagugaaaaaagauaguccaaaaaauauaacucugcucccagcuacagccgccaccaccuuuacugucacccccucuggacaaaucaccacguccggcgcccugaccuuugaccgcgcuucuaccguugaggccacagccgucauauccgaaucgccugcccaaggagauguguucgccggggcgaccguacaggaagccagcgugcagcccccaugucgggccucacacccagaaccccauuauccagguuaccaggacuccugccaaauugccccuuuuccagaagccgcacugccaacaucccacccuaagauaguacugaccucguugcccgcccuugcagugccaccccccaccccuacaaaagcagcccccccagcccuagucaacggacuggaauugagugaaccgagaucguggcucuacuuggaagaaaugguuaauucucuccuuaauacugcucaacagcucaagacucuguucgaacaggcuaagcaugcaucgacuuacagggaggccgccacaaaucaggcuaaaauucacgcagacgccgaacggaaggaacaguccuguguaaacuguggccgcgaggccaugucagaguguaccggaugucacaaggugaauuacugcagcacauuuugucaaagaaaagauuggaaggaccaucagcacaucugugggcaguccgccgccgucacuguucaagccgacgaaguccacguagccgaguccguuauggaaaaggugacaguguag

SEQ ID NO: 207040 - RNA, 1698 nt, Artificial Sequence
  derived and/or modified sequence
auggaggauuccgacucggcagccaagcagcugggacuggcggaggcugcugccguggccgccgccgcugcgguugccgcugccgccgccgccgccgccggaggagaagccgaagaacccgugcuuucgcgcgaugaggacuccgaagaagacgcugacagcgaagccgagagagaaacaccgaggguaaccgccguggcaguuauggccgcugaaccagggcauauggacaugggagcugaagccuugccaggaccggacgaggcagccgccgccgccgcuuucgccgaagucacaacugucacagucgccaacguaggagcugcagcugacaacguauuuacaaccucaguggccaaugcugcaagcaucaguggacacguucuuucuggcaggaccgcccuacagauuggcgauucccuuaacacugaaaaggccacccuuaucgugguccauacggaugguaguauuguagaaacaaccggccuaaagggaccagccgccccucucacccccgguccucagucuccacccacaccccuugccccuggucaggaaaaaggcgggaccaaguauaacugggaucccuccguauaugauuccgaguuaccuguucguugucggaauaucagcggaacacucuauaaaaaccgguuaggaagcggggggcgugguaggugcauuaaacagggugagaauugguacagccccacggaguucgaagcuauggcagggagggcuagcucaaaagacuggaagaggucaauccgcuaugccggccguccauuacaaugccuaauccaagauggcauauuaaauccccacgcugcuucuugcaccugcgcugcaugcugcgacgauaugacccuaucaggcccagugagacuuuucguaccuuauaaaagacgcaagaaagaaaacgaguuaccaaccacacccgugaaaaaggauagcccuaaaaacaucacccuccugccagcgaccgcagcuacaacauuuaccgucacccccucuggucagaucacuacuagcggcgcccuaacuuucgauagagcaaguaccguagaggcgacugccguuaucuccgaaucucccgcgcaaggugaugucuuugccggcgcuacagugcaagaggcuagcguccagccacccugccgugcuucccaccccgaaccacauuacccuggauaucaggacaguugucagauagcuccguucccggaggccgcucugccaacaucacacccaaagauuguccugacgucccuucccgcccuggcuguacccccccccacaccaaccaaagcagccccaccugcccuuguaaauggacuggaacuguccgagccacgaucuugguuauaucucgaagagaugguaaauuccuuguuaaauacugcacaacaacucaaaacccuuuucgagcaggcuaagcaugcguccacuuauagagaagcagccacuaaccaagccaaaauccacgccgacgccgaaagaaaagaacagaguuguguuaauuguggaagggaggcaaugucagagugcaccgguugucacaaaguaaacuauuguaguacauuuugccagagaaaagacuggaaggaccaucaacauaucuguggccaaagcgcugcuguuaccgugcaagcagaugaaguucauguggcugaguccgugauggagaaagugacaguguag

SEQ ID NO: 207041 - RNA, 1455 nt, Artificial Sequence
  derived and/or modified sequence
augggcgcagaggcccugccuggaccagacgaggcugccgcagcugcugccuuugccgaggugaccaccgucaccguagcuaacgucggagccgcagccgauaauguuuuuacuacaucagucgcaaaugcugcuuccaucucuggacaugugcucucgggaaggacagcucuccagauuggugacagucugaacaccgagaaggcaacccucauaguagugcacaccgacggcuccaucguugagaccacaggacuaaaggguccagccgcaccacucacacccggaccacagucaccaccuacaccccuggcaccuggacaggaaaaaggcgguacaaaguacaacugggaccccuccguguacgauucagaauugccaguccggugucguaacauuucagggacauuauacaaaaauaggcucggauccggaggacggggucgaugcauuaagcagggagaaaacugguacuccccaaccgaauuugaagccauggccggccgcgccucaucuaaagacuggaagcgaaguauuagguaugcugggaggccacugcaaugucucauucaggauggcauccuaaauccacaugcugcuucuugcaccugcgcugccuguugcgacgauaugacccugucaggcccuguuaggcuguucgugccuuacaagagacgcaaaaaggaaaaugagcugccuacaacaccugugaaaaaagauaguccuaaaaauauaacucugcuccccgcaacagccgcuacuacuuuuacaguuacgcccucuggacagauuaccacuucaggcgcucuuacuuuugaucgcgcguccacgguugaggccacagcaguaauaucugaaucaccugcccaaggggacguuuuugccggggcuacaguccaggaggcauccguucagccgcccugucgagcgucccauccugaaccgcacuaccccggcuaccaagauucaugucaaaucgcuccauucccugaggccgcucugccuaccucucacccaaagauugugcuuacaagcuuaccagcucucgccguccccccuccaaccccaacaaaggcugcuccaccugcccucguuaacgguuuagaacuuagcgagccacgcuccuggcucuaucucgaggaaauggugaacuccuugcucaacacugcucaacaacucaaaacauuguuugaacaggccaaacaugcuucaaccuacagggaagccgccacuaaucaagccaaaauccacgcugacgccgagcgcaaagaacaaucuugugugaacugcggcagagaggccaugagcgaguguacaggcugucacaagguuaauuacuguuccacauuuugccagagaaaaagguggagucuuacuauguuaacgucccucgugucuauaaguugguuaagggccaucuuaccaugccagccacccaagguccucgggcuguag

SEQ ID NO: 207042 - RNA, 1050 nt, Artificial Sequence
  derived and/or modified sequence
ugacuguacaaaaaucgcuugggauccggaggcaggggaagauguaucaagcaaggggagaauugguacucgcccacagaauucgaggcaauggcaggacgcgcauccucuaaagauuggaaacgcucuauccgcuacgcaggaagaccacuacagugccugauccaggacggaauacuuaacccacacgcugcuaguugcaccugugcagccugcugugacgauaugacauuauccggcccugugaggcuguucgucccuuacaagcgaaggaagaaggagaacgaacuccccaccacaccagucaagaaagacucaccaaaaaacaucacccuccucccugcuacugccgcgacgacuuucaccguaaccccaaguggccaaaucaccacaagcggagcucugacguucgaccgcgcaucuaccgucgaggcaacagccguaaucagugagaguccagcccagggcgacgucuucgccggagcaacuguccaggaagcaucagugcagccuccgugcagagcgucacacccagaaccccacuaccccggauaucaggacagcugccagauagcaccuuucccagaagcugcccuccccacaagucaccccaaaauaguccugaccucacucccagcccuugccguuccacccccaacacccaccaaagcugcaccuccugcacugguuaacggccuagaacucucugagccccgcuccuggcuguaucuggaagaaauggugaacucucugcugaacacagcccagcaacucaaaacccuguuugagcaagcuaagcacgcgagcacuuaccgagaagccgccacaaaucaggcuaagauacaugcugacgccgaacggaaagagcagagcugcgugaauuguggaagagaagcaaugucugaaugcacagguugucauaaggucaacuauuguucaaccuuuugucaaagaaaaagauggucacugacuaugcugacuucucucgugucuauuucauggcuccgcgcuauccugccuugccaaccgccaaaaguguuaggucucuag

SEQ ID NO: 207043 - protein, 685 aa, Artificial Sequence
  derived and/or modified sequence
MQIFVKTLTGKTITLEVEPSDTIENVKAKIQDKEGIPPDQQRLIFAGKQLEDGRTLSDYNIQKESTLHLVLRLRGGMQIFVKTLTGKTITLEVEPSDTIENVKAKIQDKEGIPPDQQRLIFAGKQLEDGRTLSDYNIQKESTLHLVLRLRGGMQIFVKTLTGKTITLEVEPSDTIENVKAKIQDKEGIPSDQQRLIFAGKQLEDGRTLSDYNIQKESTLHLVLRLRGGMQIFVKTLTGKTITLEVEPSDTIENVKAKIQDKEGIPPDQQRLIFAGKQLEDGRTLSDYNIQKESTLHLVLRLRGGMQIFVKTLTGKTITLEVEPSDTIENVKAKIQDKEGIPPDQQRLIFAGKQLEDGRTLSDYNIQKESTLHLVLRLRGGMQIFVKTLTGKTITLEVEPSDTIENVKAKIQDKEGIPPDQQRLIFAGKQLEDGRTLSDYNIQKESTLHLVLRLRGGMQIFVKTLTGKTITLEVEPSDTIENVKAKIQDKEGIPPDQQRLIFAGKQLEDGRTLSDYNIQKESTLHLVLRLRGGMQIFVKTLTGKTITLEVEPSDTIENVKAKIQDKEGIPPDQQRLIFAGKQLEDGRTLSDYNIQKESTLHLVLRLRGGMQIFVKTLTGKTITLEVEPSDTIENVKAKIQDKEGIPPDQQRLIFAGKQLEDGRTLSDYNIQKESTLHLVLRLRGGV

SEQ ID NO: 207044 - protein, 161 aa, Artificial Sequence
  derived and/or modified sequence
MQIFVKTLTGKTITLEVEPSDTIENVKAKIQDKEGIPPDQQRLIFAGKQLEDGRTLSDYNIQKESTLHLVLRLRGGMQIFVKTLTGKTITLEVEPSDTIENVKAKIQDKEGIPPDQQRLIFAGKQLEDGRTLSDYNIQKESTLHLVLRLRGGMQIFVKTLT

SEQ ID NO: 207045 - protein, 609 aa, Artificial Sequence
  derived and/or modified sequence
MQIFVKTLTGKTITLEVEPSDTIENVKAKIQDKEGIPPDQQRLIFAGKQLEDGRTLSDYNIQKESTLHLVLRLRGGMQIFVKTLTGKTITLEVEPSDTIENVKAKIQDKEGIPSDQQRLIFAGKQLEDGRTLSDYNIQKESTLHLVLRLRGGMQIFVKTLTGKTITLEVEPSDTIENVKAKIQDKEGIPPDQQRLIFAGKQLEDGRTLSDYNIQKESTLHLVLRLRGGMQIFVKTLTGKTITLEVEPSDTIENVKAKIQDKEGIPPDQQRLIFAGKQLEDGRTLSDYNIQKESTLHLVLRLRGGMQIFVKTLTGKTITLEVEPSDTIENVKAKIQDKEGIPPDQQRLIFAGKQLEDGRTLSDYNIQKESTLHLVLRLRGGMQIFVKTLTGKTITLEVEPSDTIENVKAKIQDKEGIPPDQQRLIFAGKQLEDGRTLSDYNIQKESTLHLVLRLRGGMQIFVKTLTGKTITLEVEPSDTIENVKAKIQDKEGIPPDQQRLIFAGKQLEDGRTLSDYNIQKESTLHLVLRLRGGMQIFVKTLTGKTITLEVEPSDTIENVKAKIQDKEGIPPDQQRLIFAGKQLEDGRTLSDYNIQKESTLHLVLRLRGGV

SEQ ID NO: 207046 - protein, 136 aa, Artificial Sequence
  derived and/or modified sequence
MQIFVKTLTGKTITLEVEPSDTIENVKAKIQDKEGIPPDQQRLIFAGKQLEDGRTLSDYNIQKESTLHLVLRLRGGMQIFVKTLTGKTITLEVEPSDTIENVKAKIQDKEGIPPDQQRLIFAGKQLEDGRTLSDYN

SEQ ID NO: 207047 - DNA, 2058 bp, Artificial Sequence
  derived and/or modified sequence
atgcagatcttcgtgaagaccctgaccggcaagaccatcaccctggaggtggagcccagcgacaccatcgagaacgtgaaggccaagatccaggacaaggagggcatcccccccgaccagcagagactgatcttcgccggcaagcagctggaggacggcagaaccctgagcgactacaacatccagaaggagagcaccctgcacctggtgctgagactgagaggcggcatgcagatcttcgtgaagaccctgaccggcaagaccatcaccctggaggtggagcccagcgacaccatcgagaacgtgaaggccaagatccaggacaaggagggcatcccccccgaccagcagagactgatcttcgccggcaagcagctggaggacggcagaaccctgagcgactacaacatccagaaggagagcaccctgcacctggtgctgagactgagaggcggcatgcagatcttcgtgaagaccctgaccggcaagaccatcaccctggaggtggagcccagcgacaccatcgagaacgtgaaggccaagatccaggacaaggagggcatccccagcgaccagcagagactgatcttcgccggcaagcagctggaggacggcagaaccctgagcgactacaacatccagaaggagagcaccctgcacctggtgctgagactgagaggcggcatgcagatcttcgtgaagaccctgaccggcaagaccatcaccctggaggtggagcccagcgacaccatcgagaacgtgaaggccaagatccaggacaaggagggcatcccccccgaccagcagagactgatcttcgccggcaagcagctggaggacggcagaaccctgagcgactacaacatccagaaggagagcaccctgcacctggtgctgagactgagaggcggcatgcagatcttcgtgaagaccctgaccggcaagaccatcaccctggaggtggagcccagcgacaccatcgagaacgtgaaggccaagatccaggacaaggagggcatcccccccgaccagcagagactgatcttcgccggcaagcagctggaggacggcagaaccctgagcgactacaacatccagaaggagagcaccctgcacctggtgctgagactgagaggcggcatgcagatcttcgtgaagaccctgaccggcaagaccatcaccctggaggtggagcccagcgacaccatcgagaacgtgaaggccaagatccaggacaaggagggcatcccccccgaccagcagagactgatcttcgccggcaagcagctggaggacggcagaaccctgagcgactacaacatccagaaggagagcaccctgcacctggtgctgagactgagaggcggcatgcagatcttcgtgaagaccctgaccggcaagaccatcaccctggaggtggagcccagcgacaccatcgagaacgtgaaggccaagatccaggacaaggagggcatcccccccgaccagcagagactgatcttcgccggcaagcagctggaggacggcagaaccctgagcgactacaacatccagaaggagagcaccctgcacctggtgctgagactgagaggcggcatgcagatcttcgtgaagaccctgaccggcaagaccatcaccctggaggtggagcccagcgacaccatcgagaacgtgaaggccaagatccaggacaaggagggcatcccccccgaccagcagagactgatcttcgccggcaagcagctggaggacggcagaaccctgagcgactacaacatccagaaggagagcaccctgcacctggtgctgagactgagaggcggcatgcagatcttcgtgaagaccctgaccggcaagaccatcaccctggaggtggagcccagcgacaccatcgagaacgtgaaggccaagatccaggacaaggagggcatcccccccgaccagcagagactgatcttcgccggcaagcagctggaggacggcagaaccctgagcgactacaacatccagaaggagagcaccctgcacctggtgctgagactgagaggcggcgtgtag

SEQ ID NO: 207048 - DNA, 1830 bp, Artificial Sequence
  derived and/or modified sequence
atgcagatcttcgtgaagaccctgaccggcaagaccatcaccctggaggtggagcccagcgacaccatcgagaacgtgaaggccaagatccaggacaaggagggcatcccccccgaccagcagagactgatcttcgccggcaagcagctggaggacggcagaaccctgagcgactacaacatccagaaggagagcaccctgcacctggtgctgagactgagaggcggcatgcagatcttcgtgaagaccctgaccggcaagaccatcaccctggaggtggagcccagcgacaccatcgagaacgtgaaggccaagatccaggacaaggagggcatccccagcgaccagcagagactgatcttcgccggcaagcagctggaggacggcagaaccctgagcgactacaacatccagaaggagagcaccctgcacctggtgctgagactgagaggcggcatgcagatcttcgtgaagaccctgaccggcaagaccatcaccctggaggtggagcccagcgacaccatcgagaacgtgaaggccaagatccaggacaaggagggcatcccccccgaccagcagagactgatcttcgccggcaagcagctggaggacggcagaaccctgagcgactacaacatccagaaggagagcaccctgcacctggtgctgagactgagaggcggcatgcagatcttcgtgaagaccctgaccggcaagaccatcaccctggaggtggagcccagcgacaccatcgagaacgtgaaggccaagatccaggacaaggagggcatcccccccgaccagcagagactgatcttcgccggcaagcagctggaggacggcagaaccctgagcgactacaacatccagaaggagagcaccctgcacctggtgctgagactgagaggcggcatgcagatcttcgtgaagaccctgaccggcaagaccatcaccctggaggtggagcccagcgacaccatcgagaacgtgaaggccaagatccaggacaaggagggcatcccccccgaccagcagagactgatcttcgccggcaagcagctggaggacggcagaaccctgagcgactacaacatccagaaggagagcaccctgcacctggtgctgagactgagaggcggcatgcagatcttcgtgaagaccctgaccggcaagaccatcaccctggaggtggagcccagcgacaccatcgagaacgtgaaggccaagatccaggacaaggagggcatcccccccgaccagcagagactgatcttcgccggcaagcagctggaggacggcagaaccctgagcgactacaacatccagaaggagagcaccctgcacctggtgctgagactgagaggcggcatgcagatcttcgtgaagaccctgaccggcaagaccatcaccctggaggtggagcccagcgacaccatcgagaacgtgaaggccaagatccaggacaaggagggcatcccccccgaccagcagagactgatcttcgccggcaagcagctggaggacggcagaaccctgagcgactacaacatccagaaggagagcaccctgcacctggtgctgagactgagaggcggcatgcagatcttcgtgaagaccctgaccggcaagaccatcaccctggaggtggagcccagcgacaccatcgagaacgtgaaggccaagatccaggacaaggagggcatcccccccgaccagcagagactgatcttcgccggcaagcagctggaggacggcagaaccctgagcgactacaacatccagaaggagagcaccctgcacctggtgctgagactgagaggcggcgtgtag

SEQ ID NO: 207049 - DNA, 2058 bp, Artificial Sequence
  derived and/or modified sequence
atgcaaatcttcgtcaagacactgaccggcaagactattactctggaggtagagccctccgatactatcgagaatgttaaggcaaagatccaagataaggaggggattccccccgaccagcagcgtctgatttttgccggcaaacagctggaggacggacggaccctctcagactataatattcagaaagagagtaccctccacctcgtgctgcggttgcgaggaggtatgcagatctttgtcaagactctgaccggaaaaaccatcactctggaagtggagccatctgacaccatcgagaacgttaaagcaaaaatacaggacaaggagggcattcccccagatcagcagagactgatatttgctggaaaacagctcgaggacgggaggaccttatccgattataacattcagaaggagtctacactccacctcgtacttagactgagaggcgggatgcagatcttcgttaaaacactgaccggcaagaccatcactctggaggtggaaccttccgacaccattgaaaacgttaaggctaagatccaggacaaagagggaattcctagcgaccagcagcgacttatcttcgccggaaagcagctagaggacggccggacgttgtccgactataacattcagaaagagagcacgctgcatctcgtgctccgtctccgggggggaatgcagatttttgtgaagaccctaaccggaaagaccatcaccctggaggtggaaccatcagacaccattgaaaacgtcaaggccaagatccaagacaaagagggaataccccccgaccaacaacgactgatctttgccggaaagcaactggaagacggaaggactctgtcagactacaatatccaaaaggagtccacgctgcaccttgttctgcgcctcaggggcggcatgcagatattcgtcaaaaccctgactggaaagacaataaccttggaggttgaaccttccgacaccattgaaaatgttaaagccaaaatccaagataaagaagggataccccccgatcagcagaggcttatcttcgccggaaagcagctggaagacggccgcactctcagcgactacaacattcaaaaggagtctaccttgcatctcgttctgagactccgcggcggcatgcagattttcgtcaagaccctgacagggaagaccattactcttgaagtggagcccagtgatacaattgaaaacgttaaggccaagatccaggacaaggaggggattcctcccgaccaacagcggctcatcttcgccgggaaacaacttgaagatggaagaactctgagtgattacaacatccaaaaggagtccactctgcatctggtactaaggctgcgggggggaatgcagatcttcgttaaaacattaacaggcaaaaccattacactggaagtagagccttccgacactatcgagaatgttaaagcaaagatccaggacaaagaagggatccccccggaccaacagcgactgattttcgctggcaagcagctcgaggacggcagaacactgagcgattataacatacagaaggaaagtactcttcatctcgtcctgaggctgcggggtgggatgcaaatattcgtgaagactctgaccggcaaaactatcacattagaagttgagccatccgacaccatagaaaacgtaaaggcaaaaattcaggataaagaaggtataccacccgaccagcagcgcctgatcttcgcagggaagcagcttgaggacggcaggacactgagtgattacaatattcagaaggaatcaactttgcatctggtattaagattgcggggaggaatgcagatcttcgtcaagactttaacagggaagacgataacgctcgaggtcgaaccatctgataccatcgagaatgtgaaagccaaaatccaggacaaggaagggatccccccggaccaacagaggctgatttttgcaggcaagcagttggaagatggcaggacgctgtctgattacaatattcaaaaagagagcactctgcacctcgtccttagattgagaggtggggtgtag

SEQ ID NO: 207050 - DNA, 2058 bp, Artificial Sequence
  derived and/or modified sequence
atgcaaatttttgtgaagactcttacgggcaagacgatcacgcttgaagtggagccctctgataccatcgaaaacgtcaaagcgaagattcaggataaagaaggaatccccccagatcagcagcgcctgatcttcgctggtaaacagctagaggacggtaggacactcagcgattacaatattcaaaaggagagcacactccacctggtgcttcggttgcgcggcggcatgcagattttcgtcaaaacgctcacaggaaagaccattactcttgaagtcgagccctctgacactatcgagaacgtgaaggctaagatccaggataaggagggaattccccctgaccagcagagactgatcttcgctggaaaacagttggaggacggccgaacacttagcgactacaacatccagaaggagtccacactccacttggtattgagacttagggggggaatgcaaatctttgtcaaaactctcactggaaaaaccataactttagaggtcgagcccagcgataccatcgaaaatgtcaaggcaaaaattcaggacaaagaaggtatcccatcagatcaacaacgactgatatttgccgggaaacagctggaagacgggcgaacattgtctgattataatatccaaaaggagagcactctgcacctggtgttgagactccggggcggcatgcagatcttcgtgaagacccttactgggaaaacaataacactggaagttgagccctccgataccattgagaacgtcaaggccaaaatccaggataaggaaggcattcctccggatcaacagcggctcatctttgctggtaagcagctcgaagacggaagaactctgtcagattacaacattcagaaagaatcaacactgcacttggtgctgaggctccgcgggggcatgcaaatctttgttaagactctcactgggaagactattactctcgaagttgagccaagcgacacaatagagaacgtgaaggcgaaaatccaggataaagaggggattccacccgaccagcagcgactcattttcgctggaaaacagctcgaagatggtcgaacattatcagactacaatattcagaaggaaagtacattgcatcttgtgctccgcctcagagggggtatgcagatctttgtgaagacgctgaccggcaaaactatcactctggaggtggaaccctcggacaccatcgaaaatgtcaaagcaaaaatccaggacaaggaggggatccctccagaccagcaacgtctgatattcgctggaaaacaactcgaagacggccgaacactctctgactataacatacagaaggagagcaccctgcacctggtcctgagacttcggggtggcatgcagatctttgtgaagacactgaccggaaagaccatcactctcgaggtggagccctctgacactattgagaacgtcaaagcaaagatccaagacaaggaggggatccctcccgatcagcagcgcttgatcttcgctgggaagcagctggaggacggcaggactctctcagactataacattcaaaaggagagtaccttgcacctggtgctgcggcttcgcggagggatgcaaattttcgtgaagacattaacaggaaaaacaattacgcttgaagtggaaccaagtgacacgatcgaaaatgtgaaagccaaaatccaggataaggaaggcattccacccgaccagcagagacttatctttgctggaaaacaactggaagacggccgcacccttagcgattataacattcagaaagagtccaccctccatctggtgctaaggcttcgtgggggtatgcaaatcttcgtgaagacactgacaggtaaaaccattacattagaggtcgagccaagcgacaccatcgagaatgtcaaagccaaaatccaggataaagaggggatccctcccgatcaacagagactcatatttgctggaaaacagctggaggacggccggactctaagcgactacaacattcagaaagagtctacactgcatctggtgctccggctgcgtggcggggtatag

SEQ ID NO: 207051 - DNA, 1830 bp, Artificial Sequence
  derived and/or modified sequence
atgcaaatctttgtgaaaactctgaccgggaaaaccataaccttggaggtcgagccgtccgatacaatagaaaacgtgaaagcaaagattcaggataaagaaggtattccccccgaccagcagcgacttatctttgcaggtaaacagctggaggacggcagaaccttaagcgactacaatattcaaaaggagtcaactctgcaccttgtactccgcttgagaggcggaatgcagatcttcgttaagacactgacaggtaaaactataactttggaggtcgaaccatccgacaccatagaaaacgtgaaagctaaaatccaggacaaagaaggcatcccttccgaccagcaacgcctgattttcgcagggaagcaactggaggacgggagaacgttgagcgactataatattcagaaggaaagcaccctccacctggtactccgtttgcggggcggcatgcaaatcttcgtgaaaacactcaccggcaaaaccattacgctggaggtcgagccgtccgacacaatcgagaacgtcaaggctaaaatacaggacaaggaaggcatccctcccgaccagcagaggttgatatttgctgggaaacagctcgaggatggaagaacattgagcgactacaacatccagaaggaatccacattacacctggtgcttcggctgagggggggaatgcagatttttgtgaaaaccctgaccgggaagacgatcacacttgaggtggagccctcagatacaatagaaaacgtaaaggcaaagatccaggacaaagaggggattccacctgatcagcagcggctgatttttgcagggaagcaattggaggatgggcgtacattgtctgactataacatccagaaagaaagtacactccatctggttctccggctgcgcggtgggatgcagatcttcgtcaagactcttacaggaaagactatcacactcgaggtcgagccgtctgacacaatcgaaaatgtcaaagcaaaaattcaagacaaagaaggaattccacctgatcaacagcggctgatctttgccggcaaacagctcgaggatggaagaaccttatccgactacaatatacagaaagagtctactctgcatctggttctgcgtcttaggggcgggatgcagatattcgtaaaaacattaactggtaaaactatcacattggaggttgaaccttctgatactatcgaaaacgtgaaggctaagattcaggacaaagagggcatcccaccagaccagcagcgcctgatatttgctgggaagcagcttgaagacggacgcactctgtcagattataacatacagaaggagagtacgctacatttagttcttcggcttcgcggcgggatgcagatcttcgtgaaaacgttgaccggtaagacaattacattggaggttgaaccttccgacactatcgaaaacgtaaaagcgaaaatacaggacaaagagggcataccacccgatcagcaaaggctcattttcgctggtaagcagttggaggacggtagaacgctgagtgactataacattcagaaggaatctacattacacctggtgctgcgcctccgcggaggcatgcagattttcgtgaagacattgacaggaaaaactatcactctggaagtggaaccatctgacaccatcgagaacgtcaaagcgaaaatccaggacaaggagggtattcccccagatcagcagcgcctaattttcgctggaaagcagctcgaggacggacgcactctatccgattataacatccaaaaggagagtaccttacatctggtactgagactcagaggcggcgtctag

SEQ ID NO: 207052 - DNA, 2058 bp, Artificial Sequence
  derived and/or modified sequence
atgcagatctttgtgaagaccctgaccgggaagaccatcaccctggaggtggagcccagcgacaccattgaaaatgtgaaggccaagatccaggacaaggagggcatccccccagaccagcagaggctcatctttgctgggaagcagctggaggatggccgcaccctgagtgactacaacatccagaaggagagcaccctgcacctggtgctgcggctgcggggcggcatgcagatctttgtgaagaccctgaccgggaagaccatcaccctggaggtggagcccagcgacaccattgaaaatgtgaaggccaagatccaggacaaggagggcatccccccagaccagcagaggctcatctttgctgggaagcagctggaggatggccgcaccctgagtgactacaacatccagaaggagagcaccctgcacctggtgctgcggctgcggggcggcatgcagatctttgtgaagaccctgaccgggaagaccatcaccctggaggtggagcccagcgacaccattgaaaatgtgaaggccaagatccaggacaaggagggcatccccagcgaccagcagaggctcatctttgctgggaagcagctggaggatggccgcaccctgagtgactacaacatccagaaggagagcaccctgcacctggtgctgcggctgcggggcggcatgcagatctttgtgaagaccctgaccgggaagaccatcaccctggaggtggagcccagcgacaccattgaaaatgtgaaggccaagatccaggacaaggagggcatccccccagaccagcagaggctcatctttgctgggaagcagctggaggatggccgcaccctgagtgactacaacatccagaaggagagcaccctgcacctggtgctgcggctgcggggcggcatgcagatctttgtgaagaccctgaccgggaagaccatcaccctggaggtggagcccagcgacaccattgaaaatgtgaaggccaagatccaggacaaggagggcatccccccagaccagcagaggctcatctttgctgggaagcagctggaggatggccgcaccctgagtgactacaacatccagaaggagagcaccctgcacctggtgctgcggctgcggggcggcatgcagatctttgtgaagaccctgaccgggaagaccatcaccctggaggtggagcccagcgacaccattgaaaatgtgaaggccaagatccaggacaaggagggcatccccccagaccagcagaggctcatctttgctgggaagcagctggaggatggccgcaccctgagtgactacaacatccagaaggagagcaccctgcacctggtgctgcggctgcggggcggcatgcagatctttgtgaagaccctgaccgggaagaccatcaccctggaggtggagcccagcgacaccattgaaaatgtgaaggccaagatccaggacaaggagggcatccccccagaccagcagaggctcatctttgctgggaagcagctggaggatggccgcaccctgagtgactacaacatccagaaggagagcaccctgcacctggtgctgcggctgcggggcggcatgcagatctttgtgaagaccctgaccgggaagaccatcaccctggaggtggagcccagcgacaccattgaaaatgtgaaggccaagatccaggacaaggagggcatccccccagaccagcagaggctcatctttgctgggaagcagctggaggatggccgcaccctgagtgactacaacatccagaaggagagcaccctgcacctggtgctgcggctgcggggcggcatgcagatctttgtgaagaccctgaccgggaagaccatcaccctggaggtggagcccagcgacaccattgaaaatgtgaaggccaagatccaggacaaggagggcatccccccagaccagcagaggctcatctttgctgggaagcagctggaggatggccgcaccctgagtgactacaacatccagaaggagagcaccctgcacctggtgctgcggctgcggggcggcgtgtag

SEQ ID NO: 207053 - DNA, 1830 bp, Artificial Sequence
  derived and/or modified sequence
atgcagatctttgtgaagaccctgaccgggaagaccatcaccctggaggtggagcccagcgacaccattgaaaatgtgaaggccaagatccaggacaaggagggcatccccccagaccagcagaggctcatctttgctgggaagcagctggaggatggccgcaccctgagtgactacaacatccagaaggagagcaccctgcacctggtgctgcggctgcggggcggcatgcagatctttgtgaagaccctgaccgggaagaccatcaccctggaggtggagcccagcgacaccattgaaaatgtgaaggccaagatccaggacaaggagggcatccccagcgaccagcagaggctcatctttgctgggaagcagctggaggatggccgcaccctgagtgactacaacatccagaaggagagcaccctgcacctggtgctgcggctgcggggcggcatgcagatctttgtgaagaccctgaccgggaagaccatcaccctggaggtggagcccagcgacaccattgaaaatgtgaaggccaagatccaggacaaggagggcatccccccagaccagcagaggctcatctttgctgggaagcagctggaggatggccgcaccctgagtgactacaacatccagaaggagagcaccctgcacctggtgctgcggctgcggggcggcatgcagatctttgtgaagaccctgaccgggaagaccatcaccctggaggtggagcccagcgacaccattgaaaatgtgaaggccaagatccaggacaaggagggcatccccccagaccagcagaggctcatctttgctgggaagcagctggaggatggccgcaccctgagtgactacaacatccagaaggagagcaccctgcacctggtgctgcggctgcggggcggcatgcagatctttgtgaagaccctgaccgggaagaccatcaccctggaggtggagcccagcgacaccattgaaaatgtgaaggccaagatccaggacaaggagggcatccccccagaccagcagaggctcatctttgctgggaagcagctggaggatggccgcaccctgagtgactacaacatccagaaggagagcaccctgcacctggtgctgcggctgcggggcggcatgcagatctttgtgaagaccctgaccgggaagaccatcaccctggaggtggagcccagcgacaccattgaaaatgtgaaggccaagatccaggacaaggagggcatccccccagaccagcagaggctcatctttgctgggaagcagctggaggatggccgcaccctgagtgactacaacatccagaaggagagcaccctgcacctggtgctgcggctgcggggcggcatgcagatctttgtgaagaccctgaccgggaagaccatcaccctggaggtggagcccagcgacaccattgaaaatgtgaaggccaagatccaggacaaggagggcatccccccagaccagcagaggctcatctttgctgggaagcagctggaggatggccgcaccctgagtgactacaacatccagaaggagagcaccctgcacctggtgctgcggctgcggggcggcatgcagatctttgtgaagaccctgaccgggaagaccatcaccctggaggtggagcccagcgacaccattgaaaatgtgaaggccaagatccaggacaaggagggcatccccccagaccagcagaggctcatctttgctgggaagcagctggaggatggccgcaccctgagtgactacaacatccagaaggagagcaccctgcacctggtgctgcggctgcggggcggcgtgtag

SEQ ID NO: 207054 - DNA, 2058 bp, Artificial Sequence
  derived and/or modified sequence
atgcagatcttcgtgaagaccctgaccggcaagaccatcaccctggaggtcgaacctagcgacactatcgagaatgtcaaggcaaaaatacaggataaggagggcataccacccgatcagcagagacttatattcgcgggaaagcagttagaagatgggagaacactgagcgactacaatatccagaaagagtctacgcttcatctggtgttgagattgcgtggtggcatgcagatcttcgtgaagaccttgaccgggaaaacgatcacgttagaagtggaaccctctgataccattgagaacgtgaaggcgaaaatccaagacaaggaaggtattccccccgatcagcaaagactgatttttgcgggaaagcagctggaagacggcaggacactgtccgactacaatatccaaaaagaatcaactctgcacctggtgctacgattaagggggggcatgcagattttcgttaagacattaactggcaaaacaattactttggaagtggaaccttccgacaccatcgaaaacgtgaaggctaagatccaggataaggaggggatcccttcggaccaacagcgactgatcttcgcaggcaagcagctagaagatggcagaactctgtcagactataatatccagaaagagagtacattgcatttggtactccgcctgagaggcggcatgcaaattttcgtcaaaaccctgacagggaagaccattactttggaggtggagcccagcgatactattgaaaatgtgaaggccaagatccaggacaaagagggtataccgcccgaccagcagagactgatcttcgcagggaagcaactcgaggatggacgtactctgtctgattataatatacagaaggaatcaacgctgcacctggttctgagattacggggaggaatgcagatctttgtgaagaccctcaccggtaagactatcactttggaggtggagcccagcgataccatagagaacgtcaaagctaaaatccaggacaaggaaggaatacctcccgaccaacagcgcctcatatttgcaggaaaacagctggaagatgggagaacactgagcgactacaacattcagaaggagtctactctccatctggtgcttcgcttaaggggagggatgcaaatcttcgtgaagactctgacagggaagactatcacattagaagttgagcctagcgacacaatagagaatgtaaaagccaagatccaggacaaggaggggatccctcccgatcagcagcggcttatatttgcaggaaaacagcttgaggacgggcgtactctctcagactacaacattcagaaggaatctacattgcaccttgtgctacgccttcgcggagggatgcagatcttcgtcaagactctgacgggtaaaacaattacactggaagtcgaaccttctgacactattgaaaacgttaaggccaagatccaagacaaggagggtatccctccagatcagcagaggctgattttcgcaggaaagcagctggaggatggaagaactctgtcggactataatatccaaaaggaatcaacactccatcttgtgctacgcctgcgaggcggcatgcagatttttgtgaagacactgacaggtaagacgatcaccctcgaggttgagccctcagacactatcgagaatgtgaaagccaaaattcaggacaaggaaggcatcccacccgaccagcagcgtcttatcttcgcaggcaagcagctcgaggatgggagaactctctctgattataacatccagaaggagtccaccctgcaccttgtgttgcgcctgaggggggggatgcaaatattcgtaaagacattgaccggcaagaccattaccctggaagtggagccctcagacactatcgagaacgtcaaagccaaaatccaggataaggagggaattcctcctgaccagcaaagactgatcttcgcaggtaagcagctggaggatgggcgcacactctctgactataatattcagaaggaatctacccttcacttagtactgagacttcgcgggggggtctag

SEQ ID NO: 207055 - DNA, 2058 bp, Artificial Sequence
  derived and/or modified sequence
atgcagatcttcgtgaagaccctgaccggcaagaccatcaccctggaagtggagcccagcgacacaatcgaaaatgtgaaagcgaaaatccaggacaaagaaggaatcccccccgatcagcaaaggcttatattcgcaggtaagcagctcgaggacggacggaccctgtcggattacaacattcaaaaggagagcaccctgcatctcgtgctacgcctcagaggcggcatgcagatctttgtcaagactcttacaggcaagacaatcaccttggaagtcgagccctccgacaccattgaaaacgttaaggccaagattcaggacaaggagggaattccgcccgatcagcagcgcttaatctttgccgggaaacaactggaggatgggcgtacactgagcgactacaacatccagaaggagagcacattgcatctcgtcctgcggcttaggggcggcatgcagattttcgtcaagacgctgacaggcaaaacaataacactggaggttgaacccagtgacacgatagagaatgttaaggcaaaaattcaggacaaagagggaattccttctgatcagcagcggttgatcttcgcgggcaaacagctcgaggatggcaggacactttctgactacaatatacagaaagagagcactctgcatctggtgttacgtcttcggggcggtatgcagatcttcgtgaaaacgctcaccggaaagacaatcacgctggaggtggaaccgtcagacaccattgaaaacgtcaaggcaaagatacaggataaagaaggcatcccaccagaccagcaacgcttaatcttcgccggcaagcagctggaggacgggagaacactgagtgactacaacattcagaaggagagtaccctgcatctggttctccggttgcgcggtggtatgcagattttcgtgaagacactgactgggaagacaattaccctggaagtggagccctctgatacgattgaaaacgtaaaagccaagatacaagacaaagaggggatccctcctgatcagcaacgcctcatctttgccgggaaacaactggaagatgggcgcaccctttctgattataatattcagaaggagagcaccctgcacctcgtgctgaggcttcgtgggggcatgcaaatattcgtgaaaacactgacgggcaaaactatcactttggaagtagagccttccgacactattgaaaatgtgaaagcaaagatacaggacaaagaaggtatccctccggatcagcagcgcctgatttttgccggcaagcagctagaagatggacggacgctaagcgattacaacattcagaaagaaagtacacttcatttagtgctgaggctcagggggggcatgcagatattcgttaagactctcaccggcaaaactatcaccttggaagtggagccatccgatactatagagaacgtgaaagccaaaatccaggacaaagaggggattcctcctgaccagcaaagacttatttttgctggaaaacagctggaggacggccgaaccctgagtgactataacatccagaaagaaagcactctgcatctcgtgctaaggttacgaggcggcatgcagatctttgtaaagaccctgacaggaaagactatcaccctcgaagttgagcccagcgatacgatcgaaaatgtgaaagccaagatacaggataaagaaggaatccctcctgatcagcagcggttgatatttgctgggaagcagttagaggatggaagaaccctgtcagattacaacattcagaaggagtccactttacatttggtcctgagactgagaggcggcatgcagatcttcgtgaagactctgactggcaagacaattacgctggaagtggaacccagcgataccatcgagaatgtgaaagccaaaatccaggacaaggaggggatcccaccggaccagcagcggttaatcttcgctggaaagcagcttgaagacggccgtactctgtccgattacaatatccaaaaagagagcaccttgcacttggtcctgcgccttcgcggtggagtctag

SEQ ID NO: 207056 - DNA, 1830 bp, Artificial Sequence
  derived and/or modified sequence
atgcagatcttcgtgaagaccctgaccggcaagaccatcaccctggaggtggagccatcagataccattgaaaatgttaaggccaagatccaggataaggaaggcataccccctgaccagcagcggttaatattcgccggaaagcagcttgaggacggacggactcttagtgactacaatattcagaaagagagcaccttgcaccttgtcctcaggctgcggggcggcatgcagatattcgtaaaaactttgaccgggaagacaattactctggaagttgaaccaagcgataccattgaaaacgtaaaggccaagatccaggacaaggaaggaataccaagcgatcagcagcgcctgatctttgcgggcaagcagctggaggacgggcgaacactctcagactataatattcagaaagaatctaccctccacctggtgcttagacttcgggggggaatgcagatcttcgtgaaaactttgacgggcaaaaccatcacgctggaggtggagccatctgacacaattgaaaatgtgaaggcaaagatccaggacaaagaaggaataccacctgatcaacagcggctcatcttcgcaggaaagcagctggaagatggtcggactctctcagactacaatatccagaaggagtctacgctccacttagtgctgaggctaaggggtggtatgcagattttcgtaaaaactctgacgggcaagacaattacactggaagttgagccaagcgacaccattgagaacgtgaaggcaaaaattcaggataaagaagggataccccccgaccagcagagacttatttttgcgggtaagcagcttgaggatggccgcaccctgagcgactacaatatccagaaagagtctaccctgcacttggtcctgagactgcgcggcggtatgcagattttcgtgaagacactgaccggcaagaccattaccctggaggttgaaccatccgatacaattgagaatgtcaaagcgaagattcaggacaaggaaggtatacctcctgatcaacaaaggttgatcttcgctggaaaacagttagaagacgggcgtacccttagtgattacaatatccagaaggagagtactctccacctggtactgaggctgagaggtgggatgcagatattcgtgaaaacactaacagggaagaccattactctagaagttgagccatccgatactatcgagaatgttaaggccaaaattcaagacaaagaaggcattccgcctgaccagcagcgactcatttttgcaggcaagcagctcgaggatgggcggaccctgagcgattataatatccagaaagagtctaccttacatctcgtccttcggctaaggggaggcatgcagatctttgtcaagacccttaccgggaagacaataaccttggaggtggaacccagtgacacgatcgagaatgtaaaagcaaaaatccaggataaggagggcatcccacccgaccagcaacggctcattttcgcagggaaacagctggaagacggtcggacactgtccgattataatatacagaaggagtcaaccctgcacctagtgctgcggctgcggggcgggatgcagatctttgtcaagacactgactggcaaaaccatcacgctggaagttgagcccagtgacacaattgaaaacgtcaaggcgaagatccaagataaagaaggtatcccccctgatcagcagcgcctaattttcgccgggaagcaacttgaagacggaagaactctcagtgattataacatacagaaagaatctactttgcacctggtgctccgcttgaggggcggcgtgtag

SEQ ID NO: 207057 - DNA, 2058 bp, Artificial Sequence
  derived and/or modified sequence
atgcagatttttgtgaaaacgctaactggcaagaccattacactcgaagttgaacctagcgataccatagaaaatgtgaaggcaaaaatccaagacaaagagggcatccccccagatcagcagcgtttgatttttgccggtaagcagctcgaagacggcagaaccctcagcgactacaacattcagaaggagagcaccttgcacctggttttgagactgaggggcggtatgcaaatttttgtgaagacactgacgggcaagaccattacactggaggttgagccaagcgataccattgagaatgtgaaagcaaagattcaggataaggaagggataccacccgaccaacagaggctgatcttcgccggaaagcaactggaagacggcagaaccttgtcagactataacatccagaaagagagcacgcttcacctggtgctcagactgcggggaggaatgcaaatatttgtgaaaactctcactggtaagactatcacactggaagtggaaccatccgatactattgagaacgtcaaagccaaaattcaggataaagagggaatcccaagcgaccagcagagactgatcttcgctggaaagcagctggaggacgggaggaccctatctgattataacatccagaaagagtccaccttgcatctggttctgagactccgaggaggtatgcaaatctttgtgaagactctgactgggaagacgatcaccctggaggtggaaccttctgacacaatcgagaatgtcaaggccaaaatccaggataaggaggggattcccccagatcaacagcgtcttatctttgctggaaaacaactggaggacggcaggaccctatccgattacaacattcaaaaggaatcaacgcttcacctcgtcctgcggctgcgcggagggatgcaaatcttcgtgaagacccttaccggaaaaaccatcaccttagaggtggagccatcagacacaattgagaacgtgaaagcaaagatacaggataaagaagggataccccctgatcaacaacgcctgatattcgccggtaagcaactggaagatggaagaaccctgtcggactataatattcagaaagagtcaaccctccatcttgttctgcgcttgaggggaggtatgcaaatctttgtgaaaacactcacgggaaagaccataaccctcgaggtagaaccctcagacaccattgaaaatgtgaaagccaagatccaggacaaagaaggtatcccacccgaccagcaacgactgatattcgcaggaaagcagctagaggatggtcggacgctcagcgactacaacatacagaaggagagcaccctgcatctagtgctgcgcttgagaggagggatgcagattttcgtaaagacactgactggtaaaaccattactttggaagtcgagccttctgacacaatcgagaacgtgaaagcaaaaattcaggataaggaggggatcccgccagaccagcagcggctcatcttcgctggaaagcaacttgaggatggcaggacgttgagcgattacaatattcaaaaagaatctactctgcacctcgtgctcagactccgcggaggtatgcagattttcgtgaaaacactgacaggcaaaacaattaccctcgaggtcgaaccaagcgacacaattgagaatgtgaaggccaagatccaggacaaggaggggattccgccagatcaacagcggttgatttttgccggaaagcagttggaggacgggcgtactctgtccgactacaacatccaaaaggaatctacactgcatttggttcttagactgcgtgggggtatgcagatattcgttaaaacccttaccggcaagacaatcaccttagaagtagagccatcagacacaatcgagaatgtgaaagctaagattcaggataaagaagggattcctccggatcagcaacgtctgattttcgctgggaaacagttggaggatggacggaccctgtcagattataatatccagaaagagagcacactgcaccttgtcttgaggttgcgcggaggcgtgtag

SEQ ID NO: 207058 - DNA, 2058 bp, Artificial Sequence
  derived and/or modified sequence
atgcagatttttgtaaagaccttgacaggtaaaacaatcacattggaagtggaacctagcgatacaatcgaaaatgtgaaggcgaagattcaggacaaagagggaatcccaccagatcagcagcgcctgatttttgcagggaaacagctggaagatgggaggaccctttccgactacaatatccaaaaggaatctaccttgcacttagtgcttcgcctgagaggaggtatgcagatcttcgtcaagacactgaccggtaaaactattacactggaggtggagccttctgacaccatagagaatgttaaagcaaaaattcaagataaagagggcattccccctgaccagcagaggctcatcttcgccggaaaacagcttgaggatggccgaactctctctgactacaatattcagaaagagtccacactccatctcgtgttacgcctgaggggtgggatgcagatattcgtgaagacccttacaggaaagactattacactagaggttgaaccctcagacaccattgagaacgtcaaggccaaaatccaggacaaagaggggatccccagtgaccagcaaaggttgattttcgctgggaaacagctggaagatggaaggaccctgtcagactacaatatccagaaggaatcaacactacacctggttctccgcctgcgcggaggcatgcagatttttgtgaagactctgactggaaagacaatcacgttagaagtcgagccttccgataccattgagaacgtcaaggcaaagattcaggacaaggaagggattccaccagaccagcagcgactgatctttgcgggaaaacaattggaggacggcaggacattatccgactacaatatccagaaggagagcacactccatctggtgctgaggctgcgcggtggaatgcagatctttgtgaagacacttaccggtaagacaatcactctcgaggttgagcccagcgatacaattgagaacgtgaaagctaaaatacaagataaagagggcattccgccagatcagcagaggcttatctttgctggcaagcagttagaggatggtcggacattgagcgactacaacattcaaaaggagtccacattacacttggtgttgagactgaggggaggaatgcaaatcttcgttaaaaccctcaccggaaagacaatcacccttgaagtagagccaagtgatactatcgaaaacgtcaaggcaaagattcaggacaaagaaggcatccctcctgatcagcagagactgattttcgctggtaaacagctcgaggacggtcggacactgagtgactacaacatccaaaaagagtcaactttacacttggtcctacgcttgcgcggtggcatgcagatttttgtcaagactttgactggcaaaactattacactggaggttgaaccatctgacacaattgaaaacgtgaaggctaagatccaagacaaagaaggaatccccccagatcaacagagactgatatttgctggtaaacagcttgaagacggaagaaccttatccgattacaatattcagaaggagtccactctacatctggtgttgagactgagagggggaatgcagattttcgtgaagactctgacaggaaagacgattacactagaggttgaaccgtcagataccattgagaacgtcaaggctaagatccaggacaaagaagggatcccccctgatcagcaacggctcatattcgccggtaaacaacttgaagatggaagaacattgtctgattacaacattcagaaagagagcaccttgcacctggtcctccggcttagagggggtatgcagattttcgtaaagactttaacagggaagacaataaccttggaagttgagccgagtgacactatcgagaatgtgaaagccaagatccaagacaaagaaggcatccctcccgatcaacaaagactcatatttgccggtaagcaacttgaggacggcaggacactttcggactataacatacaaaaggagtccaccctgcatctggtcctcagactgcggggaggagtgtag

SEQ ID NO: 207059 - DNA, 1830 bp, Artificial Sequence
  derived and/or modified sequence
atgcagatttttgttaaaactctgaccggcaaaactattactctggaggtcgagcccagcgatactatagagaacgttaaggcaaaaatacaagacaaagagggcattccccctgaccaacagcggttgattttcgccggaaagcagttagaggatggaaggaccctgtctgactacaatatccagaaagagagcaccctgcacctggtactgcgcctacgcggtggcatgcagatcttcgtgaaaacgctgaccggcaaaaccatcaccctggaagtggaaccttcagacacaatcgagaacgtcaaggccaaaatccaggacaaggagggtatcccctctgaccaacaacgcctgattttcgctggaaagcagctcgaggatggaagaactctgtccgactacaacattcaaaaggaaagtactctccatttagtactgcggcttaggggagggatgcagatattcgtgaagaccctcacgggaaaaaccattacactggaagtcgaaccctccgacacaatagagaacgtgaaagccaagattcaggacaaagagggcatccccccagaccagcagcggctgatcttcgcaggaaagcagttagaggacggtagaactctgagcgactacaatatacagaaagagagtactttgcatttggtcctgagactccggggtggcatgcagattttcgtgaagaccttgacagggaaaacaatcactttggaggtggaacccagtgacaccattgaaaacgtaaaggctaagatccaggacaaagaaggcattcctccagatcagcaaaggctgatcttcgccggaaagcagctggaggacgggagaactctctctgactataatattcagaaggagtcgactctacatctggtactaagactgcgcggaggaatgcaaatttttgttaaaacgctcacagggaaaaccataaccctggaggttgaaccaagcgatacaatcgaaaacgtgaaggccaagattcaggataaagagggcatcccccctgatcaacagaggttgattttcgcagggaaacaactggaagacggaaggacccttagcgactataatatccagaaagagtcgactctgcaccttgtgctcaggttgaggggcggaatgcagatatttgttaaaactttgacagggaaaacaattaccctggaggtcgaaccatcagatactatagaaaacgtgaaggctaagatccaggataaagaaggcattccgccagaccagcaacgccttatctttgctggcaaacagctcgaagacggcaggacgctgagtgattataatatccagaaagaatccacgcttcatcttgtgctgaggttgaggggaggcatgcaaatctttgtgaagaccctcactggcaaaaccataactttagaagttgagccttctgatactattgaaaatgtgaaggcaaaaatccaggacaaagagggaatccctcctgatcagcagcgcctgatatttgcagggaaacagcttgaggacggcaggacactcagcgactacaatatccagaaagagagcactctacatctggtgctaaggctgagggggggtatgcaaatatttgtcaaaaccctgacagggaagacaattactttagaggtagagccctccgataccatcgaaaatgtaaaggctaagatccaggataaagaaggcattcctccggatcagcaaaggctgatctttgcaggcaaacagctggaagacggcagaaccctgtcagactacaacatccagaaagagtctactctgcatttagtcctgagactgcgcggtggagtgtag

SEQ ID NO: 207060 - DNA, 2688 bp, Artificial Sequence
  derived and/or modified sequence
ggagggaggggagggagaccccgactctgcagaaggcgctcgctgcgtgccccacgtccgccgaacgcggggttcgcgacccgaggggaccgcgggggctgaggggaggggccgcggagccgcggctaaggaacgcgggccgcccacccgctcccggtgcagcggcctccgcgccgggttttggcgcctcccgcgggcgcccccctcctcacggcgagcgctgccacgtcagacgaagggcgcagcgagcgtcctgatccttccgcccggacgctcaggacagcggcccgctgctcataagactcggccttagaaccccagtatcagcagaaggacattttaggacgggacttgggtgactctagggcactggttttctttccagagagcggaacaggcgaggaaaagtagtcccttctcggcgattctgcggagggatctccgtggggcggtgaacgccgatgattatataaggacgcgccgggtgtggcacagctagttccgtcgcagccgggatttgggtcgcagttcttgtttgtggatcgctgtgatcgtcacttgacaatgcagatcttcgtgaagactctgactggtaagaccatcaccctcgaggttgagcccagtgacaccatcgagaatgtcaaggcaaagatccaagataaggaaggcatccctcctgaccagcagaggctgatctttgctggaaaacagctggaagatgggcgcaccctgtctgactacaacatccagaaagagtccaccctgcacctggtgctccgtctcagaggtgggatgcaaatcttcgtgaagacactcactggcaagaccatcacccttgaggtcgagcccagtgacaccatcgagaacgtcaaagcaaagatccaggacaaggaaggcattcctcctgaccagcagaggttgatctttgccggaaagcagctggaagatgggcgcaccctgtctgactacaacatccagaaagagtctaccctgcacctggtgctccgtctcagaggtgggatgcagatcttcgtgaagaccctgactggtaagaccatcaccctcgaggtggagcccagtgacaccatcgagaatgtcaaggcaaagatccaagataaggaaggcattccttctgatcagcagaggttgatctttgccggaaaacagctggaagatggtcgtaccctgtctgactacaacatccagaaagagtccaccttgcacctggtactccgtctcagaggtgggatgcaaatcttcgtgaagacactcactggcaagaccatcacccttgaggtcgagcccagtgacactatcgagaacgtcaaagcaaagatccaagacaaggaaggcattcctcctgaccagcagaggttgatctttgccggaaagcagctggaagatgggcgcaccctgtctgactacaacatccagaaagagtctaccctgcacctggtgctccgtctcagaggtgggatgcagatcttcgtgaagaccctgactggtaagaccatcactctcgaagtggagccgagtgacaccattgagaatgtcaaggcaaagatccaagacaaggaaggcatccctcctgaccagcagaggttgatctttgccggaaaacagctggaagatggtcgtaccctgtctgactacaacatccagaaagagtccaccttgcacctggtgctccgtctcagaggtgggatgcagatcttcgtgaagaccctgactggtaagaccatcactctcgaggtggagccgagtgacaccattgagaatgtcaaggcaaagatccaagacaaggaaggcatccctcctgaccagcagaggttgatctttgctgggaaacagctggaagatggacgcaccctgtctgactacaacatccagaaagagtccaccctgcacctggtgctccgtcttagaggtgggatgcagatcttcgtgaagaccctgactggtaagaccatcactctcgaagtggagccgagtgacaccattgagaatgtcaaggcaaagatccaagacaaggaaggcatccctcctgaccagcagaggttgatctttgctgggaaacagctggaagatggacgcaccctgtctgactacaacatccagaaagagtccaccctgcacctggtgctccgtcttagaggtgggatgcagatcttcgtgaagaccctgactggtaagaccatcactctcgaagtggagccgagtgacaccattgagaatgtcaaggcaaagatccaagacaaggaaggcatccctcctgaccagcagaggttgatctttgctgggaaacagctggaagatggacgcaccctgtctgactacaacatccagaaagagtccaccctgcacctggtgctccgtctcagaggtgggatgcaaatcttcgtgaagaccctgactggtaagaccatcaccctcgaggtggagcccagtgacaccatcgagaatgtcaaggcaaagatccaagataaggaaggcatccctcctgatcagcagaggttgatctttgctgggaaacagctggaagatggacgcaccctgtctgactacaacatccagaaagagtccactctgcacttggtcctgcgcttgagggggggtgtctaagtttccccttttaaggtttcaacaaatttcattgcactttcctttcaataaagttgttgcattccc

SEQ ID NO: 207061 - DNA, 3745 bp, Artificial Sequence
  derived and/or modified sequence
gttccccagctttagggccacgcccgccctgagatctgccgagtcattgtccttgtcccgcggccccgggagccccccgcgaccggcctgggaggctcagggaggttgaagggggctgagcaaaggaagccccgtcattacctcaaatgtgacccaaaaataaagacccgtccatctcgcagggtgggccagggcgggtcaggagggaggggagggagaccccgactctgcagaaggcgctcgctgcgtgccccacgtccgccgaacgcggggttcgcgacccgaggggaccgcgggggctgaggggaggggccgcggagccgcggctaaggaacgcgggccgcccacccgctcccggtgcagcggcctccgcgccgggttttggcgcctcccgcgggcgcccccctcctcacggcgagcgctgccacgtcagacgaagggcgcagcgagcgtcctgatccttccgcccggacgctcaggacagcggcccgctgctcataagactcggccttagaaccccagtatcagcagaaggacattttaggacgggacttgggtgactctagggcactggttttctttccagagagcggaacaggcgaggaaaagtagtcccttctcggcgattctgcggagggatctccgtggggcggtgaacgccgatgattatataaggacgcgccgggtgtggcacagctagttccgtcgcagccgggatttgggtcgcagttcttgtttgtggatcgctgtgatcgtcacttggtgagtagcgggctgctgggctggccggggctttcgtggccgccgggccgctcggtgggacggaggcgtgtggagagaccgccaagggctgtagtctgggtccgcgagcaaggttgccctgaactgggggttggggggagcgcagcaaaatggcggctgttcccgagtcttgaatggaagacgcttgtgaggcgggctgtgaggtcgttgaaacaaggtggggggcatggtgggcggcaagaacccaaggtcttgaggccttcgctaatgcgggaaagctcttattcgggtgagatgggctggggcaccatctggggaccctgacgtgaagtttgtcactgactggagaactcggtttgtcgtctgttgcgggggcggcagttatggcggtgccgttgggcagtgcacccgtacctttgggagcgcgcgccctcgtcgtgtcgtgacgtcacccgttctgttggcttataatgcagggtggggccacctgccggtaggtgtgcggtaggcttttctccgtcgcaggacgcagggttcgggcctagggtaggctctcctgaatcgacaggcgccggacctctggtgaggggagggataagtgaggcgtcagtttctctggtcggttttatgtacctatcttcttaagtagctgaagctccggttttgaactatgcgctcggggttggcgagtgtgttttgtgaagttttttaggcaccttttgaaatgtaatcatttgggtcaatatgtaattttcagtgttagactagtaaattgtccgctaaattctggccgtttttggcttttttgttagacaatgcagatcttcgtgaagactctgactggtaagaccatcaccctcgaggttgagcccagtgacaccatcgagaatgtcaaggcaaagatccaagataaggaaggcatccctcctgaccagcagaggctgatctttgctggaaaacagctggaagatgggcgcaccctgtctgactacaacatccagaaagagtccaccctgcacctggtgctccgtctcagaggtgggatgcaaatcttcgtgaagacactcactggcaagaccatcacccttgaggtcgagcccagtgacaccatcgagaacgtcaaagcaaagatccaggacaaggaaggcattcctcctgaccagcagaggttgatctttgccggaaagcagctggaagatgggcgcaccctgtctgactacaacatccagaaagagtctaccctgcacctggtgctccgtctcagaggtgggatgcagatcttcgtgaagaccctgactggtaagaccatcaccctcgaggtggagcccagtgacaccatcgagaatgtcaaggcaaagatccaagataaggaaggcattccttctgatcagcagaggttgatctttgccggaaaacagctggaagatggtcgtaccctgtctgactacaacatccagaaagagtccaccttgcacctggtactccgtctcagaggtgggatgcaaatcttcgtgaagacactcactggcaagaccatcacccttgaggtcgagcccagtgacactatcgagaacgtcaaagcaaagatccaagacaaggaaggcattcctcctgaccagcagaggttgatctttgccggaaagcagctggaagatgggcgcaccctgtctgactacaacatccagaaagagtctaccctgcacctggtgctccgtctcagaggtgggatgcagatcttcgtgaagaccctgactggtaagaccatcactctcgaagtggagccgagtgacaccattgagaatgtcaaggcaaagatccaagacaaggaaggcatccctcctgaccagcagaggttgatctttgccggaaaacagctggaagatggtcgtaccctgtctgactacaacatccagaaagagtccaccttgcacctggtgctccgtctcagaggtgggatgcagatcttcgtgaagaccctgactggtaagaccatcactctcgaggtggagccgagtgacaccattgagaatgtcaaggcaaagatccaagacaaggaaggcatccctcctgaccagcagaggttgatctttgctgggaaacagctggaagatggacgcaccctgtctgactacaacatccagaaagagtccaccctgcacctggtgctccgtcttagaggtgggatgcagatcttcgtgaagaccctgactggtaagaccatcactctcgaagtggagccgagtgacaccattgagaatgtcaaggcaaagatccaagacaaggaaggcatccctcctgaccagcagaggttgatctttgctgggaaacagctggaagatggacgcaccctgtctgactacaacatccagaaagagtccaccctgcacctggtgctccgtcttagaggtgggatgcagatcttcgtgaagaccctgactggtaagaccatcactctcgaagtggagccgagtgacaccattgagaatgtcaaggcaaagatccaagacaaggaaggcatccctcctgaccagcagaggttgatctttgctgggaaacagctggaagatggacgcaccctgtctgactacaacatccagaaagagtccaccctgcacctggtgctccgtctcagaggtgggatgcaaatcttcgtgaagaccctgactggtaagaccatcaccctcgaggtggagcccagtgacaccatcgagaatgtcaaggcaaagatccaagataaggaaggcatccctcctgatcagcagaggttgatctttgctgggaaacagctggaagatggacgcaccctgtctgactacaacatccagaaagagtccactctgcacttggtcctgcgcttgagggggggtgtctaagtttccccttttaaggtttcaacaaatttcattgcactttcctttcaataaagttgttgcattcccaattggtgttttttttttttttttttttaagtttattttgcatt

SEQ ID NO: 207062 - DNA, 1963 bp, Artificial Sequence
  derived and/or modified sequence
agttccgtcgcagccgggatttgggtcgcagttcttgtttgtggatcgctgtgatcgtcacttgacaatgcagatcttcgtgaagactctgactggtaagaccatcaccctcgaggttgagcccagtgacaccatcgagaatgtcaaggcaaagatccaagataaggaaggcatccctcctgaccagcagaggctgatctttgctggaaaacagctggaagatgggcgcaccctgtctgactacaacatccagaaagagtccaccctgcacctggtgctccgtctcagaggtgggatgcaaatcttcgtgaagacactcactggcaagaccatcacccttgaggtcgagcccagtgacaccatcgagaacgtcaaagcaaagatccaagataaggaaggcattccttctgatcagcagaggttgatctttgccggaaaacagctggaagatggtcgtaccctgtctgactacaacatccagaaagagtccaccttgcacctggtactccgtctcagaggtgggatgcaaatcttcgtgaagacactcactggcaagaccatcacccttgaggtcgagcccagtgacactatcgagaacgtcaaagcaaagatccaagacaaggaaggcattcctcctgaccagcagaggttgatctttgccggaaagcagctggaagatgggcgcaccctgtctgactacaacatccagaaagagtctaccctgcacctggtgctccgtctcagaggtgggatgcagatcttcgtgaagaccctgactggtaagaccatcactctcgaagtggagccgagtgacaccattgagaatgtcaaggcaaagatccaagacaaggaaggcatccctcctgaccagcagaggttgatctttgccggaaaacagctggaagatggtcgtaccctgtctgactacaacatccagaaagagtccaccttgcacctggtgctccgtctcagaggtgggatgcagatcttcgtgaagaccctgactggtaagaccatcactctcgaggtggagccgagtgacaccattgagaatgtcaaggcaaagatccaagacaaggaaggcatccctcctgaccagcagaggttgatctttgctgggaaacagctggaagatggacgcaccctgtctgactacaacatccagaaagagtccaccctgcacctggtgctccgtcttagaggtgggatgcagatcttcgtgaagaccctgactggtaagaccatcactctcgaagtggagccgagtgacaccattgagaatgtcaaggcaaagatccaagacaaggaaggcatccctcctgaccagcagaggttgatctttgctgggaaacagctggaagatggacgcaccctgtctgactacaacatccagaaagagtccaccctgcacctggtgctccgtcttagaggtgggatgcagatcttcgtgaagaccctgactggtaagaccatcactctcgaagtggagccgagtgacaccattgagaatgtcaaggcaaagatccaagacaaggaaggcatccctcctgaccagcagaggttgatctttgctgggaaacagctggaagatggacgcaccctgtctgactacaacatccagaaagagtccaccctgcacctggtgctccgtctcagaggtgggatgcaaatcttcgtgaagaccctgactggtaagaccatcaccctcgaggtggagcccagtgacaccatcgagaatgtcaaggcaaagatccaagataaggaaggcatccctcctgatcagcagaggttgatctttgctgggaaacagctggaagatggacgcaccctgtctgactacaacatccagaaagagtccactctgcacttggtcctgcgcttgagggggggtgtctaagtttccccttttaaggtttcaacaaatttcattgcactttcctttcaataaagttgttgcattccc

SEQ ID NO: 207063 - protein, 32 aa, Artificial Sequence
  derived and/or modified sequence
VTCYCRRTRCGFRERLSGACGYRGRIYRLCCR

SEQ ID NO: 207064 - protein, 32 aa, Artificial Sequence
  derived and/or modified sequence
RICRCRIGRCLGLEVYFGVCFLHGRLARRCCR

SEQ ID NO: 207065 - protein, 35 aa, Artificial Sequence
  derived and/or modified sequence
LRDLVCYCRSRGCKGRERMNGTCRKGHLLYTLCCR

SEQ ID NO: 207066 - protein, 32 aa, Artificial Sequence
  derived and/or modified sequence
RTCRCRLGRCSRRESYSGSCNINGRIYSLCCR

SEQ ID NO: 207067 - protein, 35 aa, Artificial Sequence
  derived and/or modified sequence
LRDLVCYCRSRGCKGRERMNGTCRKGHLMYTLCCR

SEQ ID NO: 207068 - protein, 35 aa, Artificial Sequence
  derived and/or modified sequence
LRDLVCYCRTRGCKRRERMNGTCRKGHLMYTLCCR

SEQ ID NO: 207069 - protein, 35 aa, Artificial Sequence
  derived and/or modified sequence
LRDLVCYCRKRGCKRRERMNGTCRKGHLMYTLCCR

SEQ ID NO: 207070 - protein, 33 aa, Artificial Sequence
  derived and/or modified sequence
DLVCYCRARGCKGRERMNGTCRKGHLLYMLCCR

SEQ ID NO: 207071 - protein, 76 aa, Artificial Sequence
  derived and/or modified sequence
MRTFALLTAMLLLVALHAQAEARQARADEAAAQQQPGTDDQGMAHSFTWPENAALPLSESAKGLRCICTRGFCRLL

SEQ ID NO: 207072 - protein, 76 aa, Artificial Sequence
  derived and/or modified sequence
MRTFALLTAMLLLVALHAQAEARQARADEAAAQQQPGADDQGMAHSFTRPENAALPLSESARGLRCLCRRGVCQLL

SEQ ID NO: 207073 - protein, 32 aa, Artificial Sequence
  derived and/or modified sequence
ATCYCRTGRCATRESLSGVCEISGRLYRLCCR

SEQ ID NO: 207074 - protein, 32 aa, Artificial Sequence
  derived and/or modified sequence
VTCYCRSTRCGFRERLSGACGYRGRIYRLCCR

SEQ ID NO: 207075 - protein, 29 aa, Artificial Sequence
  derived and/or modified sequence
CSCRTSSCRFGERLSGACRLNGRIYRLCC

SEQ ID NO: 207076 - protein, 31 aa, Artificial Sequence
  derived and/or modified sequence
ACYCRIGACVSGERLTGACGLNGRIYRLCCR

SEQ ID NO: 207077 - protein, 33 aa, Artificial Sequence
  derived and/or modified sequence
VTCFCRRRGCASRERHIGYCRFGNTIYRLCCRR

SEQ ID NO: 207078 - protein, 33 aa, Artificial Sequence
  derived and/or modified sequence
VTCFCRRRGCASRERLIGYCRFGNTIYGLCCRR

SEQ ID NO: 207079 - protein, 33 aa, Artificial Sequence
  derived and/or modified sequence
RRTCRCRFGRCFRRESYSGSCNINGRIFSLCCR

SEQ ID NO: 207080 - protein, 33 aa, Artificial Sequence
  derived and/or modified sequence
VTCFCKRPVCDSGETQIGYCRLGNTFYRLCCRQ

SEQ ID NO: 207081 - protein, 33 aa, Artificial Sequence
  derived and/or modified sequence
RRTCRCRFGRCFRRESYSGSCNINGRISSLCCR

SEQ ID NO: 207082 - protein, 32 aa, Artificial Sequence
  derived and/or modified sequence
RRTCHCRSRCLRRESNSGSCNINGRIFSLCCR

SEQ ID NO: 207083 - protein, 141 aa, Artificial Sequence
  derived and/or modified sequence
  misc_feature (113)..(113): Xaa can be any naturally occurring amino acid
VTPAMRTFALLTAMLLLVALHAQAEARQARADEAAAQQQPGADDQGMAHSFTRPENAALPLSESARGLRCLCRRGVCQLLRRLGSCAFRGLCRICCRASRIKKNTLRSYFESXKKFLLLLYLVLNFLFSSQINTFSQDFCL

SEQ ID NO: 207084 - protein, 141 aa, Artificial Sequence
  derived and/or modified sequence
  misc_feature (113)..(113): Xaa can be any naturally occurring amino acid
VTPAMRTFALLTAMLLLVALHAQAEARQARADEAAAQQQPGADDQGMAHSFTRPENAALPLSESARGLRCICRRGVCQLLRRLGSCAFRGLCRICCRASRIKKNTLRSYFESXKKFLLLLYLVLNFLFSSQINTFSQDFCL

SEQ ID NO: 207085 - protein, 33 aa, Artificial Sequence
  derived and/or modified sequence
VVCACRRALCLPRERRAGFCRIRGRIHPLCCRR

SEQ ID NO: 207086 - protein, 75 aa, Artificial Sequence
  derived and/or modified sequence
ESLQERADEATTQKQSGEDNQDLAISFAGNGLSALRTSGSQARATCYCRIGHCTILESLSGVCEISGRLYRLCCR

SEQ ID NO: 207087 - protein, 35 aa, Artificial Sequence
  derived and/or modified sequence
LRDLVCYCRSRGCKGRERMNGTCRKGHLLYMLCCR

SEQ ID NO: 207088 - protein, 35 aa, Artificial Sequence
  derived and/or modified sequence
LRDLVCYCRKRGCKRREHMNGTCRRGHLMYTLCCR

SEQ ID NO: 207089 - protein, 35 aa, Artificial Sequence
  derived and/or modified sequence
LRDLVCYCRTRGCKRRERMNGTCRKGHLMHTLCCR

SEQ ID NO: 207090 - protein, 35 aa, Artificial Sequence
  derived and/or modified sequence
LRDLVCYCRKRGCKRREHINGTCRKGHLLYMLCCR

SEQ ID NO: 207091 - protein, 35 aa, Artificial Sequence
  derived and/or modified sequence
LRDLVCYCRKRGCKRREHMNGTCRKGHLLYTLCCR

SEQ ID NO: 207092 - protein, 35 aa, Artificial Sequence
  derived and/or modified sequence
LRDLVCYCRTRGCKRREHMNGTCRKGHLMYTLCCR

SEQ ID NO: 207093 - protein, 35 aa, Artificial Sequence
  derived and/or modified sequence
LRDLVCYCRKRGCKRREHMNGTCRKGHLMYTLCCR

SEQ ID NO: 207094 - protein, 35 aa, Artificial Sequence
  derived and/or modified sequence
LRDLVCYCRKRGCKRREHMNGTCRKGHLLYMLCCR

SEQ ID NO: 207095 - protein, 52 aa, Artificial Sequence
  derived and/or modified sequence
MRTLAILAAILLFALLAQAKSLQETADDAATQEQPGEDDQDLAVSFEENGLS

SEQ ID NO: 207096 - protein, 94 aa, Artificial Sequence
  derived and/or modified sequence
MRTIAILAAILLVALQAQAESLQERADEATTQKQSGEDNQDLAISFAGNGLSALRTSGSQARATCYCRTGRCATRESLSGVCEISGRLYRLCCR

SEQ ID NO: 207097 - DNA, 285 bp, Artificial Sequence
  derived and/or modified sequence
atgcggaccatcgccatcctggccgccattctgttggtggcattacaggcccaggccgaaagtctgcaggaacgggcagatgaggctaccacccaaaagcagtcgggggaagataatcaggaccttgccattagctttgctggaaacgggctgagcgctctgcgaacatctggctcacaagcaagggccacctgttattgccgcaccggccggtgcgccacaagagagagtctgagtggcgtgtgtgagatcagtggcagactttatcggctgtgttgccgttag

SEQ ID NO: 207098 - DNA, 285 bp, Artificial Sequence
  derived and/or modified sequence
atgaggaccatcgccatcctggccgccatcctgctggtggccctgcaggcccaggccgagagcctgcaggagcgggcagatgaggccaccacccagaagcagagcggggaggacaaccaggacctggccatcagctttgctggaaatggcctgagcgccctgcggaccagcggcagccaggcccgggccacctgctactgcaggacaggccgctgtgccacccgggagagcctgtctggagtgtgtgagatcagcggccgcctgtaccgcctgtgctgcaggtag

SEQ ID NO: 207099 - DNA, 285 bp, Artificial Sequence
  derived and/or modified sequence
atgcggaccatcgccatcctggccgccatcctgctggtggccctgcaagcgcaagcagaaagtctgcaggaacgcgccgatgaggccaccactcaaaaacagagtggagaagataatcaggatcttgccatctcatttgcaggaaacgggcttagtgccctgcgtacaagcgggagccaggcccgggccacatgctattgccgcacaggccgatgtgccacccgggaaagtctcagtggcgtgtgcgaaatcagcgggagattgtatcggttatgctgtcggtag

SEQ ID NO: 207100 - DNA, 285 bp, Artificial Sequence
  derived and/or modified sequence
atgagaacaatcgcaatattggctgccattctcctggtggcactgcaggcccaggcagaatcgctgcaggagagggctgatgaggcgaccacccagaagcaatctggggaggataatcaggaccttgccatctcttttgccggaaacgggctctcagcactcaggactagtgggagtcaggccagggccacttgctactgtaggactggtaggtgcgcaaccagggagtcactgagtggggtctgtgaaatctcaggtcggttatacagactctgttgcagatag

SEQ ID NO: 207101 - DNA, 285 bp, Artificial Sequence
  derived and/or modified sequence
atgagaaccatcgccatcctggccgccatcctgctggtggccctgcaggcccaggccgagagcctgcaggagagagccgacgaggccaccacccagaagcagagcggcgaggacaaccaggacctggccatcagcttcgccggcaacggcctgagcgccctgagaaccagcggcagccaggccagagccacctgctactgcagaaccggcagatgcgccaccagagagagcctgagcggcgtgtgcgagatcagcggcagactgtacagactgtgctgcagatag

SEQ ID NO: 207102 - DNA, 444 bp, Artificial Sequence
  derived and/or modified sequence
tccactcctgctctccctcctgcaggtgaccccagccatgaggaccatcgccatccttgctgccattctcctggtggccctgcaggcccaggctgagtcactccaggaaagagctgatgaggctacaacccagaagcagtctggggaagacaaccaggaccttgctatctcctttgcaggaaatggactctctgctcttagaacctcaggttctcaggcaagagccacctgctattgccgaaccggccgttgtgctacccgtgagtccctctccggggtgtgtgaaatcagtggccgcctctacagactctgctgtcgctgagcttcctagatagaaaccaaagcagtgcaagattcagttcaaggtcctgaaaaaagaaaaacattttactctgtgtaccttgtgtctttctaaatttctctctccaaaataaagttcaagca

SEQ ID NO: 207103 - protein, 433 aa, Artificial Sequence
  derived and/or modified sequence
MTAASRANPYSIVSSEEDGLHLVTMSGANGFGNGKVHTRRRCRNRFVKKNGQCNIEFANMDEKSQRYLADMFTTCVDIRWRYMLLIFSLAFLASWLLFGIIFWVIAVAHGDLEPAEGRGRTPCVMQVHGFMAAFLFSIETQTTIGYGLRCVTEECPVAVFMVVAQSIVGCIIDSFMIGAIMAKMARPKKRAQTLLFSHNAVVALRDGKLCLMWRVGNLRKSHIVEAHVRAQLIKPRVTEEGEYIPLDQIDIDVGFDKGLDRIFLVSPITILHEIDEASPLFGISRQDLETDDFEIVVILEGMVEATAMTTQARSSYLANEILWGHRFEPVLFEEKNQYKIDYSHFHKTYEVPSTPRCSAKDLVENKFLLPSANSFCYENELAFLSRDEEDEADGDQDGRSRDGLSPQARHDFDRLQAGGGVLEQRPYRRESEI

SEQ ID NO: 207104 - DNA, 1302 bp, Artificial Sequence
  derived and/or modified sequence
atgacagccgcatcgcgagcgaatccatattcaatagtgagtagcgaggaagatgggcttcatctcgtaaccatgtccggggcaaatggctttggtaatggcaaagtgcatacccgtcggcgttgccgtaataggttcgtgaaaaaaaacgggcagtgcaatatcgaatttgcaaatatggacgagaagtctcaaagatacctagctgacatgttcacaacctgtgtggatatccgttggagatatatgctgctgattttctccctcgcatttttggccagttggctgctctttggcatcatcttttgggtcattgcagtagctcacggcgatttggagcctgcagagggacggggaagaaccccatgcgtgatgcaggtgcatggatttatggcagctttcctgttcagcattgagacccagacaaccataggctatgggctccgctgcgtgaccgaagaatgtccagtggccgtgtttatggtagtggcccaatccatcgtgggctgcatcatcgacagctttatgatcggcgcgattatggccaagatggcaaggccgaaaaaacgggcacagacccttcttttctcgcacaatgctgtggtcgcacttcgagacggtaaactgtgcttaatgtggcgagtcggcaatctgcgtaagtcgcatattgttgaagctcatgtacgcgctcagcttattaaaccacgcgtgacagaagaaggtgagtacatcccacttgaccagatcgacatcgatgtggggttcgacaaggggctcgaccggatcttcctcgtgagcccaatcactatactccacgagatagatgaagcttcccctctttttgggataagtcgccaggatctcgaaacagacgacttcgaaatcgtggttatcctggagggcatggtggaagctaccgcaatgacaacccaagctcgaagcagttacttggccaatgagattctgtggggccatcgatttgaaccggtgctgtttgaggagaagaaccagtacaaaatcgattattcacactttcacaagacctacgaggtaccttccacaccaaggtgttctgctaaggatctcgttgaaaacaaatttctgctgccatccgcaaactccttctgttacgagaacgaactggcattcttgagccgtgatgaagaagacgaagccgacggcgatcaggatggccgctctcgggatggactgagcccacaagctcgccatgattttgatcggcttcaggccgggggaggggttctcgagcagagaccctatcgccgggaatcagagatttag

SEQ ID NO: 207105 - DNA, 1302 bp, Artificial Sequence
  derived and/or modified sequence
atgaccgccgccagcagagccaacccctacagcattgtgtcatcagaagaggacggactccatctggtaacaatgtctggagcaaacggatttgggaacggaaaagtgcacacacggaggcggtgcaggaataggttcgttaaaaagaacgggcagtgcaatatcgagtttgccaacatggacgagaagagtcagagatatctggctgacatgttcacaacatgcgtcgacattcggtggcgatatatgttactgattttcagcctagctttcctggcctcatggcttctgtttggtatcatcttctgggtcatcgccgttgcccacggggaccttgaaccggccgagggtaggggccgtacaccctgtgtcatgcaggttcatggatttatggctgctttcctgttctctatcgagacacaaaccactattggatatggactcaggtgcgtcacggaggagtgtcccgtggccgttttcatggtggtggctcagagcattgtgggctgtataatcgactcctttatgatcggtgcgatcatggccaagatggctaggcctaagaagcgcgctcagaccctgttgttcagccacaacgccgtggtcgccctgcgcgatgggaagttatgcctgatgtggagggttggaaaccttagaaaatcccatatcgtggaggctcatgtgcgggcccaattgattaagcccagggttaccgaggaaggagagtacatccctctggaccagatcgacatcgatgtaggtttcgataagggcctcgaccgtatcttcctggtctctccaatcacaatccttcatgagatagacgaggcctcccctctgtttggcatcagccgccaggacctggagactgatgatttcgagattgtagtaatcctcgaggggatggtggaggcaacggccatgactacacaggctagaagctcatatctagctaacgagatcctctggggccatagattcgaacccgtcctcttcgaggaaaaaaaccagtataaaattgactacagtcatttccacaagacatatgaagtcccttccacccccagatgtagtgctaaagacctggtggaaaataaatttctactgccctctgctaattccttctgctacgaaaatgagctggcattccttagtcgagatgaggaggatgaagctgacggcgaccaggatggccgcagccgggatggtctgagcccccaggccaggcatgactttgaccgcttacaagccggggggggggtgctggagcagaggccttatcgccgcgaaagtgaaatatag

SEQ ID NO: 207106 - DNA, 1302 bp, Artificial Sequence
  derived and/or modified sequence
atgacagctgccagccgggccaacccctacagcatcgtgtccagtgaagaagatggcctgcacctggtgaccatgtctggggccaatggatttggaaatggcaaggtgcacacccggcggcgctgcaggaacagatttgtgaagaagaatggccagtgcaacattgaatttgccaacatggatgagaagagccagcgctacctggccgacatgttcaccacctgtgtggacatccgctggagatacatgctgctgatcttcagcctggccttcctggcctcctggctgctgtttggcatcatcttctgggtgattgctgtggcccatggagacctggagcctgctgagggccggggccgcaccccctgtgtgatgcaggtgcacggcttcatggccgccttcctgttcagcattgagacccagaccaccatcggctacggcctgcgctgtgtgacagaggagtgccctgtggccgtgttcatggtggtggcccagagcatcgtgggctgcatcatcgacagcttcatgattggagccatcatggccaagatggcccggcccaagaagagggcccagaccctgctcttcagccacaatgctgtggtggccctgagagatggcaagctgtgcctgatgtggagggtgggcaacctgaggaagagccacatcgtggaggcccacgtgcgggcccagctgatcaagccccgggtgacagaggagggggagtacatccccctggaccagattgatattgatgtgggctttgataaaggcctggaccgcatcttcctggtgagccccatcaccatcctgcacgagattgatgaggccagccccctgtttggcatcagccggcaggacctggagacagatgactttgaaattgtggtgatcctggagggcatggtggaggccacagccatgaccacccaggcccggagcagctacctggccaatgagatcctgtggggccacagatttgagcctgtgctgtttgaggagaagaaccagtacaagattgactacagccacttccacaagacctatgaggtgcccagcaccccccgctgcagcgccaaggacctggtggagaacaagttcctgctgcccagcgccaacagcttctgctatgaaaatgagctggccttcctgagcagagatgaagaagatgaagcagatggagaccaggacggccgcagcagagatggcctgagcccccaggcccggcatgactttgaccggctgcaggccggcggcggcgtgctggagcagaggccctaccgccgggagagcgagatctag

SEQ ID NO: 207107 - DNA, 1302 bp, Artificial Sequence
  derived and/or modified sequence
atgaccgccgccagccgggccaacccctacagcatcgtgagcagcgaagaggatggactgcacttggtaactatgagtggggccaatggcttcggaaacggaaaagtgcatactaggaggcggtgtcggaatcggttcgtgaaaaagaatgggcagtgtaacatcgaattcgcgaatatggatgaaaaaagtcaaagatatcttgccgatatgtttacaacttgtgtcgacataagatggcgatatatgttacttattttcagtctggccttcttggctagctggctgctcttcggtattattttttgggtgatcgcagtggcccacggcgacttagaacctgccgaggggcgcgggcgcaccccatgtgttatgcaggtgcatgggttcatggccgccttcctgttctctattgaaacccagacaacaatcgggtacggattacgatgtgtgaccgaggagtgtcccgttgccgtattcatggtggtggcccagtccattgttgggtgtatcatagactcgtttatgattggagccatcatggccaagatggccagacccaaaaagcgagcacaaacactgttattcagtcacaacgcagttgtggcattaagagatggaaaactctgccttatgtggagggtggggaatctgcgaaaaagccatattgtggaggcacacgtacgtgcccagctgatcaaacctcgagtgacggaggaaggcgaatatataccgctggaccaaatcgacatcgatgtaggattcgataaaggtttggatcggattttcctggtctctcccataaccatccttcatgagatagacgaggcttcacccttattcggcatcagcaggcaggatttagagacagacgatttcgaaatagtggttattctggaaggcatggtggaagccactgctatgactacccaggcccggtcatcctatctagcgaatgagattctctgggggcacaggttcgagccagttttgtttgaggagaaaaaccaatacaaaatagattacagccattttcacaaaacatatgaggtcccgtccactccccgatgctctgccaaggatcttgtggagaacaagttcttgctaccaagcgctaactccttctgctatgagaacgaattggcatttctgagtagagacgaagaagatgaggccgacggagaccaggacgggcggtccagagacggactgtccccacaggcgagacacgacttcgatcgactccaggccgggggtggggtgctggaacaacggccttaccgacgagagtctgagatctag

SEQ ID NO: 207108 - DNA, 1302 bp, Artificial Sequence
  derived and/or modified sequence
atgaccgccgccagccgggccaacccctacagcatcgtgagcagcgaagaagacggactgcacctggtcaccatgagcggcgccaacgggtttggcaacggcaaggtgcacacacgcagacggtgccgaaaccggttcgtgaagaagaacgggcagtgtaacatcgaatttgcaaacatggacgaaaagtcacagagatacctcgccgatatgtttaccacatgtgtggacatccgatggcgctatatgctcttgattttcagtctggcatttttagccagttggctactattcgggatcatcttctgggtgattgcagtcgcccacggagatctagaacctgcagagggacggggaagaaccccctgcgtgatgcaggtgcacggctttatggccgcgtttctgttctctatagaaacccagactacaatcggttatggcctgagatgtgtcaccgaggagtgccccgtggctgtgttcatggttgtggcccagagcattgtcggctgcatcatcgactctttcatgatcggggcaattatggcaaaaatggcacgcccaaagaaaagggcacaaaccctgctgttttcccacaatgccgtcgttgctctacgagacggaaagctctgtttgatgtggcgcgtaggcaacttgcgcaaaagccatattgtggaagcccatgtgcgggcccagttgattaaaccccgcgttacagaggaaggtgagtatattcccctggatcagattgacatcgatgttggatttgacaaaggcctcgacaggatctttctggtaagtcccataactatcctacacgagatagacgaagcgagcccgttattcggaatttcacggcaagaccttgagactgacgatttcgagattgttgtgatactggaagggatggtcgaagcaacagcaatgacaacacaagctcgttcctcatatctcgccaacgaaattctgtggggacatcgattcgagcctgtcctgtttgaggagaaaaatcagtataaaatcgactactcacattttcataagacttacgaagtcccctctaccccccggtgttccgctaaggacctggtcgaaaataaattcctactccccagcgccaatagcttctgttacgagaatgagctggcatttttatcgcgagacgaggaggacgaagctgatggagatcaagatggccgcagccgggacggcctcagtccacaggcccgccatgacttcgaccgcctgcaagccggcggtggggtgcttgagcaacgcccctaccggagggaatcagaaatctag

SEQ ID NO: 207109 - DNA, 5420 bp, Artificial Sequence
  derived and/or modified sequence
cgcgcgcgtcccagtgcgcaagtggctggcggtgtgtgtgtagggggcggcccgggactaggaggggctcggggccaggccggagccgtggtaggctggtgcagcggctgcgcggcgcggcgcggcgcggggcgggcgtgctctccgcggagagttagaggagttgccgagctgagctccggtggagcgaggcgcggagctgggtgcgcgccgagcctctgcctcccgccgcctcctcgccctccattcctcgctccccgtcttctcccggccacaccgccactgctgccgcctccctgggaacagtagccgggggagggggactggcgcggtcagagcctgcgaggaggtgcggggcgccggggcgtaggggagcgcgccgggccctgcccgagatcagataacagccggcgggggagggggtgggccggccgtgctcacagccggaccgagggaccgacgccagccgccccggcccaagcgagcgcccagcggccgggggcgccgtccaggcgcgcgcccccgacccgtggctggaccagggcgatccgctttgcagagaagacgcgcccctcggcatggagcgcccccgggagctgccctgaggcggtggcggcagcggcggcgatgcagccagcgcggcagctgccggggccaggaacggccgcccggagcttggaggacgccgagcgcgccgcgcccgggccactgaccgaggatgttctagtgactggatcctttccagttggtgcctgggaaatggcagccactactaattcagccttgaagacagtaccgtgcccactcagcaccattacatagaagatagaactcaagaggagccgccctgcctggagctagcctgggggcgagccagggtcccccaacccccgggatgaccgcggccagccgggccaacccctacagcatcgtgtcatcggaggaggacgggctgcacctggtcaccatgtcgggcgccaacggcttcggcaacggcaaggtgcacacgcggcgcaggtgccgcaaccgcttcgtcaagaagaatggccagtgcaacattgagttcgccaacatggacgagaagtcacagcgctacctggctgacatgttcaccacctgtgtggacatccgctggcggtacatgctgctcatcttctcgctggccttccttgcctcctggctgctgttcggcatcatcttctgggtcatcgcggtggcacacggtgacctggagccggctgagggccggggccgcacaccctgtgtgatgcaggtgcacggcttcatggcggccttcctcttctccatcgagacgcagaccaccatcggctacgggctgcgctgtgtgacggaggagtgcccggtggccgtcttcatggtggtggcccagtccatcgtgggctgcatcatcgactccttcatgattggtgccatcatggccaagatggcaaggcccaagaagcgggcacagacgctgctgttcagccacaacgccgtggtggccctgcgtgacggcaagctctgcctcatgtggcgtgtgggtaacctgcgcaagagccacattgtggaggcccatgtgcgcgcgcagctcatcaagccgcgggtcaccgaggagggcgagtacatcccgctggaccagatcgacatcgatgtgggcttcgacaagggcctggaccgcatctttctggtgtcgcccatcaccatcttgcatgagattgacgaggccagcccgctcttcggcatcagccggcaggacctggagacggacgactttgagatcgtggtcatcctggaaggcatggtggaggccacagccatgaccacccaggcccgcagctcctacctggccaatgagatcctgtggggtcaccgctttgagcccgtgctcttcgaggagaagaaccagtacaagattgactactcgcacttccacaagacctatgaggtgccctctacgccccgctgcagtgcgaaggatctggtagagaacaagttcctgctgcccagcgccaactccttctgctacgagaacgagctggccttcctgagccgtgacgaggaggatgaggcggacggagaccaggacggccgaagccgggacggcctcagcccccaggccaggcatgactttgacagactccaggctggcggcggggtcctggagcagcggccctacagacgggagtcagagatctgagccaaccttggccgacatgcagcatccacccccggctggggagaggccccgcggtcgctcaggggccccgggtttgagcagaacgggcccagtgccctgggttgcagactcagtagcgttttagtcgttttatgtttctttgcaacggcctcagaagtttggccggagagggggcagccagagcggcagcccccggcctcagaggctatcacaggctcagggcaaagaagtggcctcctggggggccaggccacgagggccagggcttctgcctgaagatggagctgcagcctgcggggaagcagctcagctcgatggtgggcccagcctctgctgtccaaggctggctagctgcggtgctccttgctggtttttaacttggggagaaacaccgggtttcagctttcttgaccttagcttgggtgagactgtttacaaaaaaaaaaaattaccatgcaattgaaaaaatttttttttaattcacagggggcaaaaagaacaattagaattccatgggtctgccaggatgcagcagctggctgaaggctccagagggttccccgaggtgggactggcctctccccgtgtgtgtgggcaccacagtccctgggcaagcagggtgctctgggaccgcacttcatcgagctcacgagccagctaggctctgtttgtgatagaaaaatcaagaccatgttaatgatcgtaataaaagctttctactgtcgttggggtggtgggtggggctgggaagaaactggtttgagcttttagagtttgcctttgtaccttagagatgtgtctcagggccaggcatgggacctgccatcgagggttcctccccgcaccctcgattttcctgttttgcttctctctccatttctgtccaggcctccgcccaattccacagtgaggggtggttaggagctataggccgggatggctccttgggaagggaagtcgggatcccaggctaggaggaagctggcagccccgtccccactgggcccacagtgtgagtcgtgccttagagactccgggttgtcctgttctttctgggcttgctcatctccccccaaccctgtcccaccccacccctcccatacctccactgctgaagttcctccagcccctctgtctgccttgtgaaggtggcaggggccaggtctgcctgacataggaccacatcctgtccctccctcacctggagcagcacagcagagttcaggcagggcacagccaggccctggtcagcgctgaatggcagaggaaagatcttaggaaaggagaggaatcgccaccccctcctgccaactgggatgactggggagggccacgctcattcaaagctgaatcagaaaccagccgtggaacagaattcctgccgagtcttccagggccgctcctccaccaccctcccccaggttgaggcactatggcaccctcatcaggaagaggtttggggtccccttgttgtcactgctggctctgccaccccatcttgttcatggcagctggttgggtcaggtccatggtagagccaggcccttcccagggctgcggagaaaacctgctctcttctagtcgggcttctccagaagccagtaatcagaaaggatgtgtctcctgctccaactctgcccccgagacagctcagagccagaaggcaccccgagacagctcagagccagaaggcaccccgagacagctcagagccagaaggcaccgaggactctggcccaagtggggaagctgaggcagagagcagagggggtcatgcagtgagtgggtggggtgcaggagacagagaggggctgggggcgtggggtgggggtgtctgcctcttccctccacctcctcccctccttagcagctgaagactcagccctgaggtctggggcaatggaagtcaagacacccgacccctacatcctggggtaggcccgactcagcatcctgtcccagcttcagccccacactcatttctggcatagaagattccgccgaggcagctctttcctctcggggtctgccaggggtgcctcagctggttcctgctcccaggcctagccccgaagccttaggggccttctcagccttagccctgggtactggggtgaagttggcaggggagagcttgacacttcgcctccctgatggccatgctgagggacagtggtgaccctggtcacttggtgctggtgtaggggcctgtgcccttccagggccagtgagacagccttctactcccccgacccagagctgagtccgaggaccccaggcccacctcctggccctcttggaggtctgtgctcttacctcccagcccccaccctgcgggagagcagccccagcgcctcatctccccaaaggcggcagatgcttgattctcctgccctctttcttccttccctcgtatttatttatttatttattgcttgtgctaaagaccaaaatagtctccctctttagtgcacttgaagcgggagggcggatgggatgagccaggagcgaggaagacttggcccctggggagtgtgtgtgtggaggcgtgtgcctgtgtgagcctgcatgcatacatgtgtggtgcacacatgcacactcggctcttcatgtgtatgactgggttagtaatacagatacgtgatctatacgtgtgtgtgtgtgtgtgtgtgtgtgtgtgtgtgtatgcaggcggttatgtgtctgtctacccccaggtgtttccgtgtacaagtttcctgtgagggagggcacccacccatcaggttgggcactggcacaggtgaaccccacagtccccgaccctctgccctgattatgcacgtctgctcctgagtggagcttgtgttccaggatgagacatctggaggtgagcgtgtgcgtccggctcgtgtgtaggaggctgtgtgtgtgcccatgtgaaaccgtgtacttgagtgtgtgtctgtgtgcagcctatgcctgctgctcagagcacggtggccaccccctgagcctctgctggtgctgtgctgcgtggtccccacccagagggtcctggggggcggggaggagccaccgttgggaggcccctgtacggggtgtctgccctgcgtgagggcatagaatgtcaaattattttaaatggtgaaactggagagttttcatgttattttcaatacatagcagtatctaaagacgtaggcgatgagactagaccacattaaatgcattttgatctctt

SEQ ID NO: 207110 - DNA, 2455 bp, Artificial Sequence
  derived and/or modified sequence
ggcgcggagctgggtgcgcgccgagcctctgcctcccgccgcctcctcgccctccattcctcgctccccgtcttctcccggccacaccgccactgctgccgcctccctgggaacagtagccgggggagggggactggcgcggtcagagcctgcgaggaggtgcggggcgccggggcgtaggggagcgcgccgggccctgcccgagatcagataacagccggcgggggagggggtgggccggccgtgctcacagccggaccgagggaccgacgccagccgccccggcccaagcgagcgcccagcggccgggggcgccgtccaggcgcgcgcccccgacccgtggctggaccagggcgatccgctttgcagagaagacgcgcccctcggcatggagcgcccccgggagctgccctgaggcggtggcggcagcggcggcgatgcagccagcgcggcagctgccggggccaggaacggccgcccggagcttggaggacgccgagcgcgccgcgcccgggccactgaccgaggatgttctagtgactggatcctttccagttggtgcctgggaaatggcagccactactaattcagccttgaagacagtaccgtgcccactcagcaccattacatagaagatagaactcaagaggagccgccctgcctggagctagcctgggggcgagccagggtcccccaacccccgggatgaccgcggccagccgggccaacccctacagcatcgtgtcatcggaggaggacgggctgcacctggtcaccatgtcgggcgccaacggcttcggcaacggcaaggtgcacacgcggcgcaggtgccgcaaccgcttcgtcaagaagaatggccagtgcaacattgagttcgccaacatggacgagaagtcacagcgctacctggctgacatgttcaccacctgtgtggacatccgctggcggtacatgctgctcatcttctcgctggccttccttgcctcctggctgctgttcggcatcatcttctgggtcatcgcggtggcacacggtgacctggagccggctgagggccggggccgcacaccctgtgtgatgcaggtgcacggcttcatggcggccttcctcttctccatcgagacgcagaccaccatcggctacgggctgcgctgtgtgacggaggagtgcccggtggccgtcttcatggtggtggcccagtccatcgtgggctgcatcatcgactccttcatgattggtgccatcatggccaagatggcaaggcccaagaagcgggcacagacgctgctgttcagccacaacgccgtggtggccctgcgtgacggcaagctctgcctcatgtggcgtgtgggtaacctgcgcaagagccacattgtggaggcccatgtgcgcgcgcagctcatcaagccgcgggtcaccgaggagggcgagtacatcccgctggaccagatcgacatcgatgtgggcttcgacaagggcctggaccgcatctttctggtgtcgcccatcaccatcttgcatgagattgacgaggccagcccgctcttcggcatcagccggcaggacctggagacggacgactttgagatcgtggtcatcctggaaggcatggtggaggccacagccatgaccacccaggcccgcagctcctacctggccaatgagatcctgtggggtcaccgctttgagcccgtgctcttcgaggagaagaaccagtacaagattgactactcgcacttccacaagacctatgaggtgccctctacgccccgctgcagtgcgaaggatctggtagagaacaagttcctgctgcccagcgccaactccttctgctacgagaacgagctggccttcctgagccgtgacgaggaggatgaggcggacggagaccaggacggccgaagccgggacggcctcagcccccaggccaggcatgactttgacagactccaggctggcggcggggtcctggagcagcggccctacagacgggagtcagagatctgagccaaccttggccgacatgcagcatccacccccggctggggagaggccccgcggtcgctcaggggccccgggtttgagcagaacgggcccagtgccctgggttgcagactcagtagcgttttagtcgttttatgtttctttgcaacggcctcagaagtttggccggagagggggcagccagagcggcagcccccggcctcagaggctatcacaggctcagggcaaagaagtggcctcctggggggccaggccacgagggccagggcttctgcctgaagatggagctgcagcctgcggggaagcagctcagctcgatggtgggcccagcctctgctgtccaaggctggctagctgcggtgctccttgctggtttttaacttggggagaaacaccgggtttcagctttcttgaccttagcttgggtgagactgtttacaaaaaaaaaaaa

SEQ ID NO: 207111 - DNA, 1302 bp, Artificial Sequence
  derived and/or modified sequence
atgactgccgcttccagagccaacccctattcgatcgtgtccagtgaggaagatgggttgcacctggtgacgatgtccggtgccaatggctttggcaatggcaaggtccacactaggcgccgatgcagaaaccggttcgtgaaaaaaaacggccaatgcaatatagaattcgccaacatggacgagaaaagccaaaggtacttagctgacatgtttactacctgtgttgacatccgctggcgctatatgttactcatcttttcccttgctttcttggccagttggctgcttttcggcattatattttgggttatcgccgtggctcacggcgatcttgagccagccgaaggcaggggcaggacaccttgcgtgatgcaagttcatggctttatggctgcctttttgttcagcattgaaacacaaaccaccattggctatggcctgaggtgtgtgaccgaagaatgtcccgtggctgttttcatggtagtagcgcagtccatagttggctgcatcatcgacagctttatgattggggcaatcatggccaaaatggccaggcccaagaagagagcccaaacactcctgttctctcataacgccgtggtggccctccgtgacggcaagctatgtttaatgtggcgggtgggtaatttacggaagagtcatatcgtggaggcacacgttcgggctcagctgatcaaaccgagggtgacggaggagggcgagtacattccactagaccaaatcgacattgatgttgggtttgataagggtctggataggatctttctggtatctcctatcaccattctacacgagatcgacgaggcaagtcccctctttgggatctcccgccaagatctggaaaccgacgactttgagatagtcgtgatccttgaaggaatggtggaggcgaccgccatgactacccaggcaaggtcaagctacttagctaacgaaatcctatggggacatcgattcgagcccgtcttgttcgaagagaaaaaccaatataagatagattattcccactttcataaaacttatgaggtgccatcaacccccagatgctccgcaaaggatttggtagaaaataagtttctgcttcctagtgctaattccttctgctacgagaatgaactcgcatttctgtcccgagatgaggaagatgaggccgatggagaccaggatggtcgaagcagggatggcttgagcccccaagctcgccacgattttgacaggcttcaggccggagggggagtgctcgagcaaagaccctatcggcgagagtccgaaatttag

SEQ ID NO: 207112 - DNA, 1302 bp, Artificial Sequence
  derived and/or modified sequence
atgacagccgcttcacgggcaaacccgtattctatcgtgtcctctgaagaagacggcctgcatctcgtgaccatgagtggggctaacggatttgggaatgggaaagttcacacacgacggaggtgtaggaaccggttcgtgaagaagaatgggcagtgtaacattgaattcgccaacatggacgaaaagagtcaacggtatttggcagatatgtttactacctgcgtcgatattcggtggcgctacatgcttctgatcttctctctcgcatttctggcgtcctggctgttgttcggcattatcttctgggtgatcgccgtcgcccacggtgatctggagccggctgagggtaggggacgtacaccgtgtgtgatgcaagtccacggctttatggccgcatttcttttctccatcgagacgcagaccactatcggctatgggctcagatgtgtgactgaggagtgccccgtcgcggttttcatggttgtggcacagtccatcgtgggatgtatcatagactctttcatgataggagcaataatggccaagatggcaagacccaagaaaagggctcagaccctgctcttcagtcacaatgccgttgtggccttgcgcgacggtaagttgtgtctgatgtggagagtgggaaacttaaggaagtcccatatcgttgaggcccacgtccgagcacagctcatcaaaccgcgagttacagaagaaggggaatatataccactcgatcaaatagacatcgacgtgggtttcgacaaagggctggatagaattttccttgtgagcccaattacgattctccatgagattgacgaagccagtcctttattcgggatatcaaggcaagatctggaaaccgacgatttcgaaatcgtagtgattttagaaggtatggtggaggctaccgctatgaccacccaggccaggtcgtcctacctggctaatgagattctctgggggcaccgtttcgaaccagtgttattcgaagaaaagaaccagtacaaaattgactatagccattttcacaaaacctatgaggtgccaagcacaccacgctgtagtgctaaggatctcgtggaaaacaagttcttgcttccttctgctaattctttttgttacgaaaatgaattagccttcttgagccgggacgaggaagacgaagccgacggcgaccaggatggcagatccagagatgggctgtccccacaagcaagacatgactttgatcgcttacaggccggaggtggagtgctagagcagcggccttacagacgtgaatcagaaatatag

SEQ ID NO: 207113 - DNA, 1302 bp, Artificial Sequence
  derived and/or modified sequence
atgaccgccgccagcagagccaacccctacagcatcgtgagcagcgaggaggacggcctgcacctggtgaccatgagcggcgccaacggcttcggcaacggcaaggtgcacaccagaagaagatgcagaaacagattcgtgaagaagaacggccagtgcaacatcgagttcgccaacatggacgagaagagccagagatacctggccgacatgttcaccacctgcgtggacatcagatggagatacatgctgctgatcttcagcctggccttcctggccagctggctgctgttcggcatcatcttctgggtgatcgccgtggcccacggcgacctggagcccgccgagggcagaggcagaaccccctgcgtgatgcaggtgcacggcttcatggccgccttcctgttcagcatcgagacccagaccaccatcggctacggcctgagatgcgtgaccgaggagtgccccgtggccgtgttcatggtggtggcccagagcatcgtgggctgcatcatcgacagcttcatgatcggcgccatcatggccaagatggccagacccaagaagagagcccagaccctgctgttcagccacaacgccgtggtggccctgagagacggcaagctgtgcctgatgtggagagtgggcaacctgagaaagagccacatcgtggaggcccacgtgagagcccagctgatcaagcccagagtgaccgaggagggcgagtacatccccctggaccagatcgacatcgacgtgggcttcgacaagggcctggacagaatcttcctggtgagccccatcaccatcctgcacgagatcgacgaggccagccccctgttcggcatcagcagacaggacctggagaccgacgacttcgagatcgtggtgatcctggagggcatggtggaggccaccgccatgaccacccaggccagaagcagctacctggccaacgagatcctgtggggccacagattcgagcccgtgctgttcgaggagaagaaccagtacaagatcgactacagccacttccacaagacctacgaggtgcccagcacccccagatgcagcgccaaggacctggtggagaacaagttcctgctgcccagcgccaacagcttctgctacgagaacgagctggccttcctgagcagagacgaggaggacgaggccgacggcgaccaggacggcagaagcagagacggcctgagcccccaggccagacacgacttcgacagactgcaggccggcggcggcgtgctggagcagagaccctacagaagagagagcgagatctag

SEQ ID NO: 207114 - protein, 436 aa, Artificial Sequence
  derived and/or modified sequence
MLYAKPPPTINGIKGLQRKERLKPAHIHLQQLTCFSITCSSTMSYSCCLPSLGCRTSCSSRPCVPPSCHGYTLPGACNIPANVSNCNWFCEGSFNGSEKETMQFLNDRLASYLEKVRQLERDNAELEKLIQERSQQQEPLLCPSYQSYFKTIEELQQKILCAKAENARLVVNIDNAKLASDDFRSKYQTEQSLRLLVESDINSIRRILDELTLCKSDLESQVESLREELICLKKNHEEEVNTLRSQLGDRLNVEVDTAPTVDLNQVLNETRSQYEALVEINRREVEQWFATQTEELNKQVVSSSEQLQSCQAEIIELRRTVNALEIELQAQHNLRDSLENTLTESEAHYSSQLSQVQSLITNVESQLAEIRCDLERQNQEYQVLLDVRARLECEINTYRSLLESEDCKLPCNPCATTNASGNSCGPCGTSQKGCCN

SEQ ID NO: 207115 - DNA, 1311 bp, Artificial Sequence
  derived and/or modified sequence
atgttgtatgccaagcctcccccaacaattaatggcattaaaggtctgcagcgaaaagagcgccttaaacctgcccatatccacctgcaacagctgacttgcttttctataacttgcagctctaccatgagctattcttgctgcctgccctctctggggtgcagaacaagttgcagtagtcgtccgtgcgtgccgccctcatgccacgggtacactcttccaggagcatgtaatatcccagcaaatgtcagtaactgcaactggttttgcgaagggtctttcaatggttcagaaaaggaaacaatgcagtttttgaacgatcgtctggcttcctacctggagaaggtgcgacagctggaaagagataatgcggagcttgaaaagctgatccaagagagatcccagcaacaggagccgctgctgtgtccctcttaccagtcctacttcaaaaccatcgaggagctgcaacagaaaattctctgtgctaaggccgagaatgcgcgactggtcgtcaatatcgacaacgctaagttagcctcagacgattttcgttccaaatatcagaccgagcagtcactcagactgctggtcgaatccgatatcaactctattcggcgaatactggatgagttgacactctgtaagtccgatctagagtcacaggtggaatcactccgggaggagctgatctgtctaaagaagaatcacgaagaggaagtcaataccctcaggtcgcagcttggagatagacttaatgtagaagtggacacagcgccaactgtggacctgaatcaagtgctcaacgagacacgcagtcaatacgaggcactggttgaaatcaaccgaagagaggtggaacaatggttcgccacacaaactgaggagctcaacaagcaagtggtttcaagctccgaacagcttcagtcctgtcaggccgagatcatcgagctgcgaaggacggtcaacgcacttgaaatcgagctacaagcccaacacaaccttagggacagtcttgagaataccctcactgagtccgaggcccactacagtagccagttgagtcaggtgcagagcctgattacgaatgtggagtcgcagttggctgagatccgctgcgatctagaacgccagaaccaggagtaccaggttttgcttgatgtacgcgcccgcctggagtgcgaaattaatacatacagatcactgttggaaagcgaagactgcaaattaccatgcaacccttgcgcgactactaatgccagcggaaactcgtgcggaccatgcgggacgagccaaaaggggtgctgcaactag

SEQ ID NO: 207116 - DNA, 1728 bp, Artificial Sequence
  derived and/or modified sequence
aaaattagctgaagcattaggaaaggaaactatgctgtatgccaagcccccacccacaattaatggtataaaaggactgcagaggaaggagagactcaaacctgcccacatccacctccagcagcttacctgcttttccattacctgttccagcaccatgtcttacagttgttgcctgcccagcctgggctgccgcaccagctgctcctcccggccctgcgtgccccccagctgccacggctacaccctgcctggggcctgcaacatccccgccaatgtgagcaactgcaactggttctgtgagggctccttcaatggcagcgagaaggagactatgcagttcctgaacgaccgcctggccagctacctggagaaggtgcgtcagctggagcgggacaacgcggagctggagaaactcatccaggagcggtcccagcagcaggagcccttgctgtgccccagctaccagtcctacttcaagaccattgaggagctccagcagaagattctgtgtgccaaggctgagaatgccaggctggtggtgaacattgacaatgccaagctggcctctgacgacttcagaagcaagtaccagacggagcagtccctgaggctgttggtggagtcggacatcaacagcatacgcaggatcctggatgagctgaccctctgcaagtctgacctggagtcccaggtggagtccctgagggaggagctgatctgcttgaagaagaaccatgaggaggaggttaacaccctgcgctcccagcttggagaccgcctcaacgtggaggtggacactgcccccactgtggacctgaaccaggtcctgaacgagaccaggagtcagtatgaggctctggtggaaattaaccgcagggaagtggagcaatggttcgccacgcagaccgaggagctgaacaagcaggtggtatccagctcagagcagctgcagtcctgccaggcggagatcatcgagctgagacgcacagtcaacgccctggagatcgagctgcaggcccagcacaacctgcgagactctctggaaaacacgctgacggagagcgaggcccactacagctcccagctgtcccaggtgcagagcctgatcaccaacgtggagtctcagctggcagagatccgctgtgacctggagcggcagaaccaggagtaccaggtgctgctggacgtgcgtgcccggctggagtgtgagatcaacacgtaccggagcctcctggagagtgaggactgcaagctcccctgcaacccatgcgccaccaccaatgctagtggcaactcctgtggaccctgtggcacctctcaaaagggttgctgtaattgaaaagcttgtatcctctttgaagacatctacaaagccatttagatcaaccacaggaaggatcctcaagtcctgacttttctggagctcagctgacatcaagaaacctcatcttgcctctatgttatttctagaatgctgaaaagctttcctgacccaagcaaagacacacatcatcaacttccaatgtctggacaactccttcctgttgagggtcgagcctgtttgtttctaaagatgttcagctccctgtaatctgagctccagttactacttaaggtgtttcctgaacgtactactgcatttcctgttttccttttttctttggcattctctggaatgcaaggaggagacttcatttacttcccaataaacttcatttctctggc

SEQ ID NO: 207117 - DNA, 1751 bp, Artificial Sequence
  derived and/or modified sequence
aaaattagctgaagcattaggaaaggaaactatgctgtatgccaagcccccacccacaattaatggtataaaaggactgcagaggaaggagagactcaaacctgcccacatccacctccagcagcttacctgcttttccattacctgttccagcaccatgtcttacagttgttgcctgcccagcctgggctgccgcaccagctgctcctcccggccctgcgtgccccccagctgccacggctacaccctgcctggggcctgcaacatccccgccaatgtgagcaactgcaactggttctgtgagggctccttcaatggcagcgagaaggagactatgcagttcctgaacgaccgcctggccagctacctggagaaggtgcgtcagctggagcgggacaacgcggagctggagaaactcatccaggagcggtcccagcagcaggagcccttgctgtgccccagctaccagtcctacttcaagaccattgaggagctccagcagaagattctgtgtgccaaggctgagaatgccaggctggtggtgaacattgacaatgccaagctggcctctgacgacttcagaagcaagtaccagacggagcagtccctgaggctgttggtggagtcggacatcaacagcatacgcaggatcctggatgagctgaccctctgcaagtctgacctggagtcccaggtggagtccctgagggaggagctgatctgcttgaagaagaaccatgaggaggaggttaacaccctgcgctcccagcttggagaccgcctcaacgtggaggtggacactgcccccactgtggacctgaaccaggtcctgaacgagaccaggagtcagtatgaggctctggtggaaattaaccgcagggaagtggagcaatggttcgccacgcagaccgaggagctgaacaagcaggtggtatccagctcagagcagctgcagtcctgccaggcggagatcatcgagctgagacgcacagtcaacgccctggagatcgagctgcaggcccagcacaacctgcgagactctctggaaaacacgctgacggagagcgaggcccactacagctcccagctgtcccaggtgcagagcctgatcaccaacgtggagtctcagctggcagagatccgctgtgacctggagcggcagaaccaggagtaccaggtgctgctggacgtgcgtgcccggctggagtgtgagatcaacacgtaccggagcctcctggagagtgaggactgcaagctcccctgcaacccatgcgccaccaccaatgctagtggcaactcctgtggaccctgtggcacctctcaaaagggttgctgtaattgaaaagcttgtatcctctttgaagacatctacaaagccatttagatcaaccacaggaaggatcctcaagtcctgacttttctggagctcagctgacatcaagaaacctcatcttgcctctatgttatttctagaatgctgaaaagctttcctgacccaagcaaagacacacatcatcaacttccaatgtctggacaactccttcctgttgagggtcgagcctgtttgtttctaaagatgttcagctccctgtaatctgagctccagttactacttaaggtgtttcctgaacgtactactgcatttcctgttttccttttttctttggcattctctggaatgcaaggaggagacttcatttacttcccaataaacttcatttctctggcataataaatgtttctcattcata

SEQ ID NO: 207118 - DNA, 1311 bp, Artificial Sequence
  derived and/or modified sequence
atgctgtatgccaagcccccacccaccatcaatggcatcaagggcctgcagaggaaggagcggctgaagccagcccacatccacctgcagcagctgacctgcttcagcatcacctgcagcagcaccatgagctacagctgctgcctgcccagcctgggctgcaggaccagctgcagcagccggccctgtgtgccccccagctgccacggctacaccctgcccggggcctgcaacatcccagccaacgtgagcaactgcaactggttctgtgagggcagcttcaatggaagtgagaaggagaccatgcagttcctgaatgaccggctggccagctacctggagaaggtgcggcagctggagcgggacaatgctgagctggagaagctgatccaggagaggagccagcagcaggagcccctgctgtgccccagctaccagagctacttcaagaccatcgaggagctgcagcagaagatcctgtgtgccaaggcagaaaatgcccggctggtggtgaacatcgacaatgccaagctggccagtgatgacttccgcagcaagtaccagacagagcagagcctgcggctgctggtggagagtgacatcaacagcatccgccgcatcctggatgagctgaccctgtgcaagagtgacctggagagccaggtggagagcctgcgggaggagctgatctgcctgaagaagaaccacgaggaggaggtgaacaccctgcggagccagctgggggaccggctgaatgtggaggtggacacagcccccaccgtggacctgaaccaggtgctgaatgagaccaggagccagtatgaggccctggtggagatcaacagaagagaggtggagcagtggtttgccacccagacagaggagctgaacaagcaggtggtgagcagcagcgagcagctgcagagctgccaggccgagatcatcgagctgcggaggacagtgaatgccctggagattgagctgcaggcccagcacaacctgcgggacagcctggagaacaccctgacagaaagtgaggcccactacagcagccagctgagccaggtgcagagcctcatcaccaacgtggagagccagctggccgagatccgctgtgacctggagcggcagaaccaggagtaccaggtgctgctggatgtgcgggcccggctggagtgtgagatcaacacctaccgcagcctgctggagagcgaggactgcaagctgccctgcaacccctgtgccaccaccaatgccagcggcaacagctgtggcccctgtggcaccagccagaagggctgctgcaactag

SEQ ID NO: 207119 - DNA, 1311 bp, Artificial Sequence
  derived and/or modified sequence
atgctgtacgccaagcccccccccaccatcaacggcatcaagggcttgcagcgaaaggaaagactgaagcctgcacacatacatttgcagcagctgacctgctttagcatcacctgcagcagcactatgagttacagttgctgcttgccgagcttaggatgcaggaccagttgttctagtaggccctgcgttccaccctcctgccatggttacaccctgcctggtgcttgtaatatccctgcaaacgtttccaactgtaactggttctgtgaaggctcatttaatggatctgagaaggaaacaatgcagttcctcaacgatcgcctcgctagttatctggagaaagtgagacagctggaacgggacaatgctgagctggagaagctgatacaggagaggtcccagcagcaggagccgctcctgtgtccatcctaccagagttattttaaaaccatcgaggagttgcaacaaaagatactctgcgcaaaagctgaaaacgcaagactcgtggtgaacatcgataatgccaagcttgcgagcgatgatttccgatctaagtaccagacggaacagagccttcgtctgctcgtggagtcagatattaactcaatcaggaggatcctggacgaactcactttgtgcaagtcagacctcgagtcccaggttgaatctcttcgcgaggagcttatctgtctgaaaaagaatcatgaagaggaggtcaatactctccgaagccagttaggtgatagattgaacgtggaagtcgatacagcccccacagttgacctgaaccaagtactgaacgagacaaggagtcagtacgaagcactcgtggagatcaatcgccgggaagtggagcagtggtttgctactcagactgaagagctcaataaacaggtcgtctccagctccgagcaactgcagtcttgccaggccgagatcattgagctcagaagaacagtcaacgccttggagatcgagttacaggctcagcataacctgcgggactcactcgagaacaccctgaccgaaagtgaggcacattacagcagccaactctcacaagtgcagtctctgattacgaatgtcgagtcacagctggccgagattcggtgcgatttagaaagacaaaatcaggagtatcaggtcctcttagacgtgcgggcccgactggaatgcgaaattaatacataccgctcgctgttagaaagcgaggactgcaagttgccgtgcaatccttgtgccactacaaacgctagtggcaattcatgcggcccatgcgggacctcgcaaaaaggatgctgtaactag

SEQ ID NO: 207120 - DNA, 1311 bp, Artificial Sequence
  derived and/or modified sequence
atgctgtatgcaaagccccctccaacaattaatgggatcaagggactgcagaggaaggagagattaaaacctgcccatatacacctgcagcagctgacctgtttctctattacctgcagctctacaatgagctactcctgttgtctgccttcccttggttgtagaacttcttgtagctctagaccttgtgttcctccctcctgccacggctatacacttcctggagcgtgcaacattcccgcaaacgtttctaactgtaattggttttgtgagggaagttttaatggcagcgagaaggaaactatgcagtttcttaatgacaggctggcctcctatctcgaaaaagtgcggcagttggagcgagacaacgctgaacttgagaagcttatacaggagaggtcacagcaacaggagcctctcctgtgcccatcctaccaatcatatttcaaaaccatcgaggaattgcaacagaaaattctgtgcgcaaaagccgagaatgctcggctagtggtaaatatcgacaacgcgaaactcgccagcgatgacttccgttctaagtatcagaccgagcagtcgctgagattgttggtcgagagtgacataaacagcatcaggcgtatcctcgacgaactcacattgtgtaaaagcgatctggagagccaggttgagtctctgagggaagaacttatctgccttaagaagaatcacgaagaggaggtgaacacattgagaagccagctgggagataggctgaacgtagaagtggatactgccccaacagtggacctgaaccaggtgctgaacgaaaccagatcccaatatgaggccctcgtcgagataaacaggagagaggttgaacaatggttcgccacccaaactgaggaactgaacaaacaggtggtgagctcatcagagcagctgcagagctgtcaggctgaaattattgagcttagacgtactgttaatgcccttgaaatcgagctgcaagctcagcacaatctcagagatagtctcgaaaacaccctgactgaaagtgaggctcattatagcagtcagctctcccaggtgcaatccctcattacaaacgtagagtcccaattggccgagatccgatgcgacctcgagcggcagaaccaggagtatcaggttctgctcgacgtccgcgcacggctggagtgcgagattaacacgtaccggagtctgctggagtcagaggactgtaagttgccatgcaatccgtgtgccaccactaatgctagcgggaattcatgtggaccgtgcgggacgtcgcaaaagggctgctgcaactag

SEQ ID NO: 207121 - DNA, 1311 bp, Artificial Sequence
  derived and/or modified sequence
atgctgtacgccaagcccccccccaccatcaacggcatcaagggcctgcagagaaaggagagactgaagcccgcccacatccacctgcagcagctgacctgcttcagcatcacctgcagcagcaccatgagctacagctgctgcctgcccagcctgggctgcagaaccagctgcagcagcagaccctgcgtgccccccagctgccacggctacaccctgcccggcgcctgcaacatccccgccaacgtgagcaactgcaactggttctgcgagggcagcttcaacggcagcgagaaggagaccatgcagttcctgaacgacagactggccagctacctggagaaggtgagacagctggagagagacaacgccgagctggagaagctgatccaggagagaagccagcagcaggagcccctgctgtgccccagctaccagagctacttcaagaccatcgaggagctgcagcagaagatcctgtgcgccaaggccgagaacgccagactggtggtgaacatcgacaacgccaagctggccagcgacgacttcagaagcaagtaccagaccgagcagagcctgagactgctggtggagagcgacatcaacagcatcagaagaatcctggacgagctgaccctgtgcaagagcgacctggagagccaggtggagagcctgagagaggagctgatctgcctgaagaagaaccacgaggaggaggtgaacaccctgagaagccagctgggcgacagactgaacgtggaggtggacaccgcccccaccgtggacctgaaccaggtgctgaacgagaccagaagccagtacgaggccctggtggagatcaacagaagagaggtggagcagtggttcgccacccagaccgaggagctgaacaagcaggtggtgagcagcagcgagcagctgcagagctgccaggccgagatcatcgagctgagaagaaccgtgaacgccctggagatcgagctgcaggcccagcacaacctgagagacagcctggagaacaccctgaccgagagcgaggcccactacagcagccagctgagccaggtgcagagcctgatcaccaacgtggagagccagctggccgagatcagatgcgacctggagagacagaaccaggagtaccaggtgctgctggacgtgagagccagactggagtgcgagatcaacacctacagaagcctgctggagagcgaggactgcaagctgccctgcaacccctgcgccaccaccaacgccagcggcaacagctgcggcccctgcggcaccagccagaagggctgctgcaactag

SEQ ID NO: 207122 - protein, 229 aa, Artificial Sequence
  derived and/or modified sequence
MNGDDAFVRRPRVGSQIPEKMQKHPWRQVCDRGIHLVNLSPFWKVGREPASSIKALLCGRGEARAFDDIAKYFSEKEWEKMKASEKIIYVYMKRKYEAMTKLGFKATLPPFMRNKRVADFQGNDFDNDPNRGNQVEHPQMTFGRLQGIFPKITPEKPAEEGNDSKGVPEASGPQNNGKQLRPSGKLNTSEKVNKTSGPKRGKHAWTHRVRERKQLVIYEEISDPQEDDE

SEQ ID NO: 207123 - DNA, 1399 bp, Artificial Sequence
  derived and/or modified sequence
cgctctgattgtttcgattcttccaaaatcagagacagagtgctcccggtgccatgaacggagacgatgcctttgtacggagacctagggttggttctcaaataccagagaagatgcaaaagcatccctggagacaagtctgtgaccgtggaatacatttggtgaatctcagtccgttctggaaggtgggaagagagccagccagcagcattaaagctctactgtgtggcaggggagaagctagggccttcgatgatattgccaaatacttctctgagaaagagtgggaaaagatgaaagcctcggagaaaatcatctatgtgtatatgaagagaaagtatgaggccatgactaaactaggtttcaaggccaccctcccacctttcatgcgtaataaacgggtcgcagacttccaggggaatgattttgataatgaccctaaccgtgggaatcaggttgaacatcctcagatgactttcggcaggctccagggaatcttcccgaagatcacgcccgagaagccagcagaggaaggaaatgattcgaagggagtgccagaagcatctggcccacagaacaatgggaaacagctgcgcccctcaggaaaactaaatacctctgagaaggttaacaagacatctggacccaaaagggggaaacatgcctggacccacagagtgcgtgagagaaagcaactggtgatttatgaagagatcagcgaccctcaggaagatgacgagtaactcccctcggggatatgacacatgcccatgatgagaagcagaacgtggtgacctttcacgaacatgggcatggctgcggatccctcgtcatcaggtgtatagcaagtgaaagcaagtgttcacaacagtgaaaagttgagcgtcatttttcttagtgtgccaagagttcgatgttagtgtttctgttgtattttgttacagtgtgccattctgttagatattagcgttttcactgatgagcaagacatacttaatgcatatttcagtttgtgtatccatgcacctacctcagaaaacaagtatcgtcaggtattctctgcatagaacaacactaccctcctctcttcccagatgtgaccactgagggcagttctgagtgtttaatttcagattttttcctctgcatttacacaaacacacacacatgccacacagacacacatgcgcgcgcgcgcgcacacacacacacacacacacacacacacacacacacaccaagtaccagtataggcatctcccaactgcttttccccatgtgtcctggtcaagcccccctcactctgtttcctgttcagcatgtactcccctcatccgattcccctctatcagtcactgccagttaataaacctttgcaaacgttaaaaaaaaaaaaaaa

SEQ ID NO: 207124 - DNA, 690 bp, Artificial Sequence
  derived and/or modified sequence
atgaacggcgacgatgcctttgtcagacgtccccgtgtgggtagccagatccctgagaagatgcagaagcatccttggcgtcaggtgtgcgacagaggcatccacctggtcaacctgtcccctttttggaaggttggccgagagccggcctcaagcatcaaggctctgctgtgcggaagaggcgaggcaagagccttcgacgatatcgctaaatacttttcagagaaggagtgggagaaaatgaaggcctcggaaaaaattatctatgtgtatatgaagcgtaagtatgaagcaatgaccaagttgggcttcaaagccaccctcccgcctttcatgcggaacaagagagtggcggacttccagggtaacgactttgataatgacccgaatcgcggaaatcaggtagagcatcctcagatgactttcggccgcttgcagggcatattcccgaaaattacacccgagaaaccggccgaggaaggaaatgactctaaaggtgtgcctgaagcctctgggccccagaacaacggcaaacagctgcggcccagcggtaaattaaatacatcggagaaggttaataagacgtctgggcctaagcgcggaaaacacgcctggactcaccgggttcgggaacggaagcaacttgtgatctacgaggagatttccgacccacaggaggacgacgaatag

SEQ ID NO: 207125 - DNA, 690 bp, Artificial Sequence
  derived and/or modified sequence
atgaatggagatgatgcctttgtgagaagaccccgggtgggcagccagatccctgagaagatgcagaagcacccctggaggcaggtgtgtgaccggggcatccacctggtgaacctgagccccttctggaaggtgggccgggagcccgccagcagcatcaaggccctgctgtgtggccgcggggaggcccgggcctttgatgacatcgccaagtacttcagcgagaaggagtgggagaagatgaaggccagcgagaagatcatctacgtgtacatgaagaggaaatatgaggccatgaccaagctgggcttcaaggccaccctgccccccttcatgaggaacaagagggtggccgacttccagggcaatgactttgacaatgaccccaacagaggcaaccaggtggagcacccccagatgaccttcggccgcctgcagggcatcttccccaagatcaccccagagaagccagctgaggagggcaatgacagcaaaggagtgcctgaggccagcggcccccagaacaacgggaagcagctgcggcccagcggcaagctgaacaccagcgagaaggtgaacaagaccagcggccccaagaggggcaagcacgcctggacccaccgggtgcgggagaggaagcagctggtgatctatgaggagatcagtgacccccaggaggatgatgaatag

SEQ ID NO: 207126 - DNA, 690 bp, Artificial Sequence
  derived and/or modified sequence
atgaacggcgacgacgccttcgtgcggcggccccgggtgggcagccagatccccgagaagatgcagaagcacccctggcggcaggtttgcgataggggaattcatctggtcaacctctctcccttttggaaagttggacgggagcccgctagttcaatcaaggccctcctctgtggtcgcggtgaggcaagggcatttgacgacattgcaaagtacttcagtgagaaggagtgggagaaaatgaaagccagtgaaaaaattatctatgtttatatgaagcggaagtatgaagctatgacaaagctcgggtttaaggccacacttccccccttcatgcgcaacaagagagtggcagacttccagggcaacgacttcgacaacgaccctaacaggggaaaccaggtggaacatccccaaatgacttttggacgcctccaaggtattttcccaaagatcacccctgaaaagccagccgaagaaggcaacgattcgaagggagtgcccgaggcgtcagggccacaaaacaacggcaaacaactgcgaccaagcggaaagttgaacacaagcgaaaaagtcaacaaaacaagcggtcctaagagaggaaagcatgcttggacccatcgtgtgagggagcgaaagcaattagttatttatgaagagattagcgatccccaagaggatgatgaatag

SEQ ID NO: 207127 - DNA, 1384 bp, Artificial Sequence
  derived and/or modified sequence
cgctctgattgtttcgattcttccaaaatcagagacagagtgctcccggtgccatgaacggagacgatgcctttgtacggagacctagggttggttctcaaataccagagaagatgcaaaagcatccctggagacaagtctgtgaccgtggaatacatttggtgaatctcagtccgttctggaaggtgggaagagagccagccagcagcattaaagctctactgtgtggcaggggagaagctagggccttcgatgatattgccaaatacttctctgagaaagagtgggaaaagatgaaagcctcggagaaaatcatctatgtgtatatgaagagaaagtatgaggccatgactaaactaggtttcaaggccaccctcccacctttcatgcgtaataaacgggtcgcagacttccaggggaatgattttgataatgaccctaaccgtgggaatcaggttgaacatcctcagatgactttcggcaggctccagggaatcttcccgaagatcacgcccgagaagccagcagaggaaggaaatgattcgaagggagtgccagaagcatctggcccacagaacaatgggaaacagctgcgcccctcaggaaaactaaatacctctgagaaggttaacaagacatctggacccaaaagggggaaacatgcctggacccacagagtgcgtgagagaaagcaactggtgatttatgaagagatcagcgaccctcaggaagatgacgagtaactcccctcggggatatgacacatgcccatgatgagaagcagaacgtggtgacctttcacgaacatgggcatggctgcggatccctcgtcatcaggtgtatagcaagtgaaagcaagtgttcacaacagtgaaaagttgagcgtcatttttcttagtgtgccaagagttcgatgttagtgtttctgttgtattttgttacagtgtgccattctgttagatattagcgttttcactgatgagcaagacatacttaatgcatatttcagtttgtgtatccatgcacctacctcagaaaacaagtatcgtcaggtattctctgcatagaacaacactaccctcctctcttcccagatgtgaccactgagggcagttctgagtgtttaatttcagattttttcctctgcatttacacaaacacacacacatgccacacagacacacatgcgcgcgcgcgcgcacacacacacacacacacacacacacacacacacacaccaagtaccagtataggcatctcccaactgcttttccccatgtgtcctggtcaagcccccctcactctgtttcctgttcagcatgtactcccctcatccgattcccctctatcagtcactgccagttaataaacctttgcaaacgtt

SEQ ID NO: 207128 - DNA, 690 bp, Artificial Sequence
  derived and/or modified sequence
atgaacggcgacgatgcttttgtgagacggccacgtgtgggttcccagattcccgagaagatgcagaaacacccttggcgccaggtgtgcgatcggggtatccacctggttaatctctccccattctggaaggtagggagagagccagccagcagcatcaaagccctgctctgcgggaggggtgaggcccgagctttcgacgacattgccaagtacttttcggaaaaggagtgggaaaaaatgaaggcttccgagaagatcatctacgtctatatgaagcgtaaatatgaggccatgacaaagcttggatttaaagccacccttcctccatttatgaggaacaagcgagttgctgatttccagggcaatgactttgacaatgaccccaacaggggaaaccaagttgagcacccacagatgaccttcggcaggctgcaaggcatattcccaaagataacccccgagaaaccagctgaagagggcaatgatagcaaaggtgtgccagaagcctccgggccacaaaacaacggcaagcaactaaggcccagcgggaagctgaacacgtctgagaaagtcaacaagacgagtggcccaaagcgcggaaagcacgcttggacgcatagggtccgcgaaaggaaacagctggtcatatacgaagaaattagcgatccccaggaagacgatgaatag

SEQ ID NO: 207129 - DNA, 690 bp, Artificial Sequence
  derived and/or modified sequence
atgaacggcgacgacgccttcgtgagaagacccagagtgggcagccagatccccgagaagatgcagaagcacccctggagacaggtgtgcgacagaggcatccacctggtgaacctgagccccttctggaaggtgggcagagagcccgccagcagcatcaaggccctgctgtgcggcagaggcgaggccagagccttcgacgacatcgccaagtacttcagcgagaaggagtgggagaagatgaaggccagcgagaagatcatctacgtgtacatgaagagaaagtacgaggccatgaccaagctgggcttcaaggccaccctgccccccttcatgagaaacaagagagtggccgacttccagggcaacgacttcgacaacgaccccaacagaggcaaccaggtggagcacccccagatgaccttcggcagactgcagggcatcttccccaagatcacccccgagaagcccgccgaggagggcaacgacagcaagggcgtgcccgaggccagcggcccccagaacaacggcaagcagctgagacccagcggcaagctgaacaccagcgagaaggtgaacaagaccagcggccccaagagaggcaagcacgcctggacccacagagtgagagagagaaagcagctggtgatctacgaggagatcagcgacccccaggaggacgacgagtag

SEQ ID NO: 207130 - protein, 151 aa, Artificial Sequence
  derived and/or modified sequence
MCDFTEDQTAEFKEAFQLFDRTGDGKILYSQCGDVMRALGQNPTNAEVLKVLGNPKSDEMNVKVLDFEHFLPMLQTVAKNKDQGTYEDYVEGLRVFDKEGNGTVMGAEIRHVLVTLGEKMTEEEVEMLVAGHEDSNGCINYEAFVRHILSG

SEQ ID NO: 207131 - DNA, 456 bp, Artificial Sequence
  derived and/or modified sequence
atgtgcgacttcaccgaagaccaaaccgctgagtttaaggaggcctttcagctgtttgacagaacaggagatggcaaaatcctgtacagccagtgcggggacgtgatgcgcgctcttgggcagaaccctaccaacgccgaggttcttaaagtgctggggaaccctaaatctgatgagatgaacgtcaaggttctggatttcgaacactttctacccatgttgcaaactgtggccaagaacaaggatcagggcacctatgaggactatgttgagggcttacgggtttttgacaaagagggaaacgggactgtcatgggggccgagatccgccacgtcctggtgactctcggcgagaagatgacagaagaagaagtggaaatgctggtcgctggccatgaggacagtaatggatgtatcaactatgaagcctttgtccgtcacatattgagcggatag

SEQ ID NO: 207132 - DNA, 456 bp, Artificial Sequence
  derived and/or modified sequence
atgtgtgactttacagaggaccagaccgctgagttcaaagaggcatttcagctgtttgacagaacaggcgatggtaagatactgtatagccagtgcggtgatgttatgcgtgccctcggccagaaccctaccaatgccgaggtgttaaaagtgttaggcaaccccaaaagcgatgagatgaacgttaaggttcttgacttcgagcacttcttacccatgctccaaactgtggccaagaataaggatcaagggacatacgaggattacgtggagggactgcgggtgttcgataaggagggcaatggaacagtcatgggcgccgaaatcaggcatgtactcgtgacgctcggtgagaagatgaccgaggaggaagtagaaatgctcgtggccggccatgaagattctaatggatgtatcaattacgaggctttcgttagacacatcctatccggatag

SEQ ID NO: 207133 - DNA, 456 bp, Artificial Sequence
  derived and/or modified sequence
atgtgtgacttcacagaggaccagacagctgagttcaaggaggccttccagctgtttgacagaactggagatggcaagatcctgtacagccagtgtggagatgtgatgagggccctgggccagaaccccaccaatgctgaggtgctgaaggtgctgggcaaccccaagagtgatgagatgaatgtgaaggtgctggactttgagcacttcctgcccatgctgcagacagtggccaagaacaaggaccagggcacctatgaagattatgtggagggcctgcgggtgtttgacaaggagggcaatggaacagtgatgggcgctgagatcagacatgtgctggtgaccctgggggagaagatgacagaggaggaggtggagatgctggtggccggccacgaggacagcaatggctgcatcaactatgaggcctttgtgcgccacatcctgagcggctag

SEQ ID NO: 207134 - DNA, 753 bp, Artificial Sequence
  derived and/or modified sequence
gtcaagatgtgtgacttcaccgaagaccagaccgcagagttcaaggaggccttccagctgtttgaccgaacaggtgatggcaagatcctgtacagccagtgtggggatgtgatgagggccctgggccagaaccctaccaacgccgaggtgctcaaggtcctggggaaccccaagagtgatgagatgaatgtgaaggtgctggactttgagcactttctgcccatgctgcagacagtggccaagaacaaggaccagggcacctatgaggattatgtcgaaggacttcgggtgtttgacaaggaaggaaatggcaccgtcatgggtgctgaaatccggcatgttcttgtcacactgggtgagaagatgacagaggaagaagtagagatgctggtggcagggcatgaggacagcaatggttgtatcaactatgaagcgtttgtgaggcatatcctgtcggggtgacgggcccatggggcgggtacggctcctcccagcctctcctctagttgatctccccagtgtttcttttttccccaacctgtgctctttatcccctgcccttaccctactaccatctgacttcctcctggcatgtttctgcatggagctgactagggaggggagggattcctcaaagaggaagacaacctgggggtacagtacctccttacctctagaatgggccctgaggttttacttatgcggccctgggtgctggtgtctgggaactctcaccagcctgtataccagtct

SEQ ID NO: 207135 - DNA, 901 bp, Artificial Sequence
  derived and/or modified sequence
ctccccccacgaccccccccacctccgagcgggttctgtgcccaggtggcgctggagaaaggaacagcggaccccgcccaagtcattactaatgtagcaatcgtctgcataaacccaggccacggttcctattggctgagtcctctgagggtgacgtcatcgggacgtactaagactagggttgggccgagagtcggagccattactgcaggaaaaggtcccggagagctgagcagtcaagatgtgtgacttcaccgaagaccagaccgcagagttcaaggaggccttccagctgtttgaccgaacaggtgatggcaagatcctgtacagccagtgtggggatgtgatgagggccctgggccagaaccctaccaacgccgaggtgctcaaggtcctggggaaccccaagagtgatgagatgaatgtgaaggtgctggactttgagcactttctgcccatgctgcagacagtggccaagaacaaggaccagggcacctatgaggattatgtcgaaggacttcgggtgtttgacaaggaaggaaatggcaccgtcatgggtgctgaaatccggcatgttcttgtcacactgggtgagaagatgacagaggaagaagtagagatgctggtggcagggcatgaggacagcaatggttgtatcaactatgaagcgtttgtgaggcatatcctgtcggggtgacgggcccatggggcggagctcgtccgcatggtgctgaatggctgaggaccttcccagtctccccagagtccgtgcctttccctgtgtgaattttgtatctagcctaaagtttccctaggctttcttgtctcagcaactttcccatcttgtctctcttggatgatgtttgccgtcagcattcaccaaataaacttgctctctggg

SEQ ID NO: 207136 - DNA, 456 bp, Artificial Sequence
  derived and/or modified sequence
atgtgcgacttcaccgaggaccagaccgccgagttcaaggaggccttccagctgtttgacagaaccggggacggcaaaattttatatagccagtgtggtgatgtgatgcgagccctggggcagaaccctaccaacgctgaggttctgaaggtgctaggtaatccgaagtcagatgagatgaatgtcaaagttttagattttgagcactttctgccaatgcttcagactgtcgccaaaaacaaagaccaaggcacctatgaagattatgtggaagggctccgtgtcttcgacaaagaaggtaacggaacggtgatgggcgcggaaattcgccatgtattggtaacgcttggggagaagatgactgaggaggaggtggaaatgctggtggccggacatgaggactctaatgggtgcatcaattatgaggccttcgtacggcatatcttgtccggctag

SEQ ID NO: 207137 - DNA, 456 bp, Artificial Sequence
  derived and/or modified sequence
atgtgcgacttcaccgaggaccagaccgccgagttcaaggaggccttccagctgtttgaccgaacaggagatggcaaaattctgtactcacagtgtggagacgtgatgcgtgctctcggccagaaccccaccaatgcagaagttctgaaagttcttggaaacccgaaaagcgatgaaatgaacgtcaaggtgttagacttcgagcactttctgcccatgcttcagacggtggctaaaaacaaggaccagggcacatacgaggactacgtagagggcctgagagtgttcgacaaggagggaaacgggacagttatgggagctgagatacgccacgtcttggtgactctgggtgagaaaatgactgaggaggaagttgaaatgctggtggctggacatgaggactctaatgggtgcatcaactacgaagccttcgtgcggcatattctgtcaggatag

SEQ ID NO: 207138 - DNA, 456 bp, Artificial Sequence
  derived and/or modified sequence
atgtgcgacttcaccgaagaccagaccgccgaattcaaagaggcattccagttattcgatagaactggagacggtaaaattttgtatagccagtgtggcgacgtcatgagagcactgggtcagaaccccactaatgctgaagtattgaaagtccttgggaatcctaaatccgacgagatgaacgtgaaagtcctggattttgagcacttcctaccaatgctgcagacagtagcgaagaataaggatcaaggtacatacgaggactacgtggaaggcctgcgggtcttcgataaagagggaaacggtaccgtcatgggggctgaaatcaggcacgttctcgttactttaggagagaagatgactgaagaggaggttgagatgctcgtcgccggacacgaagattctaacggatgcattaattatgaagcatttgtgcgccatatcctatcaggatag

SEQ ID NO: 207139 - DNA, 456 bp, Artificial Sequence
  derived and/or modified sequence
atgtgtgattttaccgaagaccagacagcagagtttaaggaggcatttcagctgtttgataggacaggggacggaaaaatcctgtacagtcagtgcggcgatgtgatgagggccctcgggcagaaccctacgaatgccgaagtgctgaaggtgctcggcaatcctaaatcggacgaaatgaatgtaaaagtgctggactttgagcatttccttcccatgctccaaaccgttgcgaagaacaaagatcaaggcacatacgaggactacgttgagggcctccgtgtgtttgataaggagggcaacgggaccgtgatgggggctgagatcaggcatgttcttgtgaccctcggggagaaaatgaccgaagaagaagtggaaatgctcgtagctgggcatgaggatagcaacggctgtattaactatgaggccttcgttcgacatatcttgtctggctag

SEQ ID NO: 207140 - DNA, 456 bp, Artificial Sequence
  derived and/or modified sequence
atgtgcgacttcaccgaggaccagaccgccgagttcaaggaggccttccagctgttcgacagaaccggcgacggcaagatcctgtacagccagtgcggcgacgtgatgagagccctgggccagaaccccaccaacgccgaggtgctgaaggtgctgggcaaccccaagagcgacgagatgaacgtgaaggtgctggacttcgagcacttcctgcccatgctgcagaccgtggccaagaacaaggaccagggcacctacgaggactacgtggagggcctgagagtgttcgacaaggagggcaacggcaccgtgatgggcgccgagatcagacacgtgctggtgaccctgggcgagaagatgaccgaggaggaggtggagatgctggtggccggccacgaggacagcaacggctgcatcaactacgaggccttcgtgagacacatcctgagcggctag

SEQ ID NO: 207141 - protein, 538 aa, Artificial Sequence [sequence omitted]

SEQ ID NO: 207142 - protein, 28 aa, Artificial Sequence
  derived and/or modified sequence
MAVAAAAAAAGPAGAGGGRAQRSGLLEV

SEQ ID NO: 207143 - DNA, 1617 bp, Artificial Sequence
  derived and/or modified sequence
atggccgtggccgccgccgccgccgccgccggccccgccggcgccggcggcggcagagcccagagaagcggcctgctggaggtgctggtgagagacagatggcacaaggtgctggtgaacctgagcgaggacgccctggtgctgagcagcgaggagggcgccgccgcctacaacggcatcggcaccgccaccaacggcagcttctgcagaggcgccggcgccggccaccccggcgccggcggcgcccagccccccgacagccccgccggcgtgagaaccgccttcaccgacctgcccgagcaggtgcccgagagcatcagcaaccagaagagaggcgtgaaggtgctgaagcaggagctgggcggcctgggcatcagcatcaagggcggcaaggagaacaagatgcccatcctgatcagcaagatcttcaagggcctggccgccgaccagacccaggccctgtacgtgggcgacgccatcctgagcgtgaacggcgccgacctgagagacgccacccacgacgaggccgtgcaggccctgaagagagccggcaaggaggtgctgctggaggtgaagtacatgagagaggccaccccctacgtgaagaagggcagccccgtgagcgagatcggctgggagacccccccccccgagagccccagactgggcggcagcaccagcgacccccccagcagccagagcttcagcttccacagagacagaaagagcatccccctgaagatgtgctacgtgaccagaagcatggccctggccgaccccgagaacagacagctggagatccacagccccgacgccaagcacaccgtgatcctgagaagcaaggacagcgccaccgcccaggcctggttcagcgccatccacagcaacgtgaacgacctgctgaccagagtgatcgccgaggtgagagagcagctgggcaagaccggcatcgccggcagcagagagatcagacacctgggctggctggccgagaaggtgcccggcgagagcaagaagcagtggaagcccgccctggtggtgctgaccgagaaggacctgctgatctacgacagcatgcccagaagaaaggaggcctggttcagccccgtgcacacctaccccctgctggccaccagactggtgcacagcggccccggcaagggcagcccccaggccggcgtggacctgagcttcgccaccagaaccggcaccagacagggcatcgagacccacctgttcagagccgagaccagcagagacctgagccactggaccagaagcatcgtgcagggctgccacaacagcgccgagctgatcgccgagatcagcaccgcctgcacctacaagaaccaggagtgcagactgaccatccactacgagaacggcttcagcatcaccaccgagccccaggagggcgccttccccaagaccatcatccagagcccctacgagaagctgaagatgagcagcgacgacggcatcagaatgctgtacctggacttcggcggcaaggacggcgagatccagctggacctgcacagctgccccaagcccatcgtgttcatcatccacagcttcctgagcgccaagatcaccagactgggcctggtggcctag

SEQ ID NO: 207144 - DNA, 1617 bp, Artificial Sequence
  derived and/or modified sequence
atggccgttgctgccgcggctgctgctgcagggcctgcgggggcaggagggggaagagctcagagaagcggactactcgaggtgttggtcagggatcggtggcacaaggttcttgtgaatctgagcgaggacgcgttagtcctgtcgtcggaagagggcgcagccgcctacaatgggataggcacagccactaacggcagcttttgccgaggcgcaggggcaggacaccccggggcgggaggcgcccagccccccgacagtcccgctggcgtccgcactgccttcacagacctcccagagcaggttccagagtcaatctccaaccagaaacgcggcgttaaagtgttgaagcaggagctcggaggtttgggcatttcaattaagggggggaaggaaaataagatgccgatcctgatctccaaaatttttaaaggcctggccgccgaccagacgcaggcactgtatgtgggcgacgcgattctttccgtgaacggcgctgatttacgagacgctacgcacgacgaggctgtccaagccctcaagcgcgcaggaaaagaagtccttctggaggtaaagtacatgcgggaggctaccccctacgtgaagaaaggttcacccgtcagtgagattggctgggaaactcccccccccgagtccccacgattggggggcagcacctccgacccgcccagcagtcagagttttagctttcaccgcgatcgtaagagcattccactgaaaatgtgctatgtgacacggtccatggcactggcggatccggaaaaccgacaactggaaatccacagccccgatgcaaagcatactgttatcctgcgctcaaaagactcagccaccgcgcaggcttggttctcagctatccactccaacgtgaacgatctgctaacaagggtgatcgcagaggttcgcgagcagctgggtaagaccggtattgctgggtcccgagagattaggcacttgggttggctggccgaaaaggtgccaggcgagagtaaaaagcagtggaagcctgccctggtggtgcttacagagaaagacctgctgatttacgatagcatgcctcgccgcaaggaggcctggttctcacccgtgcatacctatcccctactagccaccagactagtgcattctggacctggcaaaggttccccccaggccggagtcgatctcagctttgcaaccaggaccggaacccggcaaggcatcgagacgcatctttttcgggccgaaaccagccgcgatctttcccattggactagatccatcgtccagggctgccataattccgcagagctgatcgcggagattagcacagcctgtacctacaagaaccaagagtgcaggctaaccatccattacgagaatgggttttcaatcactacagagccccaggagggcgcattccctaagactattattcagtcgccgtacgaaaaactgaagatgtcttcagacgatgggatcaggatgctatacctcgacttcggcggtaaggatggtgaaatacaactggacctgcactcatgtcctaaacctattgtgtttattatccactcgtttctgagtgccaagatcacgcggttaggacttgtcgcatag

SEQ ID NO: 207145 - DNA, 1617 bp, Artificial Sequence
  derived and/or modified sequence
atggctgtggcggctgccgccgctgccgctggccctgctggtgccggcggaggccgcgcccaacggtctggtctactggaagtcctcgtaagagaccgctggcacaaagtcttagtcaatttatccgaggatgcgcttgtactatcttccgaggagggcgcggccgcctacaacgggatcggaactgctacaaatgggagcttctgccggggggccggcgccgggcaccccggggccgggggggcccaaccccctgattcgccggctggcgtccggactgccttcacagatctgcccgaacaggtaccggagtcaatctctaaccagaaaagaggagtaaaagtcctcaaacaggagttaggtggtctaggcatctctatcaagggtggaaaggaaaataagatgcctattcttatcagcaagattttcaaagggttagccgcggaccagacccaagcactctacgtgggcgatgcaattttgtctgtgaatggagccgatctcagagatgccactcacgatgaagcagtccaagcgctcaaaagggctggtaaggaagtgctcctggaagtgaagtatatgcgggaagcaaccccctatgtcaaaaagggttcccctgtgtccgaaataggatgggaaactcctcctcccgagtctcccaggctgggtgggtcgacctccgaccctccctcatctcaatctttctcctttcaccgagaccgtaaatctattcctctgaagatgtgttacgttaccagaagcatggccctggccgatccagagaaccgtcaactagaaatacactcaccagatgccaaacacacagtcattcttaggtctaaggattccgcaactgcccaagcctggttctctgccatccactccaatgtcaacgacttgctgactcgtgttatcgctgaggtgcgggagcaattgggaaaaactggcatcgccggatctcgagaaatacgacatttagggtggctagccgagaaggtgcccggtgagagcaagaagcagtggaagccagccttggtcgtcctcacggaaaaagatcttcttatatatgacagcatgccgaggcggaaggaagcttggttctctcccgtgcatacatatcccttgctcgctactcgcctagtccattccgggccgggaaagggttccccacaagcaggggttgacctcagcttcgccacaagaacgggtacccgccaagggatcgaaacccaccttttcagggcggagaccagtcgagatctgtcacactggacgcgtagcattgtgcagggttgtcacaactccgctgaactcattgctgaaatctccactgcatgtacgtataaaaatcaggagtgccgactcactatacattacgagaatggattctccataacgacagagccccaggagggggccttcccaaaaaccattatccagtcaccatacgaaaagctcaaaatgtcctccgatgatggaattagaatgctgtatctggatttcgggggtaaggatggagagattcagctggatctccattcctgtccaaaacccatcgtgttcattatacacagcttcctgagtgccaagatcaccagactaggacttgtggcctag

SEQ ID NO: 207146 - DNA, 1617 bp, Artificial Sequence
  derived and/or modified sequence
atggctgtggccgctgctgctgctgctgctggccctgctggagctgggggcggccgggcccagaggagcggcctgctggaggtgctggtgcgggaccgctggcacaaggtgctggtgaacctgtctgaagatgccctggtgctgagcagcgaggagggcgctgctgcctacaacggcatcggcacagccaccaacggcagcttctgccgcggggccggggccggccaccctggagctggaggagcccagcccccagacagccctgctggggtgaggacagccttcacagacctgcctgagcaggtgcctgagagcatcagcaaccagaagaggggcgtgaaggtgctgaagcaggagctgggcggcctgggcatcagcatcaagggcggcaaggagaacaagatgcccatcctgatcagcaagatcttcaagggcctggccgctgaccagacccaggccctgtatgtgggagatgccatcctgtctgtgaatggagctgacctgagagatgccacccatgatgaggccgtgcaggccctgaagagagctgggaaggaggtgctgctggaggtgaagtacatgagggaggccaccccctacgtgaagaagggcagccctgtgtctgagatcggctgggagaccccacctcctgagagcccccggctgggcggcagcaccagtgacccccccagcagccagagcttctccttccaccgggacaggaagagcatccccctgaagatgtgctacgtgaccaggtccatggccctggccgaccctgaaaatcggcagctggagatccacagcccagatgccaagcacacagtcatcctgcggagcaaggacagcgccacagcccaggcctggttcagcgccatccacagcaatgtgaatgacctgctgaccagggtgattgctgaggtgcgggagcagctgggcaagacaggaattgctggcagccgggagatccgccacctgggctggctggccgagaaggtgcctggagagagcaagaagcagtggaagccagccctggtggtgctgacagagaaggacctgctgatctatgacagcatgcccaggaggaaggaggcctggttcagccctgtgcacacctaccccctgctggccacccggctggtgcacagcggccctgggaagggcagcccccaggccggcgtggacctgagctttgccaccaggacaggcacccggcagggcatcgagacccacctgttccgggcagagaccagccgggacctgagccactggaccaggagcatcgtgcagggctgccacaacagcgctgagctgattgctgagatcagcacagcctgcacctacaagaaccaggagtgccgcctgaccatccactatgaaaatggcttcagcatcaccacagagccccaggagggcgccttccccaagaccatcatccagagcccctatgagaagctgaagatgagcagtgatgatggcatccgcatgctgtacctggactttggaggcaaggatggagagatccagctggacctgcacagctgccccaagcccatcgtgttcatcatccacagcttcctgagcgccaagatcacccggctgggcctggtggcctag

SEQ ID NO: 207147 - DNA, 1617 bp, Artificial Sequence
  derived and/or modified sequence
atggccgtggccgccgccgccgccgccgccggccccgccggcgccggcggaggtagagcacagagatcaggcctgctagaggtgcttgtccgtgacaggtggcataaggtgctggtcaatctctctgaagatgctctggtactgtcctctgaagaaggcgccgcagcctacaacggcatcggcaccgcgactaatggctcattttgtcgcggagccggagccggacatccaggggctggtggtgcccagcctcccgactccccagctggcgtccggaccgccttcacggacctacctgagcaggtgcctgagagcatcagcaatcagaaaagaggcgtaaaagtgcttaagcaagagctggggggactcggcatctctattaaagggggaaaagagaataaaatgccaatcctgatcagcaagattttcaaaggactcgctgcagaccagacccaagctctatacgtcggagacgctattctttccgtaaatggcgctgatctccgcgatgctacccacgacgaagccgtacaagcgctgaaacgagccggaaaggaggtgctcctcgaggtgaaatatatgagggaagccaccccatacgttaaaaagggaagccctgtatctgaaattggttgggaaacaccccccccggagtctccccggcttgggggtagcacatcggaccccccttcctctcagagcttctcatttcacagagaccgcaagagcatcccgttaaagatgtgctatgtgacacgctctatggcacttgctgatcccgaaaatcgccaactcgagatacattcccccgatgctaagcatacagtgatcctgaggtcaaaagacagcgccaccgcccaggcctggttctcagccattcattccaatgtgaacgacctcctgacacgggtgattgcggaggtccgcgaacagctgggcaaaacgggcattgctgggtcacgcgagatccggcacctaggttggctcgcagagaaggttccaggggaatccaaaaagcagtggaaacctgcgttagtggtcctaactgagaaagatctcctgatctatgacagcatgccccgacgcaaagaagcttggttctctcctgtgcacacataccctctgctggctacaaggctcgtacattctggccctggtaaaggaagcccacaggcaggggtggacctcagctttgctacacggaccgggacgcgccaaggaatcgaaacccacttgttccgagcagagacctctagagatttgagtcattggacaagatccatagtgcagggttgtcataacagcgcagagctgatagcagagatcagtacagcttgcacttataaaaatcaggagtgcaggctgacaattcattatgaaaacggtttctcaatcacgaccgagccccaagaaggggcatttcctaagactatcattcagtcgccatacgaaaagctcaaaatgagttctgacgacggcatcagaatgctgtacctggacttcggggggaaagacggggagatccagctggacctccacagctgtcccaagcctatcgtcttcatcattcattcctttcttagcgcaaaaataactagactggggctcgtggcctag

SEQ ID NO: 207148 - DNA, 1617 bp, Artificial Sequence
  derived and/or modified sequence
atggccgtggccgccgccgccgccgccgccggccccgccggcgccggtggcggtagagctcagcggtctggtctgttagaagtgcttgttcgcgacagatggcataaagtcctggtgaatctgtccgaggatgcacttgtcctgtcatcagaagaaggggctgcggcctacaacggaattggtacagccactaacgggtcgttttgccgtggcgccggtgctgggcacccaggggcagggggcgctcagccccccgactccccagctggcgtgaggactgcatttacagatcttcctgaacaggtcccagagagtatctccaaccaaaagcgcggcgtgaaagtgctgaaacaggaactcggaggtctgggcatcagcatcaagggagggaaggagaacaagatgcccattctcatttctaaaatcttcaagggcctcgccgcagaccaaacccaggcactgtatgttggggatgccatcttatccgttaatggggcagatctccgggatgccactcacgacgaagccgtgcaggcactgaagcgggccggtaaagaagtcttgctggaggtcaaatacatgcgtgaggccaccccatatgtgaaaaagggctctcccgtgtcggagatcggatgggagaccccgccccccgaatcgccaaggctgggcggctctacttccgaccccccctcttctcagtcatttagcttccacagggacaggaagtccatcccactgaagatgtgttatgtgacccgctcaatggctctcgccgatccagaaaaccggcagttggagattcattcccctgacgccaagcacaccgtgatactgagatccaaggattcagccacagcgcaggcctggtttagtgcaatccatagcaacgtgaacgacctcttgactagggtcattgccgaggtccgcgaacagctaggcaaaaccggaatcgctgggagcagggagataaggcatttaggatggctggcagagaaggtgcctggcgaatccaagaaacaatggaaacccgcattagtcgtcctgaccgaaaaggatctgctgatctacgacagcatgccaagaagaaaggaggcttggttttccccagtacacacctaccctctactggcaacacggcttgtgcattcggggccggggaaaggatccccccaagccggggttgacttatctttcgccacacgaacagggactagacaggggatcgagacacatttattccgcgccgagacttcaagggatctgtctcactggaccagatctatcgtccaaggctgtcataatagcgccgaactaatcgcagagatcagtaccgcctgtacatacaaaaaccaggagtgtagactaaccatccactatgagaacgggttctccatcactaccgaaccacaggagggcgcatttcccaagacgataattcagtccccctacgagaagctgaagatgtcctctgacgatggaatcagaatgctctacttagattttggcggaaaggatggcgagatccagttggatcttcattcctgccctaagccaattgtattcatcattcacagttttctatccgccaaaatcacgcgcctgggcctggtagcctag

SEQ ID NO: 207149 - DNA, 1617 bp, Artificial Sequence
  derived and/or modified sequence
atggctgttgcagccgcagccgctgccgctgggcctgccggtgccggaggcggtcgggcacagaggagtggtctgttggaggtcctggtcagggacagatggcacaaggtgctggtcaatctgtccgaggatgcattggtgctctcctccgaagagggtgctgcggcatacaatggaatcgggactgcaactaatggctccttctgccgtggagctggcgcaggccatcccggagcaggaggcgcacagcccccagacagccccgcaggcgtgaggaccgcattcaccgatctgcctgaacaggttccggagtctatctcaaatcagaaacgaggcgtgaaagtcctaaaacaggagttaggaggccttggtatcagcatcaaaggtggaaaagaaaacaagatgcccatattaattagtaagatatttaagggcctcgccgctgaccagacccaagctctttacgttggagatgctattctgtcggtgaatggcgcagacctgcgtgatgccactcacgatgaggctgtgcaggctttgaagcgcgcaggaaaggaggtcctcttggaggtcaaatacatgcgcgaagccactccctatgtgaaaaaaggcagccccgtttccgaaatcggctgggagacaccaccacctgaatctccccgactgggtggaagtacctcggacccaccctcctctcaaagcttttcctttcacagggacagaaaatcaattccacttaagatgtgttatgtgacccgttccatggctctggcagaccccgaaaatagacagcttgagatccattctcctgacgccaagcacaccgtcatcctcaggtctaaggactctgcgaccgcgcaggcctggttctccgccatacattccaacgtaaacgatctgctcacgagggtgattgcagaggttcgcgagcagctgggaaaaaccggcatcgcgggttctcgggagataagacacctcggttggctggccgaaaaagtgcctggggaaagcaaaaagcagtggaagcccgctctcgtcgtgctgaccgagaaggatctgcttatatacgactccatgcctaggaggaaggaggcttggttctctcctgtacacacgtacccacttctggctactcgcttggtgcattccgggcctggcaagggaagtccccaagctggcgtggatctaagtttcgctacccgaaccggtacccgacagggcattgagacgcatcttttcagagctgagaccagcagagacctatcgcactggactcgctctattgtgcaggggtgtcataacagcgctgaattgatcgccgaaatttcaaccgcctgcacttataaaaaccaggaatgcagattaactatccactacgaaaatggtttctctatcaccactgagccccaggagggcgctttccctaagacgatcatccaatccccatatgagaagcttaagatgagctccgatgatggtattcgcatgctgtatctcgatttcggcggaaaggatggagagattcaattggatctgcattcgtgccccaagcccatcgtttttataatccacagtttcctctccgctaagatcactcggctggggctcgtggcatag

SEQ ID NO: 207150 - DNA, 1617 bp, Artificial Sequence
  derived and/or modified sequence
atggctgtggctgccgcagcagctgccgcaggtccggcaggggctggcggtggcagagcccagcgttccgggctcctagaagtcttagttcgtgataggtggcacaaagtcctggtgaatctctccgaggatgcactcgtgctttcgtctgaggaaggagccgctgcttacaacgggattggcaccgcaacaaatggtagtttctgcagaggcgctggcgctgggcaccctggggcagggggtgctcaaccacccgacagccccgcaggggtccgaaccgccttcacggacctgcccgagcaggtgcctgaatcaatcagcaatcagaagcgaggcgtgaaagtcttgaagcaggagctgggcggtctggggatctccatcaaggggggaaaagagaataaaatgccaattctgatttcaaaaattttcaaggggcttgccgcagaccaaactcaagccctgtatgttggcgatgccattctgtcggtcaacggcgcagacctgagagacgcaacacacgatgaggcagtgcaggctctgaaacgagcaggcaaagaagtcctgctggaggtgaaatatatgagagaggcaactccctatgttaagaaagggagccccgtgtcagaaataggatgggagacccctccccctgaatcccctaggctcggaggttcaacatctgaccccccaagctcccaatcgttctctttccatcgcgatcgcaaatcaattccgctcaagatgtgctatgttaccaggtcaatggcattggccgatccggagaacaggcaactggagatccactcgcctgacgcaaagcatacggtgattctgaggtctaaggatagcgcgacagcacaagcatggttctctgcaatccacagtaacgtgaatgacctgttgaccagagtgattgctgaggtccgggagcagttggggaagacgggcatcgccggtagccgggaaatcaggcatctcggatggctggccgagaaagtccccggtgaatcgaagaaacagtggaaaccggctctagttgtcttgaccgagaaggacttgctaatttatgatagcatgcctaggcgtaaggaagcatggttctctcctgtgcatacataccctcttctcgccaccagattagtgcacagtggcccaggaaaaggatctcctcaggctggggtagatttaagtttcgcaacaaggactggcacaaggcaaggcatcgaaactcatctgtttcgtgccgaaacttccagagacttgagccattggaccagatctatcgtgcagggttgtcataacagcgccgaactcatcgctgaaatctccactgcatgcacgtataaaaaccaggaatgccgcctgaccatccactacgaaaatggcttctccatcaccacagaacctcaggagggggcatttcctaaaaccatcatacagtcaccttatgaaaaattaaagatgagcagcgacgatggaatcaggatgctgtacctggactttggtgggaaggatggagagatacagcttgacctccactcgtgtcctaagcccatagtgtttattattcactcctttctgagtgccaagattactcgactgggactggtggcgtag

SEQ ID NO: 207151 - DNA, 5164 bp, Artificial Sequence
  derived and/or modified sequence
gtgttgtgtttggagagagggtagacagcagtgggaaggggacgtaactgagaagcatgaaacaccttgagtggaccatgagacctgcttagagttaggggaaagcttgagaggttcaaggatagaagaactcagggtggttcaggtgtgacatgggttatgtgggcatttctggattgctctgggaaggttgctccaccccggtcaggatcaggcgagggggaaccagcctgagtgcagctgccaactcccgccgagtgcgtctgcgaactcccggagcggagtcccgcgtgccgccacctccccgcgggacgcactctcctcgctcccccgggccccgcgtcctccccccggccacccttccccacttttccccccttttccaatcacatggcattttaagaatgccggaaagatggcggtagcggcggcggcggcggcggctgggccggctggcgcgggaggcggccgggcgcagcggagcgggctgctggaagttttggtgcgggatcgctggcacaaagttctggtgaacttgagcgaggacgccctggttctgagcagcgaggagggcgctgcggcgtacaacggcatcgggaccgccaccaatggctcgttctgcaggggcgccggggctgggcacccgggcgcgggcggcgcgcagcccccggactcgcccgccggggtccgcaccgctttcaccgacctgcccgagcaggtgcccgagtccatctcgaaccagaagcgtggcgtgaaggtgctgaagcaggagctgggcgggctggggatcagcatcaaggggggcaaggagaacaagatgcccatcctcatcagcaagatcttcaaggggctggcggcggaccagacccaagccctgtacgtgggcgacgccatcctgtccgtgaacggagccgacctgcgggacgccacccacgacgaggcggtgcaggcgttgaagcgcgcgggcaaggaagtgctgctggaagtgaagtacatgcgagaagccacgccctatgtgaagaaaggatccccagtatccgagattgggtgggaaacacctccgcctgaatcccctcggttagggggcagcacctcagaccccccgtcatcgcagtccttctccttccacagagaccggaaaagcatccccctcaaaatgtgctacgtcactcggagtatggccttggccgaccctgagaacaggcagcttgaaatccactctccagatgctaagcacacggtgatcctaaggagcaaggactcagccacggcccaggcatggttcagtgccatccattccaacgttaatgacctgctgacccgagtgattgctgaggtcagagagcagctggggaaaacaggcattgctgggagccgagagattaggcatcttggctggcttgcagaaaaggtgccaggggagagcaagaaacagtggaaaccagccctggttgtgctgactgagaaagaccttttaatctatgacagcatgccacggaggaaggaagcctggttcagcccagttcacacataccctcttcttgccaccaggctggtccattcaggtccaggaaagggatcaccccaggctggtgtggatctgtcctttgcaacgcgaactggtaccaggcaagggattgaaacacatctcttcagagcagagaccagcagggacctctcccactggacaaggagcatagtacagggttgccacaattctgctgaactcattgctgaaatcagcactgcttgcacctacaaaaaccaggagtgccgtttgaccatacattatgagaatggattttctattaccactgaaccacaggagggtgcctttcccaagaccatcatacagtctccttatgaaaagctcaaaatgtcttcagatgatggaatcaggatgctgtatttagattttggaggcaaagatggagagattcaactggaccttcattcctgccccaagccaattgttttcatcattcattccttcctgtcagctaagattacaagactgggcttggtggcctgaagacaggggtgacttgcctttgagaaaagaagggctgcaatgccaccagagaacgtgatgtcagacaccatctgtagtgagcagcgcaccagatgtagcgtgctacagtcagctttagctctcaagagtcgtatgtaactgtcccagactcctctgtcagtttcagcaactacaagggataccctgcgaaagtaccatgagaaatatcagagtaaaactttctagaacagtacaaggttaaagaggtgaggtgacgggaaatacacagcatagctttgaaataatgacaaccaaggacatgaccattagaacagcatgtgcagatcttaatcatcccagttcctaggcaacttgttcaccaggtacgcaagggccgaatagttgagaaatggacattcttacctactcctcctagccccctatccccagtaacagtgatcccttttcttattgtgatttatttcctaattcttgctgagttgactttcccttgtaggaaaagaaaaatatttcaaatagaaacccaccttttatttaagtatgaagcagctgttactttttaaaaaatgaattatctttcaatggtgtagaatgattccaaagtgtctccattagcatatactgagcaggaattaaataaagcatcagatactgatctgagctgtaagctggtagaatctgagccaaagtagactgcttaaattgataagctttgctaaagagttgtatgcacaaaggatgattaattctgggactatactcacaccaaggtctgctgtcttatagccaagaattacagctttatttatagagagtgaattatgggtattttttcagaaaatattgtcatctgatatacacataaaacaactcacattgttggagttaactaattatccccatttcatggttttcagtggcaacttactgacccttgtttttgcctgtgcttgtatgcatgcattttcaagcaagtaataaagcagcctcatttaattctggataatgctgggttttacatatagactgaatgctataatcaaatctattgacagtatctgcagttctttcagaattccagggaaataatataacgacctgatatctttctacaggaatattttcagacattatatagcacattactgatttaatgcttttacttttatctttcaaaacaaattcactaaaaataacacctattgattttgaagtcacttttctcaaaccttgaaaatgagctctaggatctctataaacatttctaacacttttcctgtagtttacatagacagacatctgttgttagacctgtgtgtttttaaagaatcatatgttaacaaatacccatgcaaagagcttcaaaaagtgaaaccgtgttaaaggaacacaatttttctcactcagacatatttgtttattgaattgcaaagttttattttaaatcagcatttccccaaagaatatatcatatgacgctagttccaaggggcttgactgagtggtgttttgctggggggagacaggggtttgttaatacactttactaaatactgagctgaaaaatgttaaatagatttcacgattgcctccttgaagattttaaagttcattgtggttcttcaaggcgaaatccggtgaaccattcctcacacttacctacaggactcttttctaatggagcatcttgtgaagctagtgggtttttttgttgttgttatttgttttttttttttaatgctttagaaaacacagctttaggatattgactttttgtttatttctattttcaaatgctgaaaagtcaagtcccagtttgaataccatagaaaagctttgatgcatttgtaaattatattgcactctttcactatatattttcaaaatcactggaatgttgttatacaagagaattataattgtgtattgtaaataacatattaaaatacatatattaatgccaatagttaaattcaacaatatgtaatctaaggtgctcggttctacatgaagtatgagttaactgctcataattaagttgccaagattctattatatatttatagacaaattaaaatgatcataattacaaatatgatttctttatcacttaagctttgggctgattaatatctgtgtgggggtcaatggaaactacattctctacatttataaacatttaatttaattatttatattttaggaaaatatatttgaataaaattaatgcattttctagagtaaattaaaatgttattagcaagaaatagaaaatttgactaagataattgtgtatatgaatcatttttcccccaagttaaaatgtatcataatagagaggctctaatgaatcaatttccaatactcatttctttcttattttgaattcaagttacaatgactttacactgtagattttaatcttgtctgatgtgtgctggtgtgtatgacacaaactcataagtctggatcatgcttgggtacagtcaatgaatcaaccgagtcactttgaggaatttgtttttgtccaatttgctctgtgctcaatcccatgaattattaaatttacaatgtttgtccccaaatgaaaaccaatataaatgaatgatgttttaatctgtactttatgggaagttgcctatttgtcagtagatgtggttaagtgagtcctctggtgcagtgacatccttttaagccatctcatagggatttaaagaaggccaataggaatatagatattggtttttctttctctgacttgaactaagtaggagaaaccaaaccataaacctattacaaactacccaggcagaggcatttacttaattcatcaactagtgcaattaaaaccctgaaaacacatgatccttgttgactctgcttggttgaagcaggaaagaatggtcttgatggtcagaaagttttaaaattaatgggcagggcctttctggaccctgttttccaaacacgttagatattccgtcttgaggggattggagtaggctacagtgagggggtaatttttggatgtatctggacttttaaaaaatgtgcctatatttatagcaccatgaatattatgtaaaatttatatatgaattaaataaatattcacctctgatttccagtgca

SEQ ID NO: 207152 - DNA, 2273 bp, Artificial Sequence
  derived and/or modified sequence
cttgctttggggttttgcaactggctgctggcttttttcccctcccctgtctcggtctctccttcttcttttaggttgctccaccccggtcaggatcaggcgagggggaaccagcctgagtgcagctgccaactcccgccgagtgcgtctgcgaactcccggagcggagtcccgcgtgccgccacctccccgcgggacgcactctcctcgctcccccgggccccgcgtcctccccccggccacccttccccacttttccccccttttccaatcacatggcattttaagaatgccggaaagatggcggtagcggcggcggcggcggcggctgggccggctggcgcgggaggcggccgggcgcagcggagcgggctgctggaagttttggtgcgggatcgctggcacaaagttctggtgaacttgagcgaggacgccctggttctgagcagcgaggagggcgctgcggcgtacaacggcatcgggaccgccaccaatggctcgttctgcaggggcgccggggctgggcacccgggcgcgggcggcgcgcagcccccggactcgcccgccggggtccgcaccgctttcaccgacctgcccgagcaggtgcccgagtccatctcgaaccagaagcgtggcgtgaaggtgctgaagcaggagctgggcgggctggggatcagcatcaaggggggcaaggagaacaagatgcccatcctcatcagcaagatcttcaaggggctggcggcggaccagacccaagccctgtacgtgggcgacgccatcctgtccgtgaacggagccgacctgcgggacgccacccacgacgaggcggtgcaggcgttgaagcgcgcgggcaaggaagtgctgctggaagtgaagtacatgcgagaagccacgccctatgtgaagaaaggatccccagtatccgagattgggtgggaaacacctccgcctgaatcccctcggttagggggcagcacctcagaccccccgtcatcgcagtccttctccttccacagagaccggaaaagcatccccctcaaaatgtgctacgtcactcggagtatggccttggccgaccctgagaacaggcagcttgaaatccactctccagatgctaagcacacggtgatcctaaggagcaaggactcagccacggcccaggcatggttcagtgccatccattccaacgttaatgacctgctgacccgagtgattgctgaggtcagagagcagctggggaaaacaggcattgctgggagccgagagattaggcatcttggctggcttgcagaaaaggtgccaggggagagcaagaaacagtggaaaccagccctggttgtgctgactgagaaagaccttttaatctatgacagcatgccacggaggaaggaagcctggttcagcccagttcacacataccctcttcttgccaccaggctggtccattcaggtccaggaaagggatcaccccaggctggtgtggatctgtcctttgcaacgcgaactggtaccaggcaagggattgaaacacatctcttcagagcagagaccagcagggacctctcccactggacaaggagcatagtacagggttgccacaattctgctgaactcattgctgaaatcagcactgcttgcacctacaaaaaccaggagtgccgtttgaccatacattatgagaatggattttctattaccactgaaccacaggagggtgcctttcccaagaccatcatacagtctccttatgaaaagctcaaaatgtcttcagatgatggaatcaggatgctgtatttagattttggaggcaaagatggagagattcaactggaccttcattcctgccccaagccaattgttttcatcattcattccttcctgtcagctaagattacaagactgggcttggtggcctgaagacaggggtgacttgcctttgagaaaagaagggctgcaatgccaccagagaacgtgatgtcagacaccatctgtagtgagcagcgcaccagatgtagcgtgctacagtcagctttagctctcaagagtcgtatgtaactgtcccagactcctctgtcagtttcagcaactacaagggataccctgcgaaagtaccatgagaaatatcagagtaaaactttctagaacagtacaaggttaaagaggtgaggtgacgggaaatacacagcatagctttgaaataatgacaaccaaggacatgaccattagaacagcatgtgcagatcttaatcatcccagttcctaggcaacttgtt

SEQ ID NO: 207153 - protein, 330 aa, Artificial Sequence
  derived and/or modified sequence
MLLLINVILTLWVSCANGQVKPCDFPDIKHGGLFHENMRRPYFPVAVGKYYSYYCDEHFETPSGSYWDYIHCTQNGWSPAVPCLRKCYFPYLENGYNQNYGRKFVQGNSTEVACHPGYGLPKAQTTVTCTEKGWSPTPRCIRVRTCSKSDIEIENGFISESSSIYILNKEIQYKCKPGYATADGNSSGSITCLQNGWSAQPICINSSEKCGPPPPISNGDTTSFLLKVYVPQSRVEYQCQPYYELQGSNYVTCSNGEWSEPPRCIHPCIITEENMNKNNIKLKGRSDRKYYAKTGDTIEFMCKLGYNANTSILSFQAVCREGIVEYPRCE

SEQ ID NO: 207154 - protein, 195 aa, Artificial Sequence
  derived and/or modified sequence
MLLLINVILTLWVSCANGQVKPCDFPDIKHGGLFHENMRRPYFPVAVGKYYSYYCDEHFETPSGSYWDYIHCTQNGWSPAVPCLRKCYFPYLENGYNQNYGRKFVQGNSTEVACHPGYGLPKAQTTVTCTEKGWSPTPRCIRVRTCSKSDIEIENGFISESSSIYILNKEIQYKCKPGYATADGNSSDMVFCISY

SEQ ID NO: 207155 - DNA, 993 bp, Artificial Sequence
  derived and/or modified sequence
atgctgctattgataaatgtcattcttacactctgggttagctgcgctaatggtcaggtaaaaccctgcgactttcctgacatcaaacacggagggctgttccacgagaacatgaggcgcccctacttcccagtcgccgtcggcaagtattattcatattattgtgatgagcatttcgagacaccaagcggatcctactgggactatattcactgcacgcagaacggttggtcaccggccgtgccatgcttgcggaagtgttatttcccatacctggagaatggatacaatcagaattatggaaggaagttcgtgcaaggaaatagcaccgaggtggcctgtcaccctggctatggcttaccaaaggcgcaaacaacggtaacatgtacggaaaagggatggagcccgacaccgcgctgtataagggtgaggacgtgctccaagtccgatattgagatcgagaacggcttcatttctgagagctcttccatttacatcctgaacaaggagatacagtacaagtgtaagccaggatatgccacggcagacgggaacagttccgggagtataacttgcctccagaacggctggtctgcccagcctatctgcatcaactccagtgaaaaatgcggcccccctcctcctatctctaacggcgatactacttcttttctgctcaaagtctacgtgccacagagccgggttgagtaccagtgtcagccatattatgagctgcaaggctccaactacgtcacctgttctaacggcgagtggtccgagcctccacgctgtatccatccctgcattatcaccgaagaaaatatgaataaaaacaatatcaaactcaaggggcgcagtgaccggaagtactacgccaagacgggtgatacgattgagttcatgtgcaagctgggctacaacgctaacaccagcatcctttcctttcaggcagtctgcagggaagggatcgtggagtacccaagatgcgagtag

SEQ ID NO: 207156 - DNA, 993 bp, Artificial Sequence
  derived and/or modified sequence
atgctgctgctgatcaacgtcatcctgaccctgtgggtgtcctgtgccaacggccaggtgaagccctgtgacttcccagacatcaagcacggcggcctcttccacgagaacatgagaagaccctacttccctgtggccgtgggcaagtactacagctactactgtgatgagcactttgagaccccatctggcagctactgggactacatccactgcacccagaatggctggagccctgctgtgccctgcctgaggaagtgctacttcccctacctggagaatggctacaaccagaactacggcaggaagtttgtgcagggcaacagcacagaggtggcctgccaccctggctacggcctgcccaaggcccagaccaccgtgacctgcacagagaagggctggagccccaccccccgctgcatccgggtgaggacctgcagcaagagtgacattgaaattgaaaatggcttcatcagcgagagcagcagcatctacatcctgaacaaggagatccagtacaagtgcaagccaggctacgccacagcagatggcaacagcagcggcagcatcacctgcctgcagaatggctggagcgcccagcccatctgcatcaacagcagcgagaagtgtggccccccaccacccatcagcaatggagacaccaccagcttcctgctgaaggtgtatgtgccccagagccgggtggagtaccagtgccagccctactatgagctgcagggcagcaactacgtgacctgcagcaatggagagtggagcgagcccccacgctgcatccacccctgcatcatcacagaggagaacatgaacaagaacaacatcaagctgaagggccgcagtgacaggaagtactatgccaagacaggagacaccatcgagttcatgtgcaagctgggctacaatgccaacaccagcatcctgtccttccaggccgtgtgccgggagggcatcgtggagtacccccgctgtgagtag

SEQ ID NO: 207157 - DNA, 993 bp, Artificial Sequence
  derived and/or modified sequence
atgctgctgctgatcaacgtgatcctgaccctgtgggtgagctgcgccaatggccaggtgaagccctgcgacttccctgacatcaagcatggaggtcttttccatgagaatatgaggaggccctattttccggtcgcagtagggaagtactatagctattactgtgacgaacattttgagaccccctcggggagttactgggactatatccactgcactcagaatggttggagccctgccgtcccctgtctgcgaaaatgttacttcccgtatttagagaacggctacaaccagaattacggacgtaaattcgtgcagggcaactccacagaggtggcgtgtcaccctggatacggtttaccgaaagcgcaaactactgttacatgtaccgagaagggctggtcccctaccccccgctgcattagagtccggacatgctcaaagtccgatattgaaatcgagaacggcttcattagcgaatcaagtagcatttatatcttgaataaagagattcagtacaagtgtaagcctggctatgcaacagccgacggcaatagctccggatccattacctgccttcagaatgggtggtccgcccaacccatttgcataaactcgagtgagaaatgtggacctcccccaccaatctcaaacggtgacaccacaagcttcctgctgaaagtgtacgtcccacaaagcagagtcgagtaccagtgtcagccttactatgaactgcaagggtccaattacgtgacttgctccaacggtgaatggtccgagcctccacgctgtattcacccatgtatcattacggaagaaaacatgaacaagaacaacattaagcttaaagggagatccgacaggaaatactatgcgaaaaccggcgatactatcgagttcatgtgtaaactgggatataacgccaatactagcatcctgagtttccaggctgtgtgtcgggaggggatagtggaataccctcggtgtgagtag

SEQ ID NO: 207158 - DNA, 993 bp, Artificial Sequence
  derived and/or modified sequence
atgctgctgctaattaacgtcatcttgactttgtgggtgtcctgtgctaatggccaggtcaagccgtgtgactttccggacatcaaacacgggggtctttttcatgaaaatatgcgcagaccatattttccagtggctgtcggtaagtactactcgtactactgcgacgaacacttcgaaacgccaagtggatcttattgggattatattcattgtacccagaatggatggtcccccgctgtaccctgtttgagaaagtgttacttcccgtatttagagaacggttataatcagaattatggcaggaaattcgtccaaggcaactccactgaagtagcatgccatcccggatacgggttgcccaaggctcagactaccgtcacatgtaccgagaagggttggtcacctaccccaaggtgtatcagagtgcggacgtgcagcaaatctgacatcgagatcgaaaacgggttcatttcggaaagctccagcatatacatccttaataaagagatccagtataagtgcaagccaggctatgccacagcagatggtaatagtagtgggagtattacctgcctgcagaacgggtggtctgctcagcctatctgcatcaattcttcggagaagtgcggaccccctccccctatttcgaacggcgacacgacatccttccttctcaaggtgtatgtaccccagtcccgggtcgagtatcagtgtcaaccttactatgagctccagggttctaactatgttacttgttcaaatggagaatggtctgaaccaccaagatgcatacatccatgcataattaccgaggagaatatgaacaagaacaacataaagctgaagggtagatcagacagaaagtactacgcaaagacaggggacacaatagaatttatgtgcaaactggggtataatgctaacacctccattctctctttccaggctgtctgtagggaagggattgtcgagtatccccgttgtgagtag

SEQ ID NO: 207159 - DNA, 1645 bp, Artificial Sequence
  derived and/or modified sequence
gaaccacacttggtaactaataatgaaagatttcaaaccccaaacagtgcaactgaaacttttgtattagcatactactgagaatatctaacatgttgttactaatcaatgtcattctgaccttgtgggtttcctgtgctaatggacaagtgaaaccttgtgattttccagacattaaacatggaggtctatttcatgagaatatgcgtagaccatactttccagtagctgtaggaaaatattactcctattactgtgatgaacattttgagactccttcaggaagttactgggattacattcattgcacacaaaatgggtggtcaccagcagtaccatgtctcagaaaatgttattttccttatttggaaaatggatataatcaaaattatggaagaaagtttgtacagggtaactctacagaagttgcctgccatcctggctacggtcttccaaaagcgcagaccacagttacatgtacggagaaaggctggtctcctactcccagatgcatccgtgtcagaacatgctcaaaatcagatatagaaattgaaaatggattcatttccgaatcttcctctatttatattttaaataaagaaatacaatataaatgtaaaccaggatatgcaacagcagatggaaattcttcaggatcaattacatgtttgcaaaatggatggtcagcacaaccaatttgcattaattcttcagaaaagtgtgggcctcctccacctattagcaatggtgataccacctcctttctactaaaagtgtatgtgccacagtcaagagtcgagtaccaatgccagccctactatgaacttcagggttctaattatgtaacatgtagtaatggagagtggtcggaaccaccaagatgcatacatccatgtataataactgaagaaaacatgaataaaaataacataaagttaaaaggaagaagtgacagaaaatattatgcaaaaacaggggataccattgaatttatgtgtaaattgggatataatgcaaatacatcaattctatcatttcaagcagtgtgtcgggaagggatagtggaataccccagatgcgaataaggcagcattgttaccctaaatgtatgtccaacttccacttttccacttctcactcttatggtctcaaagcttgcaaagatagcttctgatattgttgtaatttctactttatttcaaagaaaattaatataatagtttcaatttgcaacttaatatattctcaaaaatatattaaaacaaactaaattattgcttatgcttgtactaaaataataaaaactactcttatattggacttcttatcaatgaattagtaagtatagagacagacagctgaatggctttctgcatattgtatagtatacctagacatagaaacaaaatgactttagattttatttggggaagtaataataccataaaattagatattaaaattgtaagtgaagataaacacactatagtattcccttattgtagccatggtcctctagatgcagttaaccaaatagggtcatttttattaaaagtagtgtttcctggcaaacactgacattacatcattatcatgatttaaaggaaatagtactagagaaggtgaattattatcattttcctgt

SEQ ID NO: 207160 - DNA, 993 bp, Artificial Sequence
  derived and/or modified sequence
atgctgctgctgatcaacgtgatcctgaccctgtgggtgagctgcgccaacggccaggtgaagccctgcgacttccccgacatcaagcacggcggcctgttccacgagaacatgagaagaccctacttccccgtggccgtgggcaagtactacagctactactgcgacgagcacttcgagacccccagcggcagctactgggactacatccactgcacccagaacggctggagccccgccgtgccctgcctgagaaagtgctacttcccctacctggagaacggctacaaccagaactacggcagaaagttcgtgcagggcaacagcaccgaggtggcctgccaccccggctacggcctgcccaaggcccagaccaccgtgacctgcaccgagaagggctggagccccacccccagatgcatcagagtgagaacctgcagcaagagcgacatcgagatcgagaacggcttcatcagcgagagcagcagcatctacatcctgaacaaggagatccagtacaagtgcaagcccggctacgccaccgccgacggcaacagcagcggcagcatcacctgcctgcagaacggctggagcgcccagcccatctgcatcaacagcagcgagaagtgcggcccccccccccccatcagcaacggcgacaccaccagcttcctgctgaaggtgtacgtgccccagagcagagtggagtaccagtgccagccctactacgagctgcagggcagcaactacgtgacctgcagcaacggcgagtggagcgagccccccagatgcatccacccctgcatcatcaccgaggagaacatgaacaagaacaacatcaagctgaagggcagaagcgacagaaagtactacgccaagaccggcgacaccatcgagttcatgtgcaagctgggctacaacgccaacaccagcatcctgagcttccaggccgtgtgcagagagggcatcgtggagtaccccagatgcgagtag

SEQ ID NO: 207161 - protein, 291 aa, Artificial Sequence
  derived and/or modified sequence
MEAPASAQTPHPHEPISFGIDQILNSPDQDSAPAPRGPDGASYLGGPPGGRPGATYPSLPASFAGLGAPFEDAGSYSVNLSLAPAGVIRVPAHRPLPGAVPPPLPSALPAMPSVPTVSSLGGLNFPWMESSRRFVKDRFTAAAALTPFTVTRRIGHPYQNRTPPKRKKPRTSFSRVQICELEKRFHRQKYLASAERAALAKSLKMTDAQVKTWFQNRRTKWRRQTAEEREAERQQASRLMLQLQHDAFQKSLNDSIQPDPLCLHNSSLFALQNLQPWEEDSSKVPAVTSLV

SEQ ID NO: 207162 - DNA, 1513 bp, Artificial Sequence
  derived and/or modified sequence
gccgggcgctccatggccgcgccgtaacggggacccagccgcctccccgcccagcccagcccagcccttccgcccgcccaggatggaggcgcccgccagcgcgcagaccccgcacccgcacgagcccatcagcttcggcatcgaccagatccttaacagcccggaccaggacagcgcacccgccccgcggggccccgacggcgccagctacctgggagggccccccgggggccgtccgggcgccacatacccgtctctgcccgcctcctttgcgggcctcggcgcgcccttcgaggacgcgggatcttacagtgtgaacctgagcctagcgcccgcaggcgtgatccgggtgccggcgcacaggccgctgcccggggccgtgccaccgcctctgccaagcgcgctacccgccatgccctccgtgcccacggtctccagccttggcggtctcaatttcccctggatggagagcagccgccgcttcgtgaaagaccgcttcacagcggcggccgcactcacgcccttcaccgtgacccggcgcatcggccacccctaccagaaccggacgccgcccaagcgtaagaagccgcgcacgtccttttcccgggtgcagatctgcgagctggaaaagcgcttccatcgccagaagtacctggcctctgccgagagggcggcgctcgccaagtccctcaaaatgacggacgcgcaggtcaagacctggttccaaaaccggaggaccaagtggcggcggcagacggcggaggagcgggaggcggagcggcagcaggcgagccggctcatgctgcagctgcaacacgacgccttccaaaagagcctcaacgactccatccagcctgacccgctctgtctgcacaactcgtcactctttgctctgcagaatctgcagccctgggaggaggatagttccaaggttcccgctgtcacctccctggtgtgagcccaccagcgcgcaccgtcgccacggatcgccgcccccacccagccgggcgccccggaccccccaggagggctgcgggggaaccggcgccgagaggggaaggggccgcctagcccgagtaggccccagggcgcggccacagactggcgggccgcggaagggggtagggcccgagctccgcgcggccgcacaatccgagcccccgccccgcgccccgtcccgccccaggcccgggcctgacaagaaagcgccttacgtttctccgccccccgcccgcaccccccgggccgggcgcctgtattatactttgtacttttgcccaaacgtgtaaataataaaaaagttttggcttttttctttagaaaccggccacctgcttcccccgcgggggccgctggaggaagggcagccgacccggccgctgggggaagtgccaggggcccggggcaccctgcgtttaggctgggtccactcttcttctttttcgttccttttatttaagtctttttatttaataaaaaagttagctatttcaaaaaaaaaaaaaaaaaaaaa

SEQ ID NO: 207163 - DNA, 876 bp, Artificial Sequence
  derived and/or modified sequence
atggaggcccccgccagcgcccagaccccccacccccacgagcccatcagcttcggcatcgaccagatcctgaacagccccgaccaggacagcgcccccgcccccagaggccccgacggcgccagctacctgggcggcccccccggcggcagacccggcgccacctaccccagcctgcccgccagcttcgccggcctgggcgcccccttcgaggacgccggcagctacagcgtgaacctgagcctggcccccgccggcgtgatcagagtgcccgcccacagacccctgcccggcgccgtgcccccccccctgcccagcgccctgcccgccatgcccagcgtgcccaccgtgagcagcctgggcggcctgaacttcccctggatggagagcagcagaagattcgtgaaggacagattcaccgccgccgccgccctgacccccttcaccgtgaccagaagaatcggccacccctaccagaacagaaccccccccaagagaaagaagcccagaaccagcttcagcagagtgcagatctgcgagctggagaagagattccacagacagaagtacctggccagcgccgagagagccgccctggccaagagcctgaagatgaccgacgcccaggtgaagacctggttccagaacagaagaaccaagtggagaagacagaccgccgaggagagagaggccgagagacagcaggccagcagactgatgctgcagctgcagcacgacgccttccagaagagcctgaacgacagcatccagcccgaccccctgtgcctgcacaacagcagcctgttcgccctgcagaacctgcagccctgggaggaggacagcagcaaggtgcccgccgtgaccagcctggtgtag

SEQ ID NO: 207164 - DNA, 876 bp, Artificial Sequence
  derived and/or modified sequence
atggaagcccctgccagcgcccagacgccccacccccatgaacccataagttttgggatagaccagatcttgaattctcccgatcaggactctgcacccgcgccaaggggacctgacggagcctcatatctgggcgggccacctggcggtaggcccggagctacctatccatctttacccgcaagttttgcaggcctaggagcccccttcgaggatgctggctcgtactcggtgaatctgagtttggcaccggcgggagtgatccgagttcctgctcatcggcccctgcccggggcagttcccccgcctcttccctccgccttaccagctatgcccagtgtgcctaccgtgtcatccctgggcggcctaaattttccctggatggagagctcacgtaggttcgtgaaagatcggttcacggcagcagctgctctgaccccattcacagtgacacgccggatcggccacccttaccaaaaccggacaccgccaaaacgaaagaagccacgcacatcttttagcagggttcagatatgcgaattggaaaagaggtttcacaggcagaaatacctcgcctccgcagaacgggctgccttagccaaatcacttaaaatgaccgacgcccaggtgaagacctggtttcagaacaggaggacaaaatggaggcgtcagaccgccgaagagagggaagccgaaaggcagcaagcttctcggttgatgctccaactgcaacacgatgcctttcagaagtccctgaacgattctattcagcccgatcccctgtgtctgcacaatagctctctattcgctctgcagaacctgcagccgtgggaggaggactcctctaaggtgcctgccgtcaccagtttggtgtag

SEQ ID NO: 207165 - DNA, 876 bp, Artificial Sequence
  derived and/or modified sequence
atggaggccccagccagcgcccagaccccccacccccatgagcccatcagctttggcatcgaccagatcctgaacagcccagaccaggacagcgccccagccccccggggcccagatggagccagctacctgggcggccccccaggcggccggcctggggccacctaccccagcctgcctgccagctttgctggcctgggcgccccctttgaagatgctggcagctacagcgtgaacctgagcctggccccagctggggtcatccgggtgcctgcccaccggcccctgcctggagctgtgcccccacccctgcccagcgccctgcctgccatgcccagcgtgcccaccgtgagcagcctgggcggcctgaacttcccctggatggagagcagccgccgctttgtgaaggaccgcttcaccgctgctgctgccctgacccccttcaccgtgacccggcgcatcggccacccctaccagaacagaacaccacccaagaggaagaagcccaggaccagcttcagccgggtgcagatctgtgagctggagaagcgcttccaccggcagaagtacctggccagcgctgagagagctgccctggccaagagcctgaagatgacagatgcccaggtgaagacctggttccagaacagaaggaccaagtggaggcggcagacagctgaggagcgggaggccgagcggcagcaggccagccggctgatgctgcagctgcagcatgatgccttccagaagagcctgaatgacagcatccagcctgaccccctgtgcctgcacaacagcagcctgtttgccctgcagaacctgcagccctgggaggaggacagcagcaaggtgcctgctgtgaccagcctggtgtag

SEQ ID NO: 207166 - DNA, 876 bp, Artificial Sequence
  derived and/or modified sequence
atggaggcccccgccagcgcccagaccccccacccccacgagcccatatcgtttggaatcgatcagattctgaactcacctgaccaggatagcgcccctgccccccgtgggccagacggcgcctcctaccttgggggacccccagggggtcggcccggggccacctacccctcacttcccgcaagtttcgccggattaggagcaccattcgaggacgcaggcagctacagcgtcaatctgagcctcgctccagctggcgtgatccgggtgccagcacatcgcccactgcccggcgccgtcccgcccccgttaccctcagctttgcctgccatgccaagcgtgccgaccgtgagttcattggggggactcaactttccttggatggaatcctctcgacgtttcgtgaaggacagattcaccgctgccgcagcgctgacaccttttactgtgacccggcggatcggtcacccctaccaaaatagaaccccccccaagcggaaaaagcctagaaccagcttttcccgggtgcagatctgcgagctggagaaacgcttccatcggcagaagtacctggcctcagccgaacgtgccgccctggctaagagcctcaagatgacggacgctcaggtcaaaacttggttccagaacaggcgaacaaagtggcgtagacaaaccgctgaggaaagagaagccgaacggcagcaggctagccgcctcatgttacagttgcagcatgacgctttccagaaaagtctgaatgactcaatacagccggaccccctttgtttgcacaactcttccttgttcgcattgcagaacttgcaaccatgggaagaggactcctccaaggtgccagcggtgacaagcttggtgtag

SEQ ID NO: 207167 - DNA, 876 bp, Artificial Sequence
  derived and/or modified sequence
atggaggctcccgcttccgcgcaaaccccccacccccacgaaccgatcagttttggcatcgaccagatactgaactcgcctgaccaagattccgcgccagcccctcgaggtcccgacggtgcttcttaccttggcggtcctcctggaggaaggccaggcgcaacctacccgagtttgccagctagcttcgccggactgggggcaccgttcgaagacgccggaagttactccgttaacttgagcctggcgccagctggggttatccgcgtgcccgctcatcggccactgcccggtgccgtgccgccacccctgccaagcgctctgccagcaatgcctagcgtgccgaccgtgagctcattgggtggactgaattttccgtggatggagtccagccgacggttcgtgaaagacaggttcaccgccgctgctgccttgacaccctttacggtcacgaggcggatcggacatccctatcagaatagaacccctccgaaaaggaagaaacccagaacaagcttctcgcgcgtacaaatttgtgaacttgagaagagattccatcgacagaaatatcttgcgtccgcggaacgggctgcattagccaagtctctcaagatgactgacgcccaggtgaagacctggtttcagaaccgtcgcacaaaatggagaaggcagacagctgaagagagggaagcagagaggcagcaagccagcaggcttatgttgcagctgcagcatgacgcttttcaaaaatcattaaatgactctatacagccagaccctctgtgtctccacaactccagcctgtttgctctgcagaaccttcagccatgggaggaagattcatcaaaagtgcctgctgtgacctccctggtctag

SEQ ID NO: 207168 - DNA, 1883 bp, Artificial Sequence
  derived and/or modified sequence
gccgggcgctccatggccgcgccgtaacggggacccagccgcctccccgcccagcccagcccagcccttccgcccgcccaggatggaggcgcccgccagcgcgcagaccccgcacccgcacgagcccatcagcttcggcatcgaccagatccttaacagcccggaccaggacagcgcacccgccccgcggggccccgacggcgccagctacctgggagggccccccgggggccgtccgggcgccacatacccgtctctgcccgcctcctttgcgggcctcggcgcgcccttcgaggacgcgggatcttacagtgtgaacctgagcctagcgcccgcaggcgtgatccgggtgccggcgcacaggccgctgcccggggccgtgccaccgcctctgccaagcgcgctacccgccatgccctccgtgcccacggtctccagccttggcggtctcaatttcccctggatggagagcagccgccgcttcgtgaaagaccgcttcacagcggcggccgcactcacgcccttcaccgtgacccggcgcatcggccacccctaccagaaccggacgccgcccaagcgtaagaagccgcgcacgtccttttcccgggtgcagatctgcgagctggaaaagcgcttccatcgccagaagtacctggcctctgccgagagggcggcgctcgccaagtccctcaaaatgacggacgcgcaggtcaagacctggttccaaaaccggaggaccaagtggcggcggcagacggcggaggagcgggaggcggagcggcagcaggcgagccggctcatgctgcagctgcaacacgacgccttccaaaagagcctcaacgactccatccagcctgacccgctctgtctgcacaactcgtcactctttgctctgcagaatctgcagccctgggaggaggatagttccaaggttcccgctgtcacctccctggtgtgagcccaccagcgcgcaccgtcgccacggatcgccgcccccacccagccgggcgccccggaccccccaggcgggctgcgggggaaccggcgccgagaggggaaggggccgcctagcccgagtaggccccagggcgcggccacagactggcgggccgcggaagggggtagggcccgagctccgcgcggccgcacaatccgagcccccgccccgcgccccgtcccgccccaggcccgggcctgacaagaaagcgccttacgtttctccgccccccgcccgcaccccccgggccgggcgcctgtattatactttgtacttttgcccaaacgtgtaaataataaaaaagttttggcttttttctttagaaaccggccacctgcttcccccgcgggggccgctggaggaagggcagccgacccggccgctgggggaagtgccaggggcccggggcaccctgcgtttaggctgggtccactcttcttcttttccgttccttttatttaagtctttttatttaataaaaaagttagctatttcacttaacgccgcttttatttcgttttcgttccaataatgctcggcgacccccggccctgcgccccacccctgcggcggtagaagccgagcggcggcgcgcagggcgcgtccacttccgcaacgttcgtctgcattcgcctcggctgcaaccccggcccgggcccccgaggaggatgcgcggtgcaggtcagttggtgccggccacccgcagcctgggtgcgcacgggatggggactggacatgggaaaggtgctccaggcccgaaggccgcgggccagcgccggggcgggctggggagtgaaaggctgggcctgggcagatgcctaggccgtccccaggtcaaatccacctggggggtgggaggcagggtggcctcgaacttcttagagct

SEQ ID NO: 207169 - protein, 317 aa, Artificial Sequence
  derived and/or modified sequence
MKRLSLVTTNRLSPHGNFLPLCTFPLAVDMAALFQEASSCPVCSDYLEKPMSLECGCAVCFKCINSLQKEPHGEDLLCCCCSMVSQKNKIRPSWQLERLASHIKELEPKLKKILQMNPRMRKFQVDMTLDADTANNFLLISDDLRSVRSGCITQNRQDLAERFDVSICILGSPRFTCGRHYWEVDVGTSTEWDLGVCRESVHRKGRIHLTTERGFWTVSLRDGSRLSASTVPLTFLFVDRKLQRVGIFLDMGMQNVSFFDAEGGSHVYTFRSVSAEEPLHLFFAPPSPPNGDKSVLSICPVINPGTTDAPVHPGEAK

SEQ ID NO: 207170 - DNA, 954 bp, Artificial Sequence
  derived and/or modified sequence
atgaaaagactgagcctcgtgactactaatagactcagtccacatggcaacttccttccgctctgtactttcccgttagccgtcgatatggccgccctgttccaggaggcatcaagctgccctgtctgtagtgactacctcgagaaaccaatgagcctagaatgcggttgcgccgtttgctttaaatgtataaattccctgcagaaagaaccacacggcgaggatctgctctgctgctgttgttccatggtttcacagaagaacaaaattcgacctagttggcagttggaacgtttagcctctcatattaaggagctcgagcctaagctcaaaaagatccttcagatgaatccccggatgcggaaatttcaggtggatatgactctcgacgccgacacagcgaacaactttctactgatctccgacgatctccgctccgttagatctgggtgtataacgcagaaccgtcaggacctggcagaacgattcgatgtgtctatttgtattcttggatccccacggttcacatgcgggcgccattattgggaagtcgacgtcgggacgagtactgagtgggatttgggagtgtgtcgggaaagtgtccatcgcaaggggcgaatacatctgacaacagagcgcggtttttggacagtgtcactacgagatggatccagactgtccgctagcacggtgcccctgaccttcctgttcgttgatcgcaagcttcagcgcgtgggcatcttcctggatatggggatgcagaacgtgtcattctttgacgccgaaggtggtagccatgtttacactttcagatctgtgtcagcggaggaaccactgcatcttttcttcgcccctccctcacctccgaacggggacaagagcgtgctatcgatttgtccagtgattaatcctggaaccactgatgcccccgttcaccccggtgaggcgaagtag

SEQ ID NO: 207171 - DNA, 954 bp, Artificial Sequence
  derived and/or modified sequence
atgaagaggctgagcctggtgaccaccaaccggctgagcccccacggcaacttcctgcccctgtgcaccttccccctggccgtggacatggccgccctcttccaggaggccagcagctgccctgtgtgcagcgactacctggagaagcccatgagcctggagtgtggctgtgctgtgtgcttcaagtgcatcaacagcctgcagaaggagccccacggggaggacctgctgtgctgctgctgcagcatggtgtcccagaagaacaagatccggcccagctggcagctggagcggctggccagccacatcaaggagctggagcccaagctgaagaagatcctgcagatgaaccccaggatgaggaagttccaggtggacatgaccctggatgctgacacagccaacaacttcctgctgatcagtgatgacctgcggtctgtgcgcagcggctgcatcacccagaaccggcaggacctggccgagagatttgatgtgtccatctgcatcctgggcagcccccgcttcacctgtggccgccactactgggaggtggatgtgggcaccagcacagagtgggacctgggcgtgtgccgggagagcgtgcacaggaagggccgcatccacctgaccacagagcggggcttctggacagtgtccctgagagatggcagccggctgagcgccagcacagtgcccctgaccttcctgtttgtggacaggaagctgcagagggtgggcatcttcctggacatgggcatgcagaatgtgtccttctttgatgctgagggcggcagccacgtgtacaccttccgctctgtgtctgctgaggagcccctgcacctgttctttgccccacccagcccccccaacggggacaagtctgtgctgagcatctgccctgtgatcaaccctggcaccacagatgcccctgtgcaccctggagaggccaagtag

SEQ ID NO: 207172 - DNA, 954 bp, Artificial Sequence
  derived and/or modified sequence
atgaagcggctgagcctggtgaccaccaaccggctgagcccccacggtaattttctacctctttgcacattccctcttgctgtggacatggctgcactgtttcaggaggcctcctcctgccctgtatgctccgactatctcgaaaaacctatgagtttagaatgcggatgcgcggtttgctttaagtgcatcaacagtctccaaaaagagccccacggagaggatctattgtgctgttgttgtagtatggtttctcagaagaacaagattcgcccttcgtggcagttggaacgtcttgccagtcatataaaagaactggagcccaaactgaagaagatactgcaaatgaatccaaggatgcgcaagttccaggtggatatgactcttgatgccgacactgcaaataattttctgctaatctcggatgacttgcggtcagtgaggagtggctgcatcacacagaacaggcaggatctggccgagagattcgacgtgtccatttgtatcctaggctccccccgctttacctgcggcagacattattgggaagtggatgtaggcacctccacggaatgggacctgggggtgtgccgtgaaagcgtacacagaaagggacgtattcacttaacaaccgaaagaggtttttggaccgtctctctgcgagatggcagtcggctgtcagcctctaccgtgccgctaacctttctgtttgtagatagaaaactccagagggtgggtatcttcctggacatggggatgcagaacgtctccttctttgatgccgagggcggcagccatgtttacacgttccggagtgttagtgccgaggaaccccttcatctcttcttcgccccaccctccccccctaatggggacaaatcggttttaagtatatgtccagtgatcaatccaggcactacggacgcccccgtgcatccaggcgaggccaaatag

SEQ ID NO: 207173 - DNA, 954 bp, Artificial Sequence
  derived and/or modified sequence
atgaaaaggctctctctcgtcaccacaaatcgtctcagccctcatggcaactttcttccattgtgcactttccccctggctgtcgatatggccgctctcttccaggaagcatccagttgtccagtgtgcagtgattatctggagaaacccatgtctctcgaatgcggatgtgccgtgtgtttcaaatgtattaattctctgcaaaaagagcctcacggcgaagatcttctctgctgctgttgtagcatggtttctcaaaaaaacaaaatccgcccatcatggcagctggagcgtttagcatcccatatcaaggaactcgaaccgaagctgaagaagattctgcagatgaaccctaggatgagaaagtttcaggtcgatatgacgctcgatgccgacaccgccaacaacttccttctgattagcgatgacctacgctcggtgcggtcaggctgcatcacccaaaaccgccaagacctggctgagcgatttgatgttagcatatgcatccttggctctcctaggttcacctgtggaagacactattgggaagtggatgtgggcacatcaactgaatgggatctcggagtgtgcagggagagcgttcatcgaaagggtagaatccacttaactacagagcgcggattctggacagtgtccctgcgcgacggtagtagattgtccgcgtcgaccgtaccactcactttcctgttcgtagaccgtaaactgcaaagagtggggatcttcctggacatgggaatgcagaatgtatcattttttgacgcagaaggtggttctcatgtgtacacgtttagaagcgtaagtgcagaagagcccctgcatctctttttcgcccctccttcccctcccaacggtgataaatccgttctctctatttgccccgtgatcaatcctggaaccaccgacgctcctgtgcatccaggggaagcaaagtag

SEQ ID NO: 207174 - DNA, 1496 bp, Artificial Sequence
  derived and/or modified sequence
gccgtgtcactggctcaggctcagttgctgggtcaccagtagaatggacccttcctccacctcagttcagagcacagtgatgattcgtgactttctttcccaatagaacttcaaatctctgaagacggggggtggggggatgtgcttgagtgtttgtactcatggtcttgttctagaagtgacaaagctgggacacaatacctttatgcatgaaaaggttgtcacttgtcacaactaacaggctttcacctcacggaaattttcttcccttgtgcacttttcccctggcagtggacatggctgcactcttccaagaagcaagcagctgtcccgtctgctcagactatctagagaaaccaatgtccctggagtgtggatgcgctgtctgcttcaagtgcatcaattcactgcagaaggagccccatggggaggatctactttgctgttgctgttccatggtctctcagaagaacaaaatcaggcccagttggcagctagagaggctggcttcccacatcaaggaactggagcccaagctgaagaagattctgcagatgaacccaaggatgcggaagttccaagtggatatgaccttggatgccgacacagccaacaacttcctcctcatttctgacgacctcaggagcgtccgaagtgggtgcatcacacagaatcggcaagaccttgccgagagatttgacgtgtccatttgcatcctgggctcccctcgctttacctgtggccgccactactgggaggtggacgtgggaacaagcacagaatgggacctgggagtctgcagagaatctgttcaccgcaaagggaggatccatctgaccacagagcgtggattctggactgtgagtttgagggatggaagccgcctctctgccagcacggtgccgctgactttcctcttcgtagaccgcaagttacagcgagtggggatttttctggatatgggcatgcagaacgtttccttttttgatgctgaaggtggttcccatgtctatacattcaggagtgtctctgctgaggagccactgcacttgttttttgctcctccaagtccacctaatggtgataagagtgtcttgagtatctgtcctgtgataaacccgggcactactgatgctccagtccatcctggggaggccaaataagcccccactgcaaaaaaacaaaaaacaggttaagaaaattacttgggtgggcagacttaggaacgctctactcggtaaaagcgttatacaaagtcataggagaaaaatatgggacaattcatgattatacttaatctaatttgattagtttataaattgagtcctaagtattaattattgccaccatccaactcattgagtcttatggttcacatcttgtttcctatagaaatattctgtattctgggatcaatttccaaatgcttttttatttctgtaagttcaaattaatgtattatagaagttatgagttaaataaacattggaatatca

SEQ ID NO: 207175 - DNA, 954 bp, Artificial Sequence
  derived and/or modified sequence
atgaagagactgagcctggtgaccaccaacagactgagcccccacggcaacttcctgcccctgtgcaccttccccctggccgtggacatggccgccctgttccaggaggccagcagctgccccgtgtgcagcgactacctggagaagcccatgagcctggagtgcggctgcgccgtgtgcttcaagtgcatcaacagcctgcagaaggagccccacggcgaggacctgctgtgctgctgctgcagcatggtgagccagaagaacaagatcagacccagctggcagctggagagactggccagccacatcaaggagctggagcccaagctgaagaagatcctgcagatgaaccccagaatgagaaagttccaggtggacatgaccctggacgccgacaccgccaacaacttcctgctgatcagcgacgacctgagaagcgtgagaagcggctgcatcacccagaacagacaggacctggccgagagattcgacgtgagcatctgcatcctgggcagccccagattcacctgcggcagacactactgggaggtggacgtgggcaccagcaccgagtgggacctgggcgtgtgcagagagagcgtgcacagaaagggcagaatccacctgaccaccgagagaggcttctggaccgtgagcctgagagacggcagcagactgagcgccagcaccgtgcccctgaccttcctgttcgtggacagaaagctgcagagagtgggcatcttcctggacatgggcatgcagaacgtgagcttcttcgacgccgagggcggcagccacgtgtacaccttcagaagcgtgagcgccgaggagcccctgcacctgttcttcgccccccccagcccccccaacggcgacaagagcgtgctgagcatctgccccgtgatcaaccccggcaccaccgacgcccccgtgcaccccggcgaggccaagtag

SEQ ID NO: 207176 - protein, 530 aa, Artificial Sequence
  derived and/or modified sequence
MACTGWTSPLPLCVCLLLTCGFAEAGKLLVVPMDGSHWFTMRSVVEKLILRGHEVVVVMPEVSWQLGRSLNCTVKTYSTSYTLEDLDREFKAFAHAQWKAQVRSIYSLLMGSYNDIFDLFFSNCRSLFKDKKLVEYLKESSFDAVFLDPFDNCGLIVAKYFSLPSVVFARGILCHYLEEGAQCPAPLSYVPRILLGFSDAMTFKERVRNHIMHLEEHLLCHRFFKNALEIASEILQTPVTEYDLYSHTSIWLLRTDFVLDYPKPVMPNMIFIGGINCHQGKPLPMEFEAYINASGEHGIVVFSLGSMVSEIPEKKAMAIADALGKIPQTVLWRYTGTRPSNLANNTILVKWLPQNDLLGHPMTRAFITHAGSHGVYESICNGVPMVMMPLFGDQMDNAKRMETKGAGVTLNVLEMTSEDLENALKAVINDKSYKENIMRLSSLHKDRPVEPLDLAVFWVEFVMRHKGAPHLRPAAHDLTWYQYHSLDVIGFLLAVVLTVAFITFKCCAYGYRKCLGKKGRVKKAHKSKTH

SEQ ID NO: 207177 - DNA, 444 bp, Artificial Sequence
  derived and/or modified sequence
  misc_feature (417)..(417): n is a, c, g, or t
  misc_feature (440)..(440): n is a, c, g, or t
ctttgagtttcagcaaatgtctttaggttgaaggaattacctatgtcatgaaggacctgtctgtggtttttcaatggagtctttaagcatgatcttttttctgtctagtacttgttttcattctggccagcagttctacattaaatcaccttgtcaagggctctgtttacatctatacattttgaagatgaaatttttagccttaaagtttatattctcaagtccttttacaatcagtgtgtctcctgaactagcacacaggctgtagaaacagtcttagaaatcattgaaagatttgattatgaaagaatagcaaaattatatttcttgacatataaaaagttggtttaatgcctttatttccctttaaggaccagaaccaggaatactatatcgaaaaattagtctgtggatttnacactgacttagcatatagcttnaagt

SEQ ID NO: 207178 - DNA, 1593 bp, Artificial Sequence
  derived and/or modified sequence
atggcctgcaccggctggaccagccccctgcccctgtgcgtgtgcctgctgctgacctgcggcttcgccgaggccggcaagctgctggtggtgcccatggacggcagccactggttcaccatgagaagcgtggtggagaagctgatcctgagaggccacgaggtggtggtggtgatgcccgaggtgagctggcagctgggcagaagcctgaactgcaccgtgaagacctacagcaccagctacaccctggaggacctggacagagagttcaaggccttcgcccacgcccagtggaaggcccaggtgagaagcatctacagcctgctgatgggcagctacaacgacatcttcgacctgttcttcagcaactgcagaagcctgttcaaggacaagaagctggtggagtacctgaaggagagcagcttcgacgccgtgttcctggaccccttcgacaactgcggcctgatcgtggccaagtacttcagcctgcccagcgtggtgttcgccagaggcatcctgtgccactacctggaggagggcgcccagtgccccgcccccctgagctacgtgcccagaatcctgctgggcttcagcgacgccatgaccttcaaggagagagtgagaaaccacatcatgcacctggaggagcacctgctgtgccacagattcttcaagaacgccctggagatcgccagcgagatcctgcagacccccgtgaccgagtacgacctgtacagccacaccagcatctggctgctgagaaccgacttcgtgctggactaccccaagcccgtgatgcccaacatgatcttcatcggcggcatcaactgccaccagggcaagcccctgcccatggagttcgaggcctacatcaacgccagcggcgagcacggcatcgtggtgttcagcctgggcagcatggtgagcgagatccccgagaagaaggccatggccatcgccgacgccctgggcaagatcccccagaccgtgctgtggagatacaccggcaccagacccagcaacctggccaacaacaccatcctggtgaagtggctgccccagaacgacctgctgggccaccccatgaccagagccttcatcacccacgccggcagccacggcgtgtacgagagcatctgcaacggcgtgcccatggtgatgatgcccctgttcggcgaccagatggacaacgccaagagaatggagaccaagggcgccggcgtgaccctgaacgtgctggagatgaccagcgaggacctggagaacgccctgaaggccgtgatcaacgacaagagctacaaggagaacatcatgagactgagcagcctgcacaaggacagacccgtggagcccctggacctggccgtgttctgggtggagttcgtgatgagacacaagggcgccccccacctgagacccgccgcccacgacctgacctggtaccagtaccacagcctggacgtgatcggcttcctgctggccgtggtgctgaccgtggccttcatcaccttcaagtgctgcgcctacggctacagaaagtgcctgggcaagaagggcagagtgaagaaggcccacaagagcaagacccactag

SEQ ID NO: 207179 - DNA, 1593 bp, Artificial Sequence
  derived and/or modified sequence
atggcctgcacaggctggacaagcccactgccactgtgcgtgtgcttactgctgacgtgcggcttcgccgaagcaggcaaactcctcgtggtccctatggatggtagccattggtttaccatgcgctcggtcgtggagaaactcatcctgaggggccatgaggttgttgtggtgatgcctgaggtgtcttggcagctggggcgtagtctgaactgcacagtgaaaacctactcaactagctacactttggaagacctggatcgcgaattcaaagcctttgctcacgcccagtggaaagcccaggtacgctctatctactctttgctgatggggtcttacaatgatatattcgatcttttcttctcaaattgtcgaagcctgtttaaggataagaaactggtggaatatctcaaggaatcatctttcgacgcggtattcctggatcccttcgacaactgtggcttgattgtagccaaatatttcagcctaccaagtgtagtgttcgcccgcggtatcctgtgccattacttggaggagggagcccagtgcccagcccccctgtcttacgtccccagaatactactgggcttctctgatgcaatgacttttaaggagcgagttagaaaccacatcatgcaccttgaagaacatcttctgtgccaccgcttttttaagaacgcactcgaaattgcttctgagattctccagacacctgtgactgagtacgacctctactcccatacctcaatatggctgctcaggacagactttgtgctggactacccaaagcccgttatgccaaatatgatcttcatcggaggaatcaactgccaccagggtaagcccctgccaatggaattcgaggcgtatataaacgcatcgggtgagcacggtatcgtcgttttctctctgggcagcatggtgagcgaaataccagaaaagaaggctatggccattgccgacgccctgggcaaaatcccccagactgtgctctggcgctatacaggcaccagaccttccaatctagcaaataacacgatccttgtgaaatggctgccccagaacgatctcttgggccatcccatgacgagagcgttcatcacccatgctggcagtcatggggtttacgagagcatttgcaacggcgtgcccatggtgatgatgcctctgttcggggaccagatggacaacgcaaagcgcatggaaacaaagggcgcaggcgtcaccctcaacgtgctggagatgactagtgaggacctcgagaatgctctgaaggcagtgatcaatgataagtcatataaggaaaacataatgcgactcagctcccttcataaagacaggcccgtcgaacctctcgatttagctgtcttttgggtggaatttgtcatgagacataaaggggcccctcatctacgaccggcagcgcacgacctgacatggtatcagtatcacagccttgatgtgatcgggtttctgctcgccgttgtcctgactgtggctttcatcacattcaaatgttgtgcctatggctatcgcaagtgcctcgggaaaaagggccgggtgaaaaaggctcacaaatctaagacacactag

SEQ ID NO: 207180 - DNA, 1593 bp, Artificial Sequence
  derived and/or modified sequence
atggcctgcaccggctggaccagccccctgcccctgtgtgtgtgcctgctgctgacctgtggctttgctgaggccggcaagctgctggtggtgcccatggatggcagccactggttcaccatgaggtctgtggtggagaagctgatcctgcggggccacgaggtggtggtggtgatgcctgaggtgtcctggcagctgggccgcagcctgaactgcaccgtgaagacctacagcaccagctacaccctggaggacctggaccgggagttcaaggcctttgcccacgcccagtggaaggcccaggtgcgcagcatctacagcctgctgatgggcagctacaatgacatctttgacctcttcttcagcaactgccgcagcctcttcaaggacaagaagctggtggagtacctgaaggagagcagctttgatgctgtgttcctggacccctttgacaactgtggcctcatcgtggccaagtacttcagcctgcccagcgtggtgtttgcccggggcatcctgtgccactacctggaggagggcgcccagtgcccagcccccctgtcctatgtgccccgcatcctgctgggcttcagtgatgccatgaccttcaaggagcgggtgaggaaccacatcatgcacctggaggagcacctgctgtgccaccgcttcttcaagaatgccctggagatcgccagcgagatcctgcagacccctgtgacagaatatgacctgtacagccacaccagcatctggctgctgaggacagactttgtgctggactaccccaagcctgtgatgcccaacatgatcttcatcggcggcatcaactgccaccagggcaagcccctgcccatggagtttgaggcctacatcaatgccagcggggagcacggcatcgtggtgttcagcctgggctccatggtgtctgagatccctgagaagaaggccatggccatcgcagatgccctgggcaagatcccccagacagtgctgtggagatacacaggcacccggcccagcaacctggccaacaacaccatcctggtgaagtggctgccccagaatgacctgctgggccaccccatgacccgggccttcatcacccacgccggcagccatggagtgtatgagagcatctgcaatggagtgcccatggtgatgatgcccctgtttggagaccagatggacaatgccaagaggatggagaccaagggggccggcgtgaccctgaatgtgctggagatgaccagcgaggacctggagaatgccctgaaggccgtcatcaatgacaagagctacaaggagaacatcatgaggctgagcagcctgcacaaggacaggcctgtggagcccctggacctggccgtgttctgggtggagtttgtgatgaggcacaagggggccccccacctgcggcctgctgcccatgacctgacctggtaccagtaccacagcctggatgtgattggcttcctgctggccgtggtgctgactgtggccttcatcaccttcaagtgctgtgcctacggctacaggaagtgcctgggcaagaagggccgggtgaagaaggcccacaagagcaagacccactag

SEQ ID NO: 207181 - DNA, 1593 bp, Artificial Sequence
  derived and/or modified sequence
atggcctgcaccggctggaccagccccctgcccctgtgcgtgtgcttgctcttgacctgcggctttgcggaagccgggaagctcctggtcgttccgatggacggctctcattggttcacaatgcgatccgtggtggagaaattgattcttcggggtcacgaggtggttgtggtcatgcctgaagtgagctggcagttagggcgaagccttaactgtacagtgaaaacttactctacctcctatacactggaggacctggaccgggagtttaaagcctttgcccatgcacagtggaaggctcaagtccgctctatatattcattgctgatgggatcgtacaacgacatcttcgacttgttctttagtaattgcaggtctctgtttaaggacaagaagctcgtggagtacctgaaagagtccagtttcgacgcagttttcctggatcctttcgacaattgtggattgatcgtcgcgaagtacttctccctacccagcgtggtgtttgcgaggggcatcttgtgtcattacttagaagaaggagctcagtgcccagcccccctctcttacgttcctagaattttgcttggctttagcgatgcaatgactttcaaggaacgcgtgcggaatcacatcatgcacctcgaagagcacctgctgtgtcaccgcttttttaaaaatgccttggagattgcctcggagatcctacagacccctgtgactgaatacgatctgtacagccatacctcgatctggctgcttcggacggatttcgttcttgattatcccaagcccgtgatgccaaacatgattttcatcgggggaattaattgccaccaaggcaaacctctccccatggagttcgaggcatacattaacgctagtggagagcatggcatagtggtgttcagtctgggctcgatggtgtccgagatccctgagaaaaaggctatggctatagccgacgcactcggtaaaataccacagacagtgctctggagatacacaggtacccgaccatctaacttggctaataacaccatccttgtcaagtggctgcctcaaaacgacttgctcggacaccctatgacccgagccttcatcacgcatgctggttcccacggggtgtatgagtccatctgcaacggggtccctatggtcatgatgcccctttttggggaccagatggataatgccaagagaatggagacaaaaggcgccggagtgacactgaatgtcttggagatgacatcagaagacctcgagaatgccctgaaagctgtgattaatgataaatcttacaaagagaacattatgcggctgtcctccctgcacaaagatcgccctgtcgagcccttggacctggctgtcttctgggttgaatttgtgatgaggcataaaggcgctccacacctacgccccgccgcccatgacctgacgtggtaccaataccattccctcgacgtgatcggattcttgcttgcagtggtcttaaccgtcgccttcataaccttcaagtgttgcgcatacggatataggaagtgtctgggcaaaaaagggcgagtcaagaaagcgcacaagtcaaaaacacattag

SEQ ID NO: 207182 - DNA, 1593 bp, Artificial Sequence
  derived and/or modified sequence
atggcgtgcacaggctggactagccccttaccactttgtgtctgcttgcttcttacatgcggttttgcagaggccggtaagttacttgttgtgccaatggatggctctcattggtttacaatgcgtagtgtagtggagaagcttatcctgagagggcatgaggtcgtggtggttatgcctgaggtatcttggcaattagggagaagcttgaactgcaccgtaaagacctactccactagctacacgctggaagatctggatagggaatttaaagccttcgctcacgcccagtggaaagcacaggttaggagtatctacagccttttgatgggcagttacaatgatatcttcgacctcttcttttccaactgccgatccctctttaaggataaaaaactggttgagtacctcaaggaatcctcatttgatgcagtcttcttagacccatttgataactgcggtctgattgtggccaaatacttcagcctgcctagtgtggtctttgcacgcggaatcctgtgccactacctcgaggaaggcgctcagtgccctgctcccctctcgtacgtgcctcggatcttgctgggatttagcgacgccatgaccttcaaggagagagtgcgcaaccatatcatgcatctggaggaacacctcctgtgccacagatttttcaagaatgctttagaaattgcgtccgaaatcttacagacccccgttacagagtatgatctgtacagccatacctctatctggctgttgaggacggactttgttcttgattaccccaaaccagtgatgcccaacatgatctttatagggggaatcaattgtcaccagggaaaacccttgcctatggagttcgaagcctacataaatgctagcggcgagcacggcattgttgtcttctcccttggatctatggtaagtgaaatacctgaaaagaaggccatggctatagcggacgcattgggcaagatccctcagactgtgctgtggagatacactgggacccgcccatcaaatttggccaacaataccatcctagtgaagtggcttccccagaatgacttacttgggcatcctatgacacgcgcatttatcacgcatgcgggatcccacggcgtgtatgaatccatctgtaatggggtgcctatggtaatgatgccattattcggggaccagatggacaacgcaaaaaggatggaaacaaagggcgcaggtgtgacacttaatgtgctggagatgactagcgaggatctggagaacgccctgaaagcagtgatcaatgataagtcctataaagaaaatatcatgcggctaagttccctgcataaggatcgcccagtggagcctcttgatctcgcggtgttctgggtcgaatttgttatgcgtcacaagggggcaccgcacctgcgcccagccgctcacgaccttacatggtaccagtaccatagcctggatgtaataggattcctgctggctgttgttttgacagtcgcctttatcacatttaagtgctgcgcttacggatacagaaaatgtctcggtaaaaaaggaagggtgaagaaagcacacaaatctaaaacacactag

SEQ ID NO: 207183 - DNA, 2416 bp, Artificial Sequence
  derived and/or modified sequence
ggttttgtgctggtatttctcccacctactgtatcataggagcttagattcccagctgcttgctctcagctgcagttctctgatggcttgcacagggtggaccagcccccttcctctatgtgtgtgtctgctgctgacctgtggctttgccgaggcagggaagctactggtagtgcccatggatgggagccactggttcaccatgaggtcggtggtggagaaactcattctcagggggcatgaggtggttgtagtcatgccagaggtgagttggcaactgggaagatcactgaattgcacagtgaagacttattcaacttcatataccctggaggatctggaccgggagttcaaggcttttgcccatgctcaatggaaagcacaagtacgaagtatatattctctattaatgggttcatacaatgacatttttgacttatttttttcaaattgcaggagtttgtttaaagacaaaaaattagtagaatacttaaaggagagttcttttgatgcagtgtttctcgatccttttgataactgtggcttaattgttgccaaatatttctccctcccctccgtggtcttcgccaggggaatactttgccactatcttgaagaaggtgcacagtgccctgctcctctttcctatgtccccagaattctcttagggttctcagatgccatgactttcaaggagagagtacggaaccacatcatgcacttggaggaacatttattatgccaccgttttttcaaaaatgccctagaaatagcctctgaaattctccaaacacctgttacggagtatgatctctacagccacacatcaatttggttgttgcgaacggactttgttttggactatcccaaacccgtgatgcccaacatgatcttcattggtggtatcaactgccatcagggaaagccgttgcctatggaatttgaagcctacattaatgcttctggagaacatggaattgtggttttctctttgggatcaatggtctcagaaattccagagaagaaagctatggcaattgctgatgctttgggcaaaatccctcagacagtcctgtggcggtacactggaacccgaccatcgaatcttgcgaacaacacgatacttgttaagtggctaccccaaaacgatctgcttggtcacccgatgacccgtgcctttatcacccatgctggttcccatggtgtttatgaaagcatatgcaatggcgttcccatggtgatgatgcccttgtttggtgatcagatggacaatgcaaagcgcatggagactaagggagctggagtgaccctgaatgttctggaaatgacttctgaagatttagaaaatgctctaaaagcagtcatcaatgacaaaagttacaaggagaacatcatgcgcctctccagccttcacaaggaccgcccggtggagccgctggacctggccgtgttctgggtggagtttgtgatgaggcacaagggcgcgccacacctgcgccccgcagcccacgacctcacctggtaccagtaccattccttggacgtgattggtttcctcttggccgtcgtgctgacagtggccttcatcacctttaaatgttgtgcttatggctaccggaaatgcttggggaaaaaagggcgagttaagaaagcccacaaatccaagacccattgagaagtgggtgggaaataaggtaaaattttgaaccattccctagtcatttccaaacttgaaaacagaatcagtgttaaattcattttattcttattaaggaaatactttgcataaattaatcagccccagagtgctttaaaaaattctcttaaataaaaataatagactcgctagtcagtaaagatatttgaatatgtatcgtgccccctctggtgtctttgatcaggatgacatgtgccatttttcagaggacgtgcagacaggctggcattctagattacttttcttactctgaaacatggcctgtttgggagtgcgggattcaaaggtggtcccacggctgcccctactgcaaatggcagttttaatcttatcttttggcttctgcagatggttgcaattgatccttaaccaataatggtcagtcctcatctctgtcgtgcttcataggtgccaccttgtgtgtttaaagaagggaagctttgtacctttagagtgtaggtgaaatgaatgaatggcttggagtgcactgagaacagcatatgatttcttgctttggggaaaaagaatgatgctatgaaattggtgggtggtgtatttgagaagataatcattgcttatgtcaaatggagctgaatttgataaaaacccaaaatacagctatgaagtgctgggcaagtttactttttttctgatgtttcctacaactaaaaataaattaataaatttatataaattcta

SEQ ID NO: 207184 - protein, 142 aa, Artificial Sequence
  derived and/or modified sequence
MIAPTDSHEEVRSGTSYILPFASRFLSFRADSAHASMVNVPKTRRTFCKKCGKHQPHKVTQYKKGKDSLYAQGKRRYDRKQSGYGGQTKPIFRKKAKTTKKIVLRLECVEPNCRSKRMLAIKRCKHFELGGDKKRKGQVIQF

SEQ ID NO: 207185 - protein, 106 aa, Artificial Sequence [sequence omitted]

SEQ ID NO: 207186 - protein, 106 aa, Artificial Sequence
  derived and/or modified sequence
MVNVPKTRRTFCKKCGKHQPHKVTQYKKGKDSLYAQGRRRYDRKQSGYGGQTKPIFRKKAKTTKKIVLRLECVEPNCRSKRMLAIKRCKHFELGGDKKRKGQVIQF

SEQ ID NO: 207187 - DNA, 429 bp, Artificial Sequence
  derived and/or modified sequence
atgattgcgcccaccgacagccacgaagaagtccggtctggtaccagctacattcttcctttcgcttcacgattcctctcttttagggcagattcggctcacgctagcatggttaatgtgccaaaaacacggaggaccttttgtaagaagtgcggaaagcaccagcctcacaaagtgacccagtataagaagggcaaagacagcctctacgcacagggtaagcgccgctacgatagaaagcagtccggttacggtgggcagaccaagcccatatttaggaaaaaggccaaaactacaaaaaaaatcgttttgcggctggaatgtgtggagccaaattgcaggagcaagcggatgctggctataaaaagatgcaaacattttgagctcgggggcgataaaaagcgtaaaggacaggtgatccagttttag

SEQ ID NO: 207188 - DNA, 429 bp, Artificial Sequence
  derived and/or modified sequence
atgattgcccccacagacagccatgaggaggtgcgcagcggcaccagctacatcctgccctttgccagccgcttcctgtccttccgggctgacagcgcccacgcctccatggtgaatgtgcccaagaccaggaggaccttctgcaagaagtgtgggaagcaccagccccacaaggtgacccagtacaagaagggcaaggacagcctgtatgcccagggcaagagaagatatgacaggaagcagagcggctacggcggccagaccaagcccatcttcaggaagaaggccaagaccaccaagaagatcgtgctgcggctggagtgtgtggagcccaactgccgcagcaagaggatgctggccatcaagcgctgcaagcactttgagctgggcggggacaagaagaggaagggccaggtgatccagttctag

SEQ ID NO: 207189 - DNA, 429 bp, Artificial Sequence
  derived and/or modified sequence
atgatcgcccccaccgacagccacgaggaggtgcggagcggcacctcctacatactgccattcgcgtcacgcttcctttcgttccgagccgattcggctcacgcaagtatggttaacgtccctaagactcgtcggacattttgcaagaagtgcggtaagcatcagccccacaaggtcacacagtacaagaaagggaaagactcgctgtatgcccagggaaaaaggcggtatgacaggaaacagtcagggtatggcgggcagacaaaacccattttccgtaaaaaagctaaaaccaccaaaaaaatagtgctcaggctagagtgcgtcgaaccgaactgcagatccaagcgcatgcttgcaataaagagatgcaaacacttcgagctcggtggagacaagaaacgcaaagggcaggtcatccagttctag

SEQ ID NO: 207190 - DNA, 429 bp, Artificial Sequence
  derived and/or modified sequence
atgatcgcaccaaccgactcccacgaggaggtcaggagtgggacttcatacatcctcccctttgcaagtagattcctgagctttagagccgactcggcccatgcaagcatggtgaacgttccaaagaccaggcggacattttgtaagaaatgcggtaaacatcaaccgcataaagtgacacagtacaaaaagggaaaggactctctatacgcacaagggaagcgcaggtacgatagaaagcagtccgggtacggagggcaaaccaagcctatatttcgcaaaaaggccaagacaacgaagaagatagtattgcgtctagaatgcgtggaacctaactgccgttcaaagcgtatgctggccattaagaggtgcaaacactttgagctcggcggagacaaaaagcgcaaaggacaagtcatacaattctag

SEQ ID NO: 207191 - DNA, 910 bp, Artificial Sequence
  derived and/or modified sequence
gtcggggtgagtggaccaccctttaggcggagtccttccttaagctcccgcccgcggctccgaactgagtcctctcagccgcccgagggcgctgcgctgagccttacactctatgattgctcctaccgactcccatgaggaagtgcgatcgggaacctcctatatacttccgtttgcctcgcggtttctttctttccgcgccgatagcgctcacgcaagcatggttaacgtccctaaaacccgccggactttctgtaagaagtgtggcaagcaccaaccccataaagtgacacagtacaagaagggcaaggattctctgtacgcccagggaaagcggcgttatgacaggaagcagagtggctatggtgggcaaactaagccgattttccggaaaaaggctaaaactacaaagaagattgtgctaaggcttgagtgcgttgagcccaactgcagatctaagagaatgctggctattaaaagatgcaagcattttgaactgggaggagataagaagagaaagggccaagtgatccagttctaagtgtcatcttttattatgaagacaataaaatcttgagtttatgttcacttcatttgtttgctgttcatcttttgggagggaataagctagagccatcaatacaattccgcttgtggggaaatttatgcctcttactggtactacttgttttgcattgaagctgactggttgagttcacatcatatgttgcaattttctaatttggcacttcaatcactaggggccttatgaggcagtttgtcattatgcaatggttattggttatcatgtgagtagacacatttcaggctaatagggagaagtcagtaacacattcatagtgaatatgagatgtctttgctaagagttaagtgtcagatctttgttata

SEQ ID NO: 207192 - DNA, 451 bp, Artificial Sequence
  derived and/or modified sequence
gaggaagtgcgatcgggaacctcctatatacttccgtttgcctcgcggtttctttctttccgcgccgatagcgctcacgcaagcatggttaacgtccctaaaacccgccggactttctgtaagaagtgtggcaagcaccaaccccataaagtgacacagtacaagaagggcaaggattctctgtacgcccagggaaagcggcgttatgacaggaagcagagtggctatggtgggcaaactaagccgattttccggaaaaaggctaaaactacaaagaagattgtgctaaggcttgagtgcgttgagcccaactgcagatctaagagaatgctggctattaaaagatgcaagcattttgaactgggaggagataagaagagaaagggccaagtgatccagttctaagtgtcatcttttattatgaagacaataaaatcttgagtttatgttc

SEQ ID NO: 207193 - DNA, 746 bp, Artificial Sequence
  derived and/or modified sequence
attggtttgcagtactgtcgctcaggtgcagttcccacttccgcctgtttcttccctttcctgttaggcgagagctgcgaaaggcgagagctgcgaagggccaggtgtcgggcgctgtttctcgttttcatcatatagacaaaacagccctgctgcaaagatggtcaacgtacctaaaacccgaagaaccttctgtaagaagtgtggcaagcatcagcctcacaaagtgacacagtataagaagggcaaggattctttgtatgcccagggaaggaggcgctatgatcggaagcagagtggctatggtgggcagacaaagccaattttccggaagaaggctaagaccacaaagaagattgtgctaaggctggaatgtgttgagcctaactgcagatccaagaggatgctggccattaagagatgcaagcattttgaactgggaggagataagaagagaaagggccaagtgatccagttctaaactttgggatatttttcttcaattttgaagagaaaatggtgaagccatagaaaagttacccgagggaaaataaatacagtgatattcttacgcaaactttttgtggtttttacttataaatagaattccatgtttagtgtagtcccacctcaaactttactaacaagtttatatatgtatgaagggaaaatactactttactactttttgttttctggtcaatttcaaatgttgaatgaattcataaacattgagcagcttagaa

SEQ ID NO: 207194 - DNA, 429 bp, Artificial Sequence
  derived and/or modified sequence
atgatcgcccccaccgacagccacgaggaggtgagaagcggcaccagctacatcctgcccttcgccagcagattcctgagcttcagagccgacagcgcccacgccagcatggtgaacgtgcccaagaccagaagaaccttctgcaagaagtgcggcaagcaccagccccacaaggtgacccagtacaagaagggcaaggacagcctgtacgcccagggcaagagaagatacgacagaaagcagagcggctacggcggccagaccaagcccatcttcagaaagaaggccaagaccaccaagaagatcgtgctgagactggagtgcgtggagcccaactgcagaagcaagagaatgctggccatcaagagatgcaagcacttcgagctgggcggcgacaagaagagaaagggccaggtgatccagttctag

SEQ ID NO: 207195 - protein, 181 aa, Artificial Sequence
  derived and/or modified sequence
MEKTEPQLKGIVTRLFSQQGYFLQMHPDGTIDGTKDENSDYTLFNLIPVGLRVVAIQGVKASLYVAMNGEGYLYSSDVFTPECKFKESVFENYYVIYSSTLYRQQESGRAWFLGLNKEGQIMKGNRVKKTKPSSHFVPKPIEVCMYREPSLHEIGEKQGRSRKSSGTPTMNGGKVVNQDST

SEQ ID NO: 207196 - protein, 243 aa, Artificial Sequence
  derived and/or modified sequence
MAAAIASSLIRQKRQARESNSDRVSASKRRSSPSKDGRSLCERHVLGVFSKVRFCSGRKRPVRRRPEPQLKGIVTRLFSQQGYFLQMHPDGTIDGTKDENSDYTLFNLIPVGLRVVAIQGVKASLYVAMNGEGYLYSSDVFTPECKFKESVFENYYVIYSSTLYRQQESGRAWFLGLNKEGQIMKGNRVKKTKPSSHFVPKPIEVCMYREPSLHEIGEKQGRSRKSSGTPTMNGGKVVNQDST

SEQ ID NO: 207197 - DNA, 732 bp, Artificial Sequence
  derived and/or modified sequence
atggccgccgccatcgccagcagcctgatcagacagaagagacaggccagagagagcaacagcgacagagtgagcgccagcaagagaagaagcagccccagcaaggacggcagaagcctgtgcgagagacacgtgctgggcgtgttcagcaaggtgagattctgcagcggcagaaagagacccgtgagaagaagacccgagccccagctgaagggcatcgtgaccagactgttcagccagcagggctacttcctgcagatgcaccccgacggcaccatcgacggcaccaaggacgagaacagcgactacaccctgttcaacctgatccccgtgggcctgagagtggtggccatccagggcgtgaaggccagcctgtacgtggccatgaacggcgagggctacctgtacagcagcgacgtgttcacccccgagtgcaagttcaaggagagcgtgttcgagaactactacgtgatctacagcagcaccctgtacagacagcaggagagcggcagagcctggttcctgggcctgaacaaggagggccagatcatgaagggcaacagagtgaagaagaccaagcccagcagccacttcgtgcccaagcccatcgaggtgtgcatgtacagagagcccagcctgcacgagatcggcgagaagcagggcagaagcagaaagagcagcggcacccccaccatgaacggcggcaaggtggtgaaccaggacagcacctag

SEQ ID NO: 207198 - DNA, 732 bp, Artificial Sequence
  derived and/or modified sequence
atggctgctgccatcgcttccagcctgattcgtcagaaaagacaggccagagaatctaatagcgaccgcgtctctgcctcaaagcgtcgcagctcccccagcaaagatggtcgatccttgtgcgaaaggcatgtgctcggcgtgttttctaaagtcagattctgttccggcagaaagaggccagttcgacgccgacccgagccccagctgaagggcatcgttacaaggctcttttctcaacaaggatactttctccagatgcaccccgatggcacgatcgacggtaccaaggacgaaaatagtgattatactttgtttaatctgattccagtgggtctccgggtcgtggcgattcagggggttaaggcttccttatacgttgccatgaatggagaggggtacctatattcgtcagacgtgttcacccccgagtgcaaatttaaggaatcagtcttcgagaactactacgtgatatactcttcaaccctgtatcgacaacaggagtctgggcgagcttggttcttgggcctcaataaggagggacagattatgaagggtaaccgggtgaaaaaaaccaaaccttctagccacttcgtccccaaacccatcgaggtatgtatgtatagagaacctagccttcacgagatcggtgagaagcagggcagatcccggaagtcgtccgggactccaacaatgaatggagggaaggtcgtcaaccaagactcgacgtag

SEQ ID NO: 207199 - DNA, 732 bp, Artificial Sequence
  derived and/or modified sequence
atggctgctgccatcgccagcagcctcatccggcagaagaggcaggcccgggagagcaacagcgacagagtgtctgccagcaagagaagaagcagccccagcaaggatggccgcagcctgtgtgagcggcacgtgctgggcgtcttcagcaaggtgcgcttctgcagcggcaggaagaggcctgtgagaagaagacctgagccccagctgaagggcatcgtgaccaggctcttcagccagcagggctacttcctgcagatgcacccagatggcaccattgatggcaccaaggatgaaaattctgactacaccctcttcaacctgatccctgtgggcctgcgggtggtggccatccagggcgtgaaggccagcctgtatgtggccatgaatggagagggctacctgtacagcagtgatgtgttcaccccagagtgcaagttcaaggagagcgtgtttgagaactactacgtgatctacagcagcaccctgtaccggcagcaggagagcggccgggcctggttcctgggcctgaacaaggagggccagatcatgaagggcaacagagtgaagaagaccaagcccagcagccactttgtgcccaagcccatcgaggtgtgcatgtaccgggagcccagcctgcacgagatcggggagaagcagggccgcagcaggaagagcagcggcacccccaccatgaatggaggcaaggtggtgaaccaggacagcacctag

SEQ ID NO: 207200 - DNA, 732 bp, Artificial Sequence
  derived and/or modified sequence
atggccgccgccatcgccagcagcctgatccggcagaagcggcaggctagagagtctaacagtgacagagtgagtgcaagtaaacggaggtctagtccaagtaaggacggccggtctttatgtgagagacatgtcctcggagtgtttagtaaagtgcggttctgctcagggcgtaagcggcctgttaggaggagacctgaaccccagctcaagggcatcgtcacacgcctcttttctcagcagggatactttctacagatgcatccagatgggacaatcgatgggaccaaggacgagaacagcgactataccctttttaatctgatccctgtcggactgcgtgtggttgccattcagggtgtgaaggccagcctttacgtagccatgaacggcgaaggatacctgtactcctcagatgtgtttacaccagagtgcaagttcaaggagtctgtattcgaaaactactacgtgatttactcaagcactctgtatcgtcagcaggaatccggaagggcttggtttctgggactcaataaagaggggcagataatgaagggcaacagggtgaaaaaaaccaaaccttcctcacactttgtgcccaaacccatcgaggtatgtatgtaccgggagccctcattgcatgagatcggcgagaagcagggccgcagtcgaaagagctcgggaaccccaactatgaatgggggcaaggtcgttaaccaagatagcacgtag

SEQ ID NO: 207201 - DNA, 732 bp, Artificial Sequence
  derived and/or modified sequence
atggcagcagcgattgcctcctcgcttataaggcagaaaaggcaggcacgcgaatcaaactctgacagggtttccgctagcaagagacggagctctccatccaaggacggcagaagtctgtgcgaaaggcacgtgttgggtgtgtttagcaaagtgagattctgttctggtcgcaagagacccgtcagaagaaggcctgagcctcagctgaaaggcatcgtgactcgtctgttctctcagcagggttacttccttcagatgcatcccgatggcacaatcgacgggacaaaagatgagaactcggactacaccctgtttaatctcattccagtgggcttgagagttgtcgctatccagggagttaaagcctctctgtacgtggccatgaacggcgagggctatctgtactctagcgatgtgtttacaccggagtgtaaattcaaagaaagcgtcttcgagaattattatgtaatatactcttccactttgtaccgacagcaagaaagcgggcgtgcctggttcttagggctgaataaggagggtcagattatgaaaggcaacagagtcaagaaaactaagcccagctctcactttgtgccgaaacccattgaggtctgtatgtatcgggaacctagcctacatgagattggcgagaaacagggacgctcacgcaagagtagcgggacacccacaatgaacggcggtaaggtcgtgaaccaggattccacctag

SEQ ID NO: 207202 - DNA, 3058 bp, Artificial Sequence
  derived and/or modified sequence
agtgctgctggccgggagttgctctcaccgcagctggaaacagctgcccccgccccgcgcccctacccagactccgggtaaccgctcccacttcgcgcctctcggaattccagaactcgggtggccggcccctggaaagccgcagccggcgcgatgcattctgtagacctcaccctgctgggacggacctcctaatcttcagaaccgcgggccgcagggagttaaattgctgccttcctctccttctctcgtgcggttggtggcttgttttctaaaggaacgttttattcactttttagtattttctaccgggggcgcgctacccgcctgggtccagactctgctttgtaaacgggttttctatgtatgtatgtgtaggtatactttggacaccttacaacgcttgcgcctctccaacagaggcacgtcttgttattttgggcatcgttcttccccttccacttggtaccccgaacgcagtgtgactaaactccccactgccccttggacgccgatcgccttggggtgcaagtttggggtgcaaacgtctacttcgcaagagggcctgggaccgccccgccccgccccccggccgccagaggttggggaagtttacatctggattttcacacattttgtcgccactgcccagactttgactaaccttgtgagcgccgggttttcgatactgcagcctcctcaaattttagcactgcctccccgcgactgccctttccctggccgcccaggtcctgccctcgccccggcggagcgcaagccggagggcgcagtagaggctggggcctgaggccctcgctgagcagctatggctgcggcgatagccagctccttgatccggcagaagcggcaggcgagggagtccaacagcgaccgagtgtcggcctccaagcgccgctccagccccagcaaagacgggcgctccctgtgcgagaggcacgtcctcggggtgttcagcaaagtgcgcttctgcagcggccgcaagaggccggtgaggcggagaccagaaccccagctcaaagggattgtgacaaggttattcagccagcagggatacttcctgcagatgcacccagatggtaccattgatgggaccaaggacgaaaacagcgactacactctcttcaatctaattcccgtgggcctgcgtgtagtggccatccaaggagtgaaggctagcctctatgtggccatgaatggtgaaggctatctctacagttcagatgttttcactccagaatgcaaattcaaggaatctgtgtttgaaaactactatgtgatctattcttccacactgtaccgccagcaagaatcaggccgagcttggtttctgggactcaataaagaaggtcaaattatgaaggggaacagagtgaagaaaaccaagccctcatcacattttgtaccgaaacctattgaagtgtgtatgtacagagaaccatcgctacatgaaattggagaaaaacaagggcgttcaaggaaaagttctggaacaccaaccatgaatggaggcaaagttgtgaatcaagattcaacatagctgagaactctccccttcttccctctctcatcccttccccttcccttccttcccatttacccatttccttccagtaaatccacccaaggagaggaaaataaaatgacaacgcaagacctagtggctaagattctgcactcaaaatcttcctttgtgtaggacaagaaaattgaaccaaagcttgcttgttgcaatgtggtagaaaattcacgtgcacaaagattagcacacttaaaagcaaaggaaaaaataaatcagaactccataaatattaaattaaactgtattgttattagtagaaggctaattgtaatgaagacattaataaagatgaaataaacttattactttaaaggaaaggatttggagaattgaactcacaaactgatgttatatactcaatagcttaaactcatgataatgctgcgatgtgtggttttgcttgattttgtattttatttgggcatctggaattgacacaccattacattctgtttgcaggattttttttgtaaccatgaaattgaacatttccaaattataaactatgttaatacctataaaatatatagccaggaaccatttatcatcaagaaaagtgtaagaaattatttttgagatgtaatttaagattgttttatgtaaaaggaaaatcttgtatggcatcgaatagccttaatgagtttaattctttcacaaaaatgatttcaaattatcctagagtataacatttttatcaaagatattatttccggagttcttctttctttcttttttttttttttttagtaatttagcaaaaacattactgttctaatgctgaagtgacttttgccagtgccatgtccaggtggtgaggtataagttacttgctcttagcatttggtctgatttttttgctttgtggacacctttgagagtatccacaaagcaatgtctcaggtgtggacacctgagagcatgttttagaaagctttgtaccctgtcttgtggcaggaaagaaagaacaggggttttacataaggaaataagtcctaggaaattagtcaacgcaaattgcatttgcgtttgtaccttaccacagtcttatattgttttttaaactctgccatgaaatttggagacatgactgtgaaattcctaacttactatcttacaaagccagtagctaatttgttgctctatgtatgatcctgttacaagtccagtttgcaattcatttgtttcctagaacacagaagggtaccagtaatacactaaattttcaaggtgtgtagagaaataatatggaattagcagctatgactccaacagacaggattgtgtgagcagctgaaaggagcaaaaaagaactcagtgtaagagaaggcacatacatagttaagaatactaaagtatttttaaaaatcaaggaagaaataaatgttacacaatttgcattggaataaatagatctatttagtcctacaaatcaggagtggtgtagagacatccaaattt

SEQ ID NO: 207203 - DNA, 6174 bp, Artificial Sequence
  derived and/or modified sequence
agtgctgctggccgggagttgctctcaccgcagctggaaacagctgcccccgccccgcgcccctacccagactccgggtaaccgctcccacttcgcgcctctcggaattccagaactcgggtggccggcccctggaaagccgcagccggcgcgatgcattctgtagacctcaccctgctgggacggacctcctaatcttcagaaccgcgggccgcagggagttaaattgctgccttcctctccttctctcgtgcggttggtggcttgttttctaaaggaacgttttattcactttttagtattttctaccgggggcgcgctacccgcctgggtccagactctgctttgtaaacgggttttctatgtatgtatgtgtaggtatactttggacaccttacaacgcttgcgcctctccaacagaggcacgtcttgttattttgggcatcgttcttccccttccacttggtaccccgaacgcagtgtgactaaactccccactgccccttggacgccgatcgccttggggtgcaagtttggggtgcaaacgtctacttcgcaagagggcctgggaccgccccgccccgccccccggccgccagaggttggggaagtttacatctggattttcacacattttgtcgccactgcccagactttgactaaccttgtgagcgccgggttttcgatactgcagcctcctcaaattttagcactgcctccccgcgactgccctttccctggccgcccaggtcctgccctcgccccggcggagcgcaagccggagggcgcagtagaggctggggcctgaggccctcgctgagcagctatggctgcggcgatagccagctccttgatccggcagaagcggcaggcgagggagtccaacagcgaccgagtgtcggcctccaagcgccgctccagccccagcaaagacgggcgctccctgtgcgagaggcacgtcctcggggtgttcagcaaagtgcgcttctgcagcggccgcaagaggccggtgaggcggagaccagaaccccagctcaaagggattgtgacaaggttattcagccagcagggatacttcctgcagatgcacccagatggtaccattgatgggaccaaggacgaaaacagcgactacactctcttcaatctaattcccgtgggcctgcgtgtagtggccatccaaggagtgaaggctagcctctatgtggccatgaatggtgaaggctatctctacagttcagatgttttcactccagaatgcaaattcaaggaatctgtgtttgaaaactactatgtgatctattcttccacactgtaccgccagcaagaatcaggccgagcttggtttctgggactcaataaagaaggtcaaattatgaaggggaacagagtgaagaaaaccaagccctcatcacattttgtaccgaaacctattgaagtgtgtatgtacagagaaccatcgctacatgaaattggagaaaaacaagggcgttcaaggaaaagttctggaacaccaaccatgaatggaggcaaagttgtgaatcaagattcaacatagctgagaactctccccttcttccctctctcatcccttccccttcccttccttcccatttacccatttccttccagtaaatccacccaaggagaggaaaataaaatgacaacgcaagacctagtggctaagattctgcactcaaaatcttcctttgtgtaggacaagaaaattgaaccaaagcttgcttgttgcaatgtggtagaaaattcacgtgcacaaagattagcacacttaaaagcaaaggaaaaaataaatcagaactccataaatattaaattaaactgtattgttattagtagaaggctaattgtaatgaagacattaataaagatgaaataaacttattactttaaaggaaaggatttggagaattgaactcacaaactgatgttatatactcaatagcttaaactcatgataatgctgcgatgtgtggttttgcttgattttgtattttatttgggcatctggaattgacacaccattacattctgtttgcaggattttttttgtaaccatgaaattgaacatttccaaattataaactatgttaatacctataaaatatatagccaggaaccatttatcatcaagaaaagtgtaagaaattatttttgagatgtaatttaagattgttttatgtaaaaggaaaatcttgtatggcatcgaatagccttaatgagtttaattctttcacaaaaatgatttcaaattatcctagagtataacatttttatcaaagatattatttccggagttcttctttctttcttttttttttttttttagtaatttagcaaaaacattactgttctaatgctgaagtgacttttgccagtgccatgtccaggtggtgaggtataagttacttgctcttagcatttggtctgatttttttgctttgtggacacctttgagagtatccacaaagcaatgtctcaggtgtggacacctgagagcatgttttagaaagctttgtaccctgtcttgtggcaggaaagaaagaacaggggttttacataaggaaataagtcctaggaaattagtcaacgcaaattgcatttgcgtttgtaccttaccacagtcttatattgttttttaaactctgccatgaaatttggagacatgactgtgaaattcctaacttactatcttacaaagccagtagctaatttgttgctctatgtatgatcctgttacaagtccagtttgcaattcatttgtttcctagaacacagaagggtaccagtaatacactaaattttcaaggtgtgtagagaaataatatggaattagcagctatgactccaacagacaggattgtgtgagcagctgaaaggagcaaaaaagaactcagtgtaagagaaggcacatacatagttaagaatactaaagtatttttaaaaatcaaggaagaaataaatgttacacaatttgcattggaataaatagatctatttagtcctacaaatcaggagtggtgtagagacatccaaatttaaagaaaaaaaaacacaaaacagaatgttaaaaaatgtatgcagatttatggatattatcaatgagaagacatagcatgtaacttctcctatatctctactgtccagcatgtattgttccaaatatgactccctaaaatatatacactttgcagaagctctaggccctcacctcaaaccttgccattggttgccgtatttcaaggtcaatatagtttccctcactttacacaatcattattcttcaatagtggaccatatccttcaccaggtatcctatttctgttatctagaggttagcagaaaatgaaatgaaggaatttccctaagcagttgggaagaacaaattgtatgcatgtaggcaaagattttgaagatacatttgcaagagatatttgtttaaccaaaatatttggaaagtaacaaataaagacatttaaattttctaaaaatggacttgctcttctaggaaaagaatacccctggggcaaaaatataactctagctgtatttcttcttgtcactcttgattcaacttgattataaatacacctgtcactaccagaaccaaaaaaaaaaagaaaaaaatcccaagcacaaagcttattttatttgaaaaaaataaaaaagaaacttcaacactatgggacactggctcttttagcatgaaatgacttgagcttttgtagtgatgatacacatacacactcatcagtaaaacgatggtttcataaataacacaattgatgcaaatcataaaaatcaattacaattatgatttcatgacaaaatatatttaattaagtttgttatgaaaaaaatagagatatgaatcactaacaaaattcctccattttcagtggctattcatcatttatcatctagactcacatttgtctccttcctgatagcagttaagaaaaaattctaaccacacaatttgtatattgtttttctccgtattatgttaagcaaatgttcactgcagtaaaatgttttggaaattagctttgtcttatttccagtttagttcagagaattaattggaaacctgatttcttttacacataaacctgacaaaaaatgtagcttagagcaaagggtgaatgtttgcttaactcctgcttacttctcaagtacatgaaaactttaatagaatatgccagtattcactgagtttttaaaaatattaccatgtgtaaacatataatatccaacttcatccaaaaatatggttgagtttaagtactttgtttttcaggcttatttcaagtataataattctttgattttcattgttctgatttctgggtcttcaattcattcgtcacttttcctttttaagtaaaataagcttttttttttttttttttttttttttggagttgcattgggatttttcccaggaaaaaatatggcttttagtaatgctttgcaattggctacgcagatataaattaagatatgtttattctgagttcttattggaataagtttcaaaatcaacgagcttaagaatgaaaacaaaacttttgagagtctcacaaaatagctttctggtcaatacaccttacttgatttttaagctcgcagaataaagtatagaaacaaatggagctgaagttccatttgctaattcagagacttttgtgcttccgcaaattggagggcagcaagccatcctattctcatagtaatcgttttggctttgaaatttacatacaatttaatagcacatttttagccattatggattggcgcaataaagagatatcaatgtaatgcaatgtgatgctttatgggcctcattctaattcagaaagcttgtttaaaagaactaagactcttctgtttaataaaatagcaacaatctaatatctagattggtagtcctgcggtgccactagtgggagatgagagtattaagacaagagtaaggacaaggaaagacttaaaggttgcatattgaaaagtttggaattcctaatttgggagcactgatttcttggtgaagaagtaagtatgactacgttgccagtaattttttaaaaacatagacccagaaatagcaaatcgatttcaccctcataccttagtctacaaggccttgctcttgagaaggttttccatgatattgcttaatttcatctgcacaagatgagacacaaacataaaaattccctgctcattttaataccataaaaggctgaggttatttctctgtcataaaattgtaaatagcattttttaagtcaaaattacatttaaaacagtggattgttctacaaatatatatgtgtatatatacatatgcttctgaaataaggatatattatatgagtttttatttgatttgtggtctttagtcataggtaatcaaaaataaagagatttgaatgcaaaactttatacattaatgtacatttctaatgatggtacaaattgccactttataataaaaaagaaacaggtgggaataataatcaaagcacgtgttccttcagtactttggtgatttttaatcccccttgtgatgcacaggaaattattttttagttacaaaaagttatcttagaaatctatacttcccaatacagatttcatgttaagtcatatcaaattgagaatttgtggtgaaagaataggaaaaggatgctagatgctgatctttctttttcaggatttttcctggagcccaagttaaaaattcaatacttaaatctaagttaagtgaaaattaataatgttcagaatgatgtattgagctttagtaacagacggaagcaaaaaaaaataagaatatttaacattatgataatagccttaaaataatgtaataaaaattgcatcattaaatgttctattagttggaaagaatgagctgatgtttctttgtctttgctccaagtacaatttaaagacagtgacattcattttacttaaaattgttcaaaaagtccaaaacatactcccatggctagaattggtattagctccaatacaaggttaaatgttacaatcttaagaaattattgacactgaaatgtttagtaaacatgttgtatgagaaactaaacaaattaatgtttcatttttccattaaagcacagattattc

SEQ ID NO: 207204 - protein, 183 aa, Artificial Sequence
  derived and/or modified sequence
MREYKVVVLGSGGVGKSALTVQFVTGTFIEKYDPTIEDFYRKEIEVDSSPSVLEILDTAGTEQFASMRDLYIKNGQGFILVYSLVNQQSFQDIKPMRDQIIRVKRYEKVPVILVGNKVDLESEREVSSSEGRALAEEWGCPFMETSAKSKTMVDELFAEIVRQMNYAAQPDKDDPCCSACNIQ

SEQ ID NO: 207205 - DNA, 552 bp, Artificial Sequence
  derived and/or modified sequence
atgagagagtataaagttgttgtgcttggcagcgggggcgtggggaagtcagcactgaccgttcaattcgtgactggaacctttattgagaagtatgatcccacaattgaagatttttataggaaggaaattgaggtggatagctctcccagtgtgctggaaatcctcgacacggctggcacagaacagttcgcttccatgagggacctgtacattaaaaacggacagggtttcatcctcgtttacagcctcgtcaatcagcagtccttccaagacattaagcccatgagggaccagatcatcagggtaaagagatacgagaaggtgcccgtaattcttgtgggtaacaaggtcgacctggaaagcgaacgcgaggtatcttcctccgagggaagagccctagctgaagagtggggctgtccatttatggagacatctgccaagtccaagactatggtcgatgaactgtttgctgagatcgtccggcagatgaattacgcagcccagcctgacaaggatgacccttgttgcagcgcgtgcaacattcagtag

SEQ ID NO: 207206 - DNA, 552 bp, Artificial Sequence
  derived and/or modified sequence
atgagggagtacaaggtggtggtgctgggcagcggaggagtgggcaagagcgccctgactgtgcagtttgtgacaggcaccttcatcgagaagtatgaccccaccatcgaggacttctacaggaaggagattgaggtggacagcagccccagcgtgctggagatcctggacacagctggaacagagcagtttgcctccatgagggacctgtacatcaagaatggccagggcttcatcctggtgtacagcctggtgaaccagcagagcttccaggacatcaagcccatgagggaccagatcatccgggtgaagagatatgagaaggtgcctgtgatcctggtgggcaacaaggtggacctggagagcgagcgggaggtgagcagcagcgagggccgggccctggccgaggagtggggctgccccttcatggagaccagcgccaagagcaagaccatggtggatgagctgtttgctgagatcgtgcggcagatgaactatgctgcccagcctgacaaggatgacccctgctgcagcgcctgcaacatccagtag

SEQ ID NO: 207207 - DNA, 552 bp, Artificial Sequence
  derived and/or modified sequence
atgcgggagtacaaggtggtggtgctgggcagcggcggcgtgggcaaaagcgccttgacagtccagttcgttacgggaacatttattgaaaaatacgatcctacgattgaggacttttatagaaaggaaattgaagtggactcgtctccctcagtgctagaaatactggacacagccggcacagagcagttcgcttcgatgcgggacctgtacatcaaaaacgggcagggctttattttagtttactcactagtgaatcaacagtctttccaggacattaagccaatgcgggaccagatcatccgcgtaaagcggtacgagaaggtgcccgtgattcttgtcgggaacaaagtggatctcgagtccgagcgagaagtgagctcttctgaaggcagggctttagccgaggaatgggggtgccctttcatggaaacctcagccaagtcgaagaccatggtggacgagctctttgctgaaattgtgagacagatgaactatgctgctcagccagacaaggacgacccttgttgctctgcttgtaatattcagtag

SEQ ID NO: 207208 - DNA, 552 bp, Artificial Sequence
  derived and/or modified sequence
atgagggagtataaggtcgtggtcctgggatccggcggtgtgggcaagtccgcgctgactgtgcagttcgtcacaggaacttttatagagaagtacgaccccaccatcgaggacttttaccgtaaggagattgaagtggactcctctccctccgtgttagaaatactggataccgccggaacagagcagttcgccagtatgagggacttgtacatcaaaaacggccaggggtttattctcgtttatagccttgtcaaccaacagagctttcaggatattaaacctatgcgagaccagataattagggtcaaacgatacgagaaagtcccggtgattctggtggggaacaaggttgacttagaatctgaacgcgaagtatcctctagcgaaggcagggctctcgccgaggagtggggctgcccatttatggagacgagtgcaaagagtaaaactatggtagatgagctcttcgccgagatagtgcgccagatgaactatgctgcacagccagataaggatgatccatgttgctctgcttgcaacatccagtag

SEQ ID NO: 207209 - DNA, 4349 bp, Artificial Sequence
  derived and/or modified sequence
tcgccctcagtcccacccggtgcctacggggccgcatcgccgcccggctcggcccggcccatgcccagggccgctgctccctcagttgccgccgccgccgccggcgcccagggggccgccgcggctgtgaggtgggggcggcagcgggaggcggcggggcgggccgccggggccggggctgggggcgcagcgcggccggcgtaggtctatgtcgcgggcggcggcggcggcggcggccgcggagggacgatgcgcgagtacaaagtggtggtgctgggctcgggcggggtaggcaaatccgccctgaccgtgcagttcgtgaccggcaccttcatcgagaaatacgaccccaccatcgaggacttctaccgcaaggagatcgaggtggattcgtcgccgtcggtgctggagatcctggacacggcgggcaccgagcagttcgcgtccatgcgggacctgtacatcaagaacggccagggcttcatcctcgtctacagcctcgtcaaccagcagagcttccaggacatcaagcccatgcgggaccagatcatccgcgtgaagcggtatgagaaagtgccagtcatcttggttgggaacaaagtggacctggaaagtgagagagaagtatcgtccagcgaaggcagagcccttgctgaagagtggggctgcccctttatggaaacttccgctaagagtaaaacaatggtggacgaactctttgcagaaattgtgaggcagatgaactatgctgctcagcctgacaaagatgacccatgctgttctgcatgtaacatacaatagcatccaaatatggctgtcctggatgggatttgcccaatgtcgtaggtgatagaaaactcgcctactccactgcagaacttgcagaatgcgtggtgttaatctacagagaactgcagcccttattcagaattgagcagtgattgtcagttgatatctctgagtaacatttgggttcagtaactacagttttcaccatttgtcctcagtctcctttatgcatctgcaactttaaggcatagtccatcgatctacagggtgatctcatttgaaagctatgatggcattgtcgctgagttgacagaagcaactattgtacaaattaaaaataaccataagggagaaaccagaagaattcctctgaccacttacaattaaaatattttgtcttctttaaaaaaataagtaaaggagaaatattttcctacaagagtactgaatttcaggaaatgggatagagcttctaaccaatgtattccgtcaagtaagataataacagctgacctgccaacagcattacagggagattctttgctcagctaacacatttctgtttttcaaaattgatgcttaattgtagctgttattctaatttgtgacatggaactaactcatgcttcaatccttgatagagcaaaactcagaacaggttatgtaaaaatatagtctggctttagaatttgttaattcacctgctttgccacagaaaatggaggctttcacaagggtttgatcagaattaaaaccccaaacccgccctctgttaggggtggtctttataactttactgaacaagagggaagcaactgtgatgggaagagattacctagccttactaacaagaagcattctaatagataaactagtaccatcatgtaaggaagatgaagccatgttgcatccacatgttcccgtttgcagaaacctcacaggacagtacgaatatctggcatttttaagttcattaaagcagcaaattccttctcgcctttaagggctatggttgtagtgtgacccgtggctaacctgctttcaaaatcaagtatttgctgtagcagagctttattgcaggcattttaaaaattgaataaccatgtgaaataatttgggcttaaaagtgaacataaattatagagtggaaggtaagggacaaaagccttttacctttaattttcctggagaattatataaaggttttcttagaacaattttgccctgattactgaagcgtcaaataaagctggagtgaaaattttgttttgaaaaggtgctcaagctctgacatttttggttttcatagtcgtgaagtatttatcatttgcatgactaatggcacaggaaaaacctattcataagttttacaatcaagtatagaggggtcttcagctaacttagttatacataaatgctgaaaagattatcttgagctgggccttgggagaagaatttggccttcagaactgcaatatcactgagcctgcgatctatacaccaccccacattttgttggtttcacagtcttgtgcaagtaacctctggtcttacgtgtgtaactgagagaagagtgtgtgtttgtgtgtgcatgtgtgtttattgttcctaagaatttggcacaagtcagagataattgcctatactaagaatctatactgcagaatatagtgtatcaaaaacttttttcttttaaattattaaagtgtcttttatacttttatgaaatcattggtagccccccaagtgtttaataactggcattaagcttagagggtgaaaaaaaaaaaaaagattgatagtatttttcataatgaaaaaactgaagagatacgtgaatgaaaccaggccatagctgtcataaatctttgacttttgaatatttacattcttcagtataattttttataatcctcaattatgaaccaccttgtttataggacaaaaaaatttaaccaattttattgaaacgaatttcactgtgtaaaagttggtttgattcaaacatgtagagaagttgtagattcaagatatatgatttctctatggaaataaaaatatttgttagtgaattggttgagttttgattcctctaacttctcagaatgattctttagaattctataattcatagcaatttttgacaagtaagattgcaaaatagaaatatctataaagattccacagtttgacattatggcttgctatgcagatgtgaaaataggttaaataatatgaaagatatggcagaatgtaaagtggaaaagatgacctaaaattttgagttgtattaatagttaaaaacatttgtgtcagatgacagggtgggcttttactgtcaagacatgaataagaactgatctggctgcctgatgagtgtttccacgcagccctgcatatttagtgaccaaggcatcaaggacatcccgaaactggaaattcatatccatctggtatgaatatataactcagctggcaaatgaatgtgtttgttgagatattacagtaataaaacacttaagaacaggaagattacatttgttggcatacgaaaccttagtggctacagaagaaagttgaccttgtgtcactatttattttatgccctgatcagactagcaacttagataagtgaaagtttttctaacatgccttaaaaatattatggtttgatccaaagacccactttttctttagctcttgtgataagattttcttttttttacttttatacaaaggcagcatctttgaatttttttttcttttgatgttgcaacttttgggttcttttaaactgtgatagtgatggtaactgatgcctttcattttgttcaacttatacaaaacaagccagcatctgatcaaaagtattacataaaatattttcttaaactattgaaaggtgctttgatgattttctcctttggtttgtagaattaggactgaacttttgactcaaattgctacagttgccatcacctttctgtggtaatactactgatatttgcttttctatataaagaaatgttgcctaaggctgtctggtatttcttttcaagggttttccagtatgaatgttaatgttgtcagtgtatgtatgaatatgaaagtgctttgttttgtttgttgctgttttttgtttatgtgtgtgtttttaatttttttgttcttatcagcagtcttgtgttagcactgggtaagctttaattgtcccttagccaatcaaacattaaggactatggaggtctttttttttttatttaacatgtcattgttcatctattaaatcttgatcagggtttcaagaatgactgcagtgggttttggaaacagacttatcattattgatttgaggtttcccagagatatagttcacagttaattgttgcgctctaatacaactgaccatttaaaattgaacaagtttattgttttgtaacaatgtcagttgttaaaccttgacatttcaattaaaacatgaattgtagttataactcaatgcaaattcaacagttgtatttggagttaaattattttaacaaataaatttatttaatgaa

SEQ ID NO: 207210 - DNA, 552 bp, Artificial Sequence
  derived and/or modified sequence
atgagagagtacaaggtggtggtgctgggcagcggcggcgtgggcaagagcgccctgaccgtgcagttcgtgaccggcaccttcatcgagaagtacgaccccaccatcgaggacttctacagaaaggagatcgaggtggacagcagccccagcgtgctggagatcctggacaccgccggcaccgagcagttcgccagcatgagagacctgtacatcaagaacggccagggcttcatcctggtgtacagcctggtgaaccagcagagcttccaggacatcaagcccatgagagaccagatcatcagagtgaagagatacgagaaggtgcccgtgatcctggtgggcaacaaggtggacctggagagcgagagagaggtgagcagcagcgagggcagagccctggccgaggagtggggctgccccttcatggagaccagcgccaagagcaagaccatggtggacgagctgttcgccgagatcgtgagacagatgaactacgccgcccagcccgacaaggacgacccctgctgcagcgcctgcaacatccagtag

SEQ ID NO: 207211 - protein, 148 aa, Artificial Sequence
  derived and/or modified sequence
PPNYEMLKEEHEVAVLGAPHNPAPPTSTVIHIRSETSVPDHVVVPVQHPLHECCLGFIAFAYSVKSRDRKMVGDVTGAQALHRQVPEHLGPDSGHPHDHSAHRHPSADLPGLWIDQEASLRPGALPMTCIPRTPTSIPRPAPGAESCI

SEQ ID NO: 207212 - protein, 133 aa, Artificial Sequence
  derived and/or modified sequence
MNHTVQTFFSPVNSGQPPNYEMLKEEHEVAVLGAPHNPAPPTSTVIHIRSETSVPDHVVWSLFNTLFMNPCCLGFIAFAYSVKSRDRKMVGDVTGAQAYASTAKCLNIWALILGILMTILLIVIPVLIFQAYG

SEQ ID NO: 207213 - DNA, 447 bp, Artificial Sequence
  derived and/or modified sequence
ccccctaattatgagatgttaaaggaagagcatgaagttgcagtgttgggcgctccacacaatccagccccccctacatccactgtaatccacatccggtctgagacaagtgttcctgaccatgtcgttgtgccggtccagcatccacttcatgaatgctgccttggctttattgcgttcgcctactcggtgaaaagccgagaccgcaaaatggtaggggacgtgactggggctcaggccctccaccgccaggtgcccgagcacctcggtccagatagcggtcatcctcacgatcactccgcccaccggcatccttccgccgacttgccgggcctgtggattgatcaggaagccagcctgagaccgggggccttgcccatgacctgtattcctcgcacacctacaagtataccaagacctgcaccaggtgctgagtcatgcatttag

SEQ ID NO: 207214 - DNA, 402 bp, Artificial Sequence
  derived and/or modified sequence
atgaatcatacggtgcagacttttttctcgcccgtgaactccggtcaacctcctaattacgagatgctcaaagaagagcacgaggtagccgtgttaggggcacctcataaccctgctcctccaacttccacggtgattcacattcggagcgaaacctctgtccctgaccacgtggtctggtctctctttaatactctttttatgaacccttgctgcctgggtttcattgcttttgcctattctgtcaagagcagggatcgcaagatggtgggggatgtcaccggagcccaagcctatgcctccaccgctaaatgcctaaatatatgggccctcattctcggtattctgatgacgatcctccttattgttatcccagtcctgattttccaggcctatggctag

SEQ ID NO: 207215 - DNA, 444 bp, Artificial Sequence
  derived and/or modified sequence
ccccccaactatgagatgctcaaggaggagcacgaggtggctgtgctgggggcgccccacaaccctgctcccccgacgtccaccgtgatccacatccgcagcgagacctccgtgcccgaccatgtcgtcgtccctgttcaacaccctcttcatgaatgctgcctgggcttcatagcattcgcctactccgtgaagtctagggacaggaagatggttggcgacgtgaccggggcccaggccctccaccgccaagtgcctgaacatctgggccctgattctgggcatcctcatgaccattctgctcatcgtcatcccagtgctgatcttccaggcctatggatagatcaggaggcatcactgaggccaggagctctgcccatgacctgtatcccacgtactccaacttccattcctcgccctgcccccggagccgagtcctgtatc

SEQ ID NO: 207216 - DNA, 808 bp, Artificial Sequence
  derived and/or modified sequence
tgctcccttgggctctagagaggaagcccctcttagccctcagcccctctttcctccctctcctaaagtaatttgatcctcaggaatttgttccgccctcatctggccccggccaaatcccgatttgacaaatgccaggaaaaggaaactgttgagaaaccgaaactactggggaaagggagggctcactgagaaccatcccagtaacccgaccgccgctggtcttcgctggacaccatgaatcacactgtccaaaccttcttctctcctgtcaacagtggccagccccccaactatgagatgctcaaggaggagcacgaggtggctgtgctgggggcgccccacaaccctgctcccccgacgtccaccgtgatccacatccgcagcgagacctccgtgcccgaccatgtcgtctggtccctgttcaacaccctcttcatgaacccctgctgcctgggcttcatagcattcgcctactccgtgaagtctagggacaggaagatggttggcgacgtgaccggggcccaggcctatgcctccaccgccaagtgcctgaacatctgggccctgattctgggcatcctcatgaccattctgctcatcgtcatcccagtgctgatcttccaggcctatggatagatcaggaggcatcactgaggccaggagctctgcccatgacctgtatcccacgtactccaacttccattcctcgccctgcccccggagccgagtcctgtatcagccctttatcctcacacgcttttctacaatggcattcaataaagtgcacgtgtttctggtgctgctg

SEQ ID NO: 207217 - DNA, 447 bp, Artificial Sequence
  derived and/or modified sequence
cctcccaactatgagatgctgaaggaggagcacgaggtggccgtgctgggcgccccccacaacccagccccacccaccagcaccgtcatccacatccgctctgagacctctgtgcctgaccacgtggtggtgcctgtgcagcaccccctgcacgagtgctgcctgggcttcatcgcctttgcctacagcgtgaagagccgggacaggaagatggtgggagatgtgactggagcccaggccctgcaccggcaggtgcctgagcacctgggcccagattctggccacccccatgaccacagcgcccaccgccaccccagcgctgacctgcccggcctgtggattgaccaggaggccagcctgcggcctggggccctgcccatgacctgcatccccaggacccccaccagcatccccaggcctgcccctggagctgagagctgcatctag

SEQ ID NO: 207218 - DNA, 402 bp, Artificial Sequence
  derived and/or modified sequence
atgaaccacacagtgcagaccttcttcagccctgtgaacagcggccagccccccaactatgagatgctgaaggaggagcacgaggtggccgtgctgggcgccccccacaacccagccccacccaccagcaccgtcatccacatccgctctgagacctctgtgcctgaccacgtggtgtggagcctcttcaacaccctcttcatgaacccctgctgcctgggcttcatcgcctttgcctacagcgtgaagagccgggacaggaagatggtgggagatgtgactggagcccaggcctatgccagcacagccaagtgcctgaacatctgggccctgatcctgggcatcctgatgaccatcctgctgattgtcatccctgtgctgatcttccaggcctacggctag

SEQ ID NO: 207219 - DNA, 447 bp, Artificial Sequence
  derived and/or modified sequence
ccccccaactacgagatgctgaaggaggagcacgaggtggccgtgctgggagcccctcacaatccggcaccaccaacttcaaccgtcatccacattagatctgaaactagcgtccctgaccacgtggtagtgccagtgcagcaccccctgcacgagtgctgcctggggtttattgcattcgcctatagcgtaaagtcacgtgacaggaaaatggtgggggacgtgaccggcgcccaagccctccatcgccaggtgccagagcatctaggcccggatagtggccacccacacgaccacagcgcgcatagacatccatcagccgatctgccgggattgtggatcgaccaggaggcgagcctgcggcctggcgcactgcccatgacatgtatccctcgcacgccaacttccattccccgccccgctcccggcgctgaaagctgtatctag

SEQ ID NO: 207220 - DNA, 402 bp, Artificial Sequence
  derived and/or modified sequence
atgaaccacaccgtgcagaccttcttcagccccgtgaacagcggccagccgccaaattatgagatgttaaaagaggagcatgaggtggctgtcctcggggcacctcacaacccagctcctcccacgtcaacggttattcacatccgctcagagacctcagtgcccgatcatgtggtgtggtccctgtttaatactctgttcatgaacccctgttgcttagggttcattgcctttgcttactcagttaagagtcgcgatcgaaagatggtgggggacgttaccggagcacaagcttacgcatccactgccaagtgtctgaacatttgggctcttatccttggaattctcatgaccattcttctgattgtcatcccagtcctgatctttcaggcctacggatag

SEQ ID NO: 207221 - DNA, 447 bp, Artificial Sequence
  derived and/or modified sequence
ccaccaaattacgagatgctgaaggaggaacatgaagttgccgttctgggcgctccccataacccagcaccaccgacctccactgtcattcatatacgtagcgagacatccgtgccagaccatgtggttgtcccggtgcaacaccctctccatgaatgttgtcttgggtttattgctttcgcctacagcgtgaaatccagggatcgtaagatggtaggtgacgtcactggcgctcaggcgttgcatcgacaggtacctgagcatttgggcccagactcgggtcacccgcatgatcacagtgctcataggcatcctagcgcagaccttcctgggctgtggatcgatcaggaggctagcctgcgtccgggagcactgcccatgacatgcatcccacggacaccgacctcaatcccacggcctgccccaggcgctgagagctgtatctag

SEQ ID NO: 207222 - DNA, 402 bp, Artificial Sequence
  derived and/or modified sequence
atgaaccacaccgtgcagaccttctttagcccagtgaactccggacaaccccctaactacgagatgttgaaagaagagcacgaggtggctgtgctcggtgcccctcacaatccagctccacctacctcaacagtcatccacatccgctctgagactagtgtccccgatcacgtggtgtggtccttgtttaacacgttgtttatgaatccatgttgcttgggattcatagcctttgcttattcagtaaaatcacgggatcgcaagatggtgggagatgtgaccggggcacaggcctatgcttctacagccaagtgtcttaacatttgggcattgatcctgggcatcttaatgaccattttgctcattgttatccccgtgctgatttttcaggcctacggatag

SEQ ID NO: 207223 - DNA, 447 bp, Artificial Sequence
  derived and/or modified sequence
ccccccaactacgagatgctgaaggaggagcacgaggtggccgtgctgggcgccccccacaaccccgccccccccaccagcaccgtgatccacatcagaagcgagaccagcgtgcccgaccacgtggtggtgcccgtgcagcaccccctgcacgagtgctgcctgggcttcatcgccttcgcctacagcgtgaagagcagagacagaaagatggtgggcgacgtgaccggcgcccaggccctgcacagacaggtgcccgagcacctgggccccgacagcggccacccccacgaccacagcgcccacagacaccccagcgccgacctgcccggcctgtggatcgaccaggaggccagcctgagacccggcgccctgcccatgacctgcatccccagaacccccaccagcatccccagacccgcccccggcgccgagagctgcatctag

SEQ ID NO: 207224 - DNA, 402 bp, Artificial Sequence
  derived and/or modified sequence
atgaaccacaccgtgcagaccttcttcagccccgtgaacagcggccagccccccaactacgagatgctgaaggaggagcacgaggtggccgtgctgggcgccccccacaaccccgccccccccaccagcaccgtgatccacatcagaagcgagaccagcgtgcccgaccacgtggtgtggagcctgttcaacaccctgttcatgaacccctgctgcctgggcttcatcgccttcgcctacagcgtgaagagcagagacagaaagatggtgggcgacgtgaccggcgcccaggcctacgccagcaccgccaagtgcctgaacatctgggccctgatcctgggcatcctgatgaccatcctgctgatcgtgatccccgtgctgatcttccaggcctacggctag

SEQ ID NO: 207225 - protein, 934 aa, Artificial Sequence
  derived and/or modified sequence
MEERRPHLDARPRNSHTNHRGPVDGELPPRARNQANNPPANALRGGASHPGRHPRANNHPAAYWQREERFRAMGRNPHQGRRNQEGHASDEARDQRHDQENDTRWRNGNQDCRNRRPPWSNDNFQQWRTPHQKPTEQPQQAKKLGYKFLESLLQKDPSEVVITLATSLGLKELLSHSSMKSNFLELICQVLRKACSSKMDRQSVLHVLGILKNSKFLKVCLPAYVVGMITEPIPDIRNQYPEHISNIISLLQDLVSVFPASSVQETSMLVSLLPTSLNALRASGVDIEEETEKNLEKVQTIIEHLQEKRREGTLRVDTYTLVQPEAEDHVESYRTMPIYPTYNEVHLDERPFLRPNIISGKYDSTAIYLDTHFRLLREDFVRPLREGILELLQSFEDQGLRKRKFDDIRIYFDTRIITPMCSSSGIVYKVQFDTKPLKFVRWQNSKRLLYGSLVCMSKDNFETFLFATVSNREQEDLCRGIVQLCFNEQSQQLLAEVQPSDSFLMVETTAYFEAYRHVLEGLQEVQEEDVPFQRNIVECNSHVKEPRYLLMGGRYDFTPLIENPSATGEFLRNVEGLRHPRINVLDPGQWPSKEALKLDDSQMEALQFALTRELAIIQGPPGTGKTYVGLKIVQALLTNESVWQISLQKFPILVVCYTNHALDQFLEGIYNCQKTSIVRVGGRSNSEILKQFTLRELRNKREFRRNLPMHLRRAYMSIMTQMKESEQELHEGAKTLECTMRGVLREQYLQKYISPQHWESLMNGPVQDSEWICFQHWKHSMMLEWLGLGVGSFTQSVSPAGPENTAQAEGDEEEEGEEESSLIEIAEEADLIQADRVIEEEEVVRPQRRKKEESGADQELAKMLLAMRLDHCGTGTAAGQEQATGEWQTQRNQKKKMKKRVKDELRKLNTMTAAEANEIEDVWQLDLSSRWQLY

SEQ ID NO: 207226 - protein, 1918 aa, Artificial Sequence
  derived and/or modified sequence
MEERRPHLDARPRNSHTNHRGPVDGELPPRARNQANNPPANALRGGASHPGRHPRANNHPAAYWQREERFRAMGRNPHQGRRNQEGHASDEARDQRHDQENDTRWRNGNQDCRNRRPPWSNDNFQQWRTPHQKPTEQPQQAKKLGYKFLESLLQKDPSEVVITLATSLGLKELLSHSSMKSNFLELICQVLRKACSSKMDRQSVLHVLGILKNSKFLKVCLPAYVVGMITEPIPDIRNQYPEHISNIISLLQDLVSVFPASSVQETSMLVSLLPTSLNALRASGVDIEEETEKNLEKVQTIIEHLQEKRREGTLRVDTYTLVQPEAEDHVESYRTMPIYPTYNEVHLDERPFLRPNIISGKYDSTAIYLDTHFRLLREDFVRPLREGILELLQSFEDQGLRKRKFDDIRIYFDTRIITPMCSSSGIVYKVQFDTKPLKFVRWQNSKRLLYGSLVCMSKDNFETFLFATVSNREQEDLCRGIVQLCFNEQSQQLLAEVQPSDSFLMVETTAYFEAYRHVLEGLQEVQEEDVPFQRNIVECNSHVKEPRYLLMGGRYDFTPLIENPSATGEFLRNVEGLRHPRINVLDPGQWPSKEALKLDDSQMEALQFALTRELAIIQGPPGTGKTYVGLKIVQALLTNESVWQISLQKFPILVVCYTNHALDQFLEGIYNCQKTSIVRVGGRSNSEILKQFTLRELRNKREFRRNLPMHLRRAYMSIMTQMKESEQELHEGAKTLECTMRGVLREQYLQKYISPQHWESLMNGPVQDSEWICFQHWKHSMMLEWLGLGVGSFTQSVSPAGPENTAQAEGDEEEEGEEESSLIEIAEEADLIQADRVIEEEEVVRPQRRKKEESGADQELAKMLLAMRLDHCGTGTAAGQEQATGEWQTQRNQKKKMKKRVKDELRKLNTMTAAEANEIEDVWQLDLSSRWQLYRLWLQLYQADTRRKILSYERQYRTSAERMAELRLQEDLHILKDAQVVGMTTTGAAKYRQILQKVEPRIVIVEEAAEVLEAHTIATLSKACQHLILIGDHQQLRPSANVYDLAKNFNLEVSLFERLVKVNIPFVRLNYQHRMCPEIARLLTPHIYQDLENHPSVLKYEKIKGVSSNLFFVEHNFPEQEIQEGKSHQNQHEAHFVVELCKYFLCQEYLPSQITILTTYTGQLFCLRKLMPAKTFAGVRVHVVDKYQGEENDIILLSLVRSNQEGKVGFLQISNRICVALSRAKKGMYCIGNMQMLAKVPLWSKIIHTLRENNQIGPMLRLCCQNHPETHTLVSKASDFQKVPEGGCSLPCEFRLGCGHVCTRACHPYDSSHKEFQCMKPCQKVICQEGHRCPLVCFQECQPCQVKVPKTIPRCGHEQMVPCSVPESDFCCQEPCSKSLRCGHRCSHPCGEDCVQLCSEMVTIKLKCGHSQPVKCGHVEGLLYGGLLVKCTTKCGTILDCGHPCPGSCHSCFEGRFHERCQQPCKRLLICSHKCQEPCIGECPPCQRTCQNRCVHSQCKKKCGELCSPCVEPCVWRCQHYQCTKLCSEPCNRPPCYVPCTKLLVCGHPCIGLCGEPCPKKCRICHMDEVTQIFFGFEDEPDARFVQLEDCSHIFEVQALDRYMNEQKDDEVAIRLKVCPICQVPIRKNLRYGTSIKQRLEEIEIIKEKIQGSAGEIATSQERLKALLERKSLLHQLLPEDFLMLKEKLAQKNLSVKDLGLVENYISFYDHLASLWDSLKKMHVLEEKRVRTRLEQVHEWLAKKRLSFTSQELSDLRSEIQRLTYLVNLLTRYKIAEKKVKDSIAVEVYSVQNILEKTCKFTQEDEQLVQEKMEALKATLPCSGLGISEEERVQIVSAIGYPRGHWFKCRNGHIYVIGDCGGAMERGTCPDCKEVIGGTNHTLERSNQLASEMDGAQHAAWSDTANNLMNFEEIQGMM

SEQ ID NO: 207227 - protein, 1270 aa, Artificial Sequence
  derived and/or modified sequence
MEERRPHLDARPRNSHTNHRGPVDGELPPRARNQANNPPANALRGGASHPGRHPRANNHPAAYWQREERFRAMGRNPHQGRRNQEGHASDEARDQRHDQENDTRWRNGNQDCRNRRPPWSNDNFQQWRTPHQKPTEQPQQAKKLGYKFLESLLQKDPSEVVITLATSLGLKELLSHSSMKSNFLELICQVLRKACSSKMDRQSVLHVLGILKNSKFLKVCLPAYVVGMITEPIPDIRNQYPEHISNIISLLQDLVSVFPASSVQETSMLVSLLPTSLNALRASGVDIEEETEKNLEKVQTIIEHLQEKRREGTLRVDTYTLVQPEAEDHVESYRTMPIYPTYNEVHLDERPFLRPNIISGKYDSTAIYLDTHFRLLREDFVRPLREGILELLQSFEDQGLRKRKFDDIRIYFDTRIITPMCSSSGIVYKVQFDTKPLKFVRWQNSKRLLYGSLVCMSKDNFETFLFATVSNREQEDLCRGIVQLCFNEQSQQLLAEVQPSDSFLMVETTAYFEAYRHVLEGLQEVQEEDVPFQRNIVECNSHVKEPRYLLMGGRYDFTPLIENPSATGEFLRNVEGLRHPRINVLDPGQWPSKEALKLDDSQMEALQFALTRELAIIQGPPGTGKTYVGLKIVQALLTNESVWQISLQKFPILVVCYTNHALDQFLEGIYNCQKTSIVRVGGRSNSEILKQFTLRELRNKREFRRNLPMHLRRAYMSIMTQMKESEQELHEGAKTLECTMRGVLREQYLQKYISPQHWESLMNGPVQDSEWICFQHWKHSMMLEWLGLGVGSFTQSVSPAGPENTAQAEGDEEEEGEEESSLIEIAEEADLIQADRVIEEEEVVRPQRRKKEESGADQELAKMLLAMRLDHCGTGTAAGQEQATGEWQTQRNQKKKMKKRVKDELRKLNTMTAAEANEIEDVWQLDLSSRWQLYRLWLQLYQADTRRKILSYERQYRTSAERMAELRLQEDLHILKDAQVVGMTTTGAAKYRQILQKVEPRIVIVEEAAEVLEAHTIATLSKACQHLILIGDHQQLRPSANVYDLAKNFNLEVSLFERLVKVNIPFVRLNYQHRMCPEIARLLTPHIYQDLENHPSVLKYEKIKAKSNSCRALATGMRRKHKISGMILSFFKLTIRSARFQLLLSGSWTTASFPFSRSRFAVLICRDNKRMPAVKPVSTNTGSHGLQMPGALMGETFQKGSTSRDAAACLLSSLVNKIPPRSLTWASDCCISFSSASSCRTAYTSFSIFSILSRNLRMTSQWEKIKRIYK

SEQ ID NO: 207228 - protein, 915 aa, Artificial Sequence
  derived and/or modified sequence
MEERRPHLDARPRNSHTNHRGPVDGELPPRARNQANNPPANALRGGASHPGRHPRANNHPAAYWQREERFRAMGRNPHQGRRNQEGHASDEARDQRHDQENDTRWRNGNQDCRNRRPPWSNDNFQQWRTPHQKPTEQPQQAKKLGYKFLESLLQKDPSEVVITLATSLGLKELLSHSSMKSNFLELICQVLRKACSSKMDRQSVLHVLGILKNSKFLKVCLPAYVVGMITEPIPDIRNQYPEHISNIISLLQDLVSVFPASSVQETSMLVSLLPTSLNALRASGVDIEEETEKNLEKVQTIIEHLQEKRREGTLRVDTYTLVQPEAEDHVESYRTMPIYPTYNEVHLDERPFLRPNIISGKYDSTAIYLDTHFRLLREDFVRPLREGILELLQSFEDQGLRKRKFDDIRIYFDTRIITPMCSSSGIVYKVQFDTKPLKFVRWQNSKRLLYGSLVCMSKDNFETFLFATVSNREQEDLCRGIVQLCFNEQSQQLLAEVQPSDSFLMVETTAYFEAYRHVLEGLQEVQEEDVPFQRNIVECNSHVKEPRYLLMGGRYDFTPLIENPSATGEFLRNVEGLRHPRINVLDPGQWPSKEALKLDDSQMEALQFALTRELAIIQGPPGTGKTYVGLKIVQALLTNESVWQISLQKFPILVVCYTNHALDQFLEGIYNCQKTSIVRVGGRSNSEILKQFTLRELRNKREFRRNLPMHLRRAYMSIMTQMKESEQELHEGAKTLECTMRGVLREQYLQKYISPQHWESLMNGPVQDSEWICFQHWKHSMMLEWLGLGVGSFTQSVSPAGPENTAQAEGDEEEEGEEESSLIEIAEEADLIQADRVIEEEEVVRPQRRKKEESGADQELAKMLLAMRLDHCGTGTAAGQEQATGEWQTQRNQKKKMKKREKEEKKEREKRRKKK

SEQ ID NO: 207229 - protein, 707 aa, Artificial Sequence
  derived and/or modified sequence
SKMDRQSVLHVLGILKNSKFLKVCLPAYVVGMITEPIPDIRNQYPEHISNIISLLQDLVSVFPASSVQETSMLVSLLPTSLNALRASGVDIEEETEKNLEKVQTIIEHLQEKRREGTLRVDTYTLVQPEAEDHVESYRTMPIYPTYNEVHLDERPFLRPNIISGKYDSTAIYLDTHFRLLREDFVRPLREGILELLQSFEDQGLRKRKFDDIRIYFDTRIITPMCSSSGIVYKVQFDTKPLKFVRWQNSKRLLYGSLVCMSKDNFETFLFATVSNREQEDLCRGIVQLCFNEQSQQLLAEVQPSDSFLMVETTAYFEAYRHVLEGLQEVQEEDVPFQRNIVECNSHVKEPRYLLMGGRYDFTPLIENPSATGEFLRNVEGLRHPRINVLDPGQWPSKEALKLDDSQMEALQFALTRELAIIQGPPGTGKTYVGLKIVQALLTNESVWQISLQKFPILVVCYTNHALDQFLEGIYNCQKTSIVRVGGRSNSEILKQFTLRELRNKREFRRNLPMHLRRAYMSIMTQMKESEQELHEGAKTLECTMRGVLREQYLQKYISPQHWESLMNGPVQDSEWICFQHWKHSMMLEWLGLGVGSFTQSVSPAGPENTAQAEGDEEEEGEEESSLIEIAEEADLIQADRVIEEEEVVRPQRRKKEESGADQELAKMLLAMRLDHCGTGTAAGQEQATGEWQTVPCLVLMSADPAQP

SEQ ID NO: 207230 - protein, 61 aa, Artificial Sequence
  derived and/or modified sequence
MEERRPHLDARPRNSHTNHRGPVDGELPPRAEIMPLHSSLGDRSKTLSQKKKSFFLVLAPT

SEQ ID NO: 207231 - DNA, 2805 bp, Artificial Sequence
  derived and/or modified sequence
atggaggagagaagaccccacctggacgccagacccagaaacagccacaccaaccacagaggccccgtggacggcgagctgccccccagagccagaaaccaggccaacaacccccccgccaacgccctgagaggcggcgccagccaccccggcagacaccccagagccaacaaccaccccgccgcctactggcagagagaggagagattcagagccatgggcagaaacccccaccagggcagaagaaaccaggagggccacgccagcgacgaggccagagaccagagacacgaccaggagaacgacaccagatggagaaacggcaaccaggactgcagaaacagaagacccccctggagcaacgacaacttccagcagtggagaaccccccaccagaagcccaccgagcagccccagcaggccaagaagctgggctacaagttcctggagagcctgctgcagaaggaccccagcgaggtggtgatcaccctggccaccagcctgggcctgaaggagctgctgagccacagcagcatgaagagcaacttcctggagctgatctgccaggtgctgagaaaggcctgcagcagcaagatggacagacagagcgtgctgcacgtgctgggcatcctgaagaacagcaagttcctgaaggtgtgcctgcccgcctacgtggtgggcatgatcaccgagcccatccccgacatcagaaaccagtaccccgagcacatcagcaacatcatcagcctgctgcaggacctggtgagcgtgttccccgccagcagcgtgcaggagaccagcatgctggtgagcctgctgcccaccagcctgaacgccctgagagccagcggcgtggacatcgaggaggagaccgagaagaacctggagaaggtgcagaccatcatcgagcacctgcaggagaagagaagagagggcaccctgagagtggacacctacaccctggtgcagcccgaggccgaggaccacgtggagagctacagaaccatgcccatctaccccacctacaacgaggtgcacctggacgagagacccttcctgagacccaacatcatcagcggcaagtacgacagcaccgccatctacctggacacccacttcagactgctgagagaggacttcgtgagacccctgagagagggcatcctggagctgctgcagagcttcgaggaccagggcctgagaaagagaaagttcgacgacatcagaatctacttcgacaccagaatcatcacccccatgtgcagcagcagcggcatcgtgtacaaggtgcagttcgacaccaagcccctgaagttcgtgagatggcagaacagcaagagactgctgtacggcagcctggtgtgcatgagcaaggacaacttcgagaccttcctgttcgccaccgtgagcaacagagagcaggaggacctgtgcagaggcatcgtgcagctgtgcttcaacgagcagagccagcagctgctggccgaggtgcagcccagcgacagcttcctgatggtggagaccaccgcctacttcgaggcctacagacacgtgctggagggcctgcaggaggtgcaggaggaggacgtgcccttccagagaaacatcgtggagtgcaacagccacgtgaaggagcccagatacctgctgatgggcggcagatacgacttcacccccctgatcgagaaccccagcgccaccggcgagttcctgagaaacgtggagggcctgagacaccccagaatcaacgtgctggaccccggccagtggcccagcaaggaggccctgaagctggacgacagccagatggaggccctgcagttcgccctgaccagagagctggccatcatccagggcccccccggcaccggcaagacctacgtgggcctgaagatcgtgcaggccctgctgaccaacgagagcgtgtggcagatcagcctgcagaagttccccatcctggtggtgtgctacaccaaccacgccctggaccagttcctggagggcatctacaactgccagaagaccagcatcgtgagagtgggcggcagaagcaacagcgagatcctgaagcagttcaccctgagagagctgagaaacaagagagagttcagaagaaacctgcccatgcacctgagaagagcctacatgagcatcatgacccagatgaaggagagcgagcaggagctgcacgagggcgccaagaccctggagtgcaccatgagaggcgtgctgagagagcagtacctgcagaagtacatcagcccccagcactgggagagcctgatgaacggccccgtgcaggacagcgagtggatctgcttccagcactggaagcacagcatgatgctggagtggctgggcctgggcgtgggcagcttcacccagagcgtgagccccgccggccccgagaacaccgcccaggccgagggcgacgaggaggaggagggcgaggaggagagcagcctgatcgagatcgccgaggaggccgacctgatccaggccgacagagtgatcgaggaggaggaggtggtgagaccccagagaagaaagaaggaggagagcggcgccgaccaggagctggccaagatgctgctggccatgagactggaccactgcggcaccggcaccgccgccggccaggagcaggccaccggcgagtggcagacccagagaaaccagaagaagaagatgaagaagagagtgaaggacgagctgagaaagctgaacaccatgaccgccgccgaggccaacgagatcgaggacgtgtggcagctggacctgagcagcagatggcagctgtactag

SEQ ID NO: 207232 - DNA, 5757 bp, Artificial Sequence
  derived and/or modified sequence
atggaggagagaagaccccacctggacgccagacccagaaacagccacaccaaccacagaggccccgtggacggcgagctgccccccagagccagaaaccaggccaacaacccccccgccaacgccctgagaggcggcgccagccaccccggcagacaccccagagccaacaaccaccccgccgcctactggcagagagaggagagattcagagccatgggcagaaacccccaccagggcagaagaaaccaggagggccacgccagcgacgaggccagagaccagagacacgaccaggagaacgacaccagatggagaaacggcaaccaggactgcagaaacagaagacccccctggagcaacgacaacttccagcagtggagaaccccccaccagaagcccaccgagcagccccagcaggccaagaagctgggctacaagttcctggagagcctgctgcagaaggaccccagcgaggtggtgatcaccctggccaccagcctgggcctgaaggagctgctgagccacagcagcatgaagagcaacttcctggagctgatctgccaggtgctgagaaaggcctgcagcagcaagatggacagacagagcgtgctgcacgtgctgggcatcctgaagaacagcaagttcctgaaggtgtgcctgcccgcctacgtggtgggcatgatcaccgagcccatccccgacatcagaaaccagtaccccgagcacatcagcaacatcatcagcctgctgcaggacctggtgagcgtgttccccgccagcagcgtgcaggagaccagcatgctggtgagcctgctgcccaccagcctgaacgccctgagagccagcggcgtggacatcgaggaggagaccgagaagaacctggagaaggtgcagaccatcatcgagcacctgcaggagaagagaagagagggcaccctgagagtggacacctacaccctggtgcagcccgaggccgaggaccacgtggagagctacagaaccatgcccatctaccccacctacaacgaggtgcacctggacgagagacccttcctgagacccaacatcatcagcggcaagtacgacagcaccgccatctacctggacacccacttcagactgctgagagaggacttcgtgagacccctgagagagggcatcctggagctgctgcagagcttcgaggaccagggcctgagaaagagaaagttcgacgacatcagaatctacttcgacaccagaatcatcacccccatgtgcagcagcagcggcatcgtgtacaaggtgcagttcgacaccaagcccctgaagttcgtgagatggcagaacagcaagagactgctgtacggcagcctggtgtgcatgagcaaggacaacttcgagaccttcctgttcgccaccgtgagcaacagagagcaggaggacctgtgcagaggcatcgtgcagctgtgcttcaacgagcagagccagcagctgctggccgaggtgcagcccagcgacagcttcctgatggtggagaccaccgcctacttcgaggcctacagacacgtgctggagggcctgcaggaggtgcaggaggaggacgtgcccttccagagaaacatcgtggagtgcaacagccacgtgaaggagcccagatacctgctgatgggcggcagatacgacttcacccccctgatcgagaaccccagcgccaccggcgagttcctgagaaacgtggagggcctgagacaccccagaatcaacgtgctggaccccggccagtggcccagcaaggaggccctgaagctggacgacagccagatggaggccctgcagttcgccctgaccagagagctggccatcatccagggcccccccggcaccggcaagacctacgtgggcctgaagatcgtgcaggccctgctgaccaacgagagcgtgtggcagatcagcctgcagaagttccccatcctggtggtgtgctacaccaaccacgccctggaccagttcctggagggcatctacaactgccagaagaccagcatcgtgagagtgggcggcagaagcaacagcgagatcctgaagcagttcaccctgagagagctgagaaacaagagagagttcagaagaaacctgcccatgcacctgagaagagcctacatgagcatcatgacccagatgaaggagagcgagcaggagctgcacgagggcgccaagaccctggagtgcaccatgagaggcgtgctgagagagcagtacctgcagaagtacatcagcccccagcactgggagagcctgatgaacggccccgtgcaggacagcgagtggatctgcttccagcactggaagcacagcatgatgctggagtggctgggcctgggcgtgggcagcttcacccagagcgtgagccccgccggccccgagaacaccgcccaggccgagggcgacgaggaggaggagggcgaggaggagagcagcctgatcgagatcgccgaggaggccgacctgatccaggccgacagagtgatcgaggaggaggaggtggtgagaccccagagaagaaagaaggaggagagcggcgccgaccaggagctggccaagatgctgctggccatgagactggaccactgcggcaccggcaccgccgccggccaggagcaggccaccggcgagtggcagacccagagaaaccagaagaagaagatgaagaagagagtgaaggacgagctgagaaagctgaacaccatgaccgccgccgaggccaacgagatcgaggacgtgtggcagctggacctgagcagcagatggcagctgtacagactgtggctgcagctgtaccaggccgacaccagaagaaagatcctgagctacgagagacagtacagaaccagcgccgagagaatggccgagctgagactgcaggaggacctgcacatcctgaaggacgcccaggtggtgggcatgaccaccaccggcgccgccaagtacagacagatcctgcagaaggtggagcccagaatcgtgatcgtggaggaggccgccgaggtgctggaggcccacaccatcgccaccctgagcaaggcctgccagcacctgatcctgatcggcgaccaccagcagctgagacccagcgccaacgtgtacgacctggccaagaacttcaacctggaggtgagcctgttcgagagactggtgaaggtgaacatccccttcgtgagactgaactaccagcacagaatgtgccccgagatcgccagactgctgaccccccacatctaccaggacctggagaaccaccccagcgtgctgaagtacgagaagatcaagggcgtgagcagcaacctgttcttcgtggagcacaacttccccgagcaggagatccaggagggcaagagccaccagaaccagcacgaggcccacttcgtggtggagctgtgcaagtacttcctgtgccaggagtacctgcccagccagatcaccatcctgaccacctacaccggccagctgttctgcctgagaaagctgatgcccgccaagaccttcgccggcgtgagagtgcacgtggtggacaagtaccagggcgaggagaacgacatcatcctgctgagcctggtgagaagcaaccaggagggcaaggtgggcttcctgcagatcagcaacagaatctgcgtggccctgagcagagccaagaagggcatgtactgcatcggcaacatgcagatgctggccaaggtgcccctgtggagcaagatcatccacaccctgagagagaacaaccagatcggccccatgctgagactgtgctgccagaaccaccccgagacccacaccctggtgagcaaggccagcgacttccagaaggtgcccgagggcggctgcagcctgccctgcgagttcagactgggctgcggccacgtgtgcaccagagcctgccacccctacgacagcagccacaaggagttccagtgcatgaagccctgccagaaggtgatctgccaggagggccacagatgccccctggtgtgcttccaggagtgccagccctgccaggtgaaggtgcccaagaccatccccagatgcggccacgagcagatggtgccctgcagcgtgcccgagagcgacttctgctgccaggagccctgcagcaagagcctgagatgcggccacagatgcagccacccctgcggcgaggactgcgtgcagctgtgcagcgagatggtgaccatcaagctgaagtgcggccacagccagcccgtgaagtgcggccacgtggagggcctgctgtacggcggcctgctggtgaagtgcaccaccaagtgcggcaccatcctggactgcggccacccctgccccggcagctgccacagctgcttcgagggcagattccacgagagatgccagcagccctgcaagagactgctgatctgcagccacaagtgccaggagccctgcatcggcgagtgccccccctgccagagaacctgccagaacagatgcgtgcacagccagtgcaagaagaagtgcggcgagctgtgcagcccctgcgtggagccctgcgtgtggagatgccagcactaccagtgcaccaagctgtgcagcgagccctgcaacagacccccctgctacgtgccctgcaccaagctgctggtgtgcggccacccctgcatcggcctgtgcggcgagccctgccccaagaagtgcagaatctgccacatggacgaggtgacccagatcttcttcggcttcgaggacgagcccgacgccagattcgtgcagctggaggactgcagccacatcttcgaggtgcaggccctggacagatacatgaacgagcagaaggacgacgaggtggccatcagactgaaggtgtgccccatctgccaggtgcccatcagaaagaacctgagatacggcaccagcatcaagcagagactggaggagatcgagatcatcaaggagaagatccagggcagcgccggcgagatcgccaccagccaggagagactgaaggccctgctggagagaaagagcctgctgcaccagctgctgcccgaggacttcctgatgctgaaggagaagctggcccagaagaacctgagcgtgaaggacctgggcctggtggagaactacatcagcttctacgaccacctggccagcctgtgggacagcctgaagaagatgcacgtgctggaggagaagagagtgagaaccagactggagcaggtgcacgagtggctggccaagaagagactgagcttcaccagccaggagctgagcgacctgagaagcgagatccagagactgacctacctggtgaacctgctgaccagatacaagatcgccgagaagaaggtgaaggacagcatcgccgtggaggtgtacagcgtgcagaacatcctggagaagacctgcaagttcacccaggaggacgagcagctggtgcaggagaagatggaggccctgaaggccaccctgccctgcagcggcctgggcatcagcgaggaggagagagtgcagatcgtgagcgccatcggctaccccagaggccactggttcaagtgcagaaacggccacatctacgtgatcggcgactgcggcggcgccatggagagaggcacctgccccgactgcaaggaggtgatcggcggcaccaaccacaccctggagagaagcaaccagctggccagcgagatggacggcgcccagcacgccgcctggagcgacaccgccaacaacctgatgaacttcgaggagatccagggcatgatgtag

SEQ ID NO: 207233 - DNA, 3813 bp, Artificial Sequence
  derived and/or modified sequence
atggaggagagaagaccccacctggacgccagacccagaaacagccacaccaaccacagaggccccgtggacggcgagctgccccccagagccagaaaccaggccaacaacccccccgccaacgccctgagaggcggcgccagccaccccggcagacaccccagagccaacaaccaccccgccgcctactggcagagagaggagagattcagagccatgggcagaaacccccaccagggcagaagaaaccaggagggccacgccagcgacgaggccagagaccagagacacgaccaggagaacgacaccagatggagaaacggcaaccaggactgcagaaacagaagacccccctggagcaacgacaacttccagcagtggagaaccccccaccagaagcccaccgagcagccccagcaggccaagaagctgggctacaagttcctggagagcctgctgcagaaggaccccagcgaggtggtgatcaccctggccaccagcctgggcctgaaggagctgctgagccacagcagcatgaagagcaacttcctggagctgatctgccaggtgctgagaaaggcctgcagcagcaagatggacagacagagcgtgctgcacgtgctgggcatcctgaagaacagcaagttcctgaaggtgtgcctgcccgcctacgtggtgggcatgatcaccgagcccatccccgacatcagaaaccagtaccccgagcacatcagcaacatcatcagcctgctgcaggacctggtgagcgtgttccccgccagcagcgtgcaggagaccagcatgctggtgagcctgctgcccaccagcctgaacgccctgagagccagcggcgtggacatcgaggaggagaccgagaagaacctggagaaggtgcagaccatcatcgagcacctgcaggagaagagaagagagggcaccctgagagtggacacctacaccctggtgcagcccgaggccgaggaccacgtggagagctacagaaccatgcccatctaccccacctacaacgaggtgcacctggacgagagacccttcctgagacccaacatcatcagcggcaagtacgacagcaccgccatctacctggacacccacttcagactgctgagagaggacttcgtgagacccctgagagagggcatcctggagctgctgcagagcttcgaggaccagggcctgagaaagagaaagttcgacgacatcagaatctacttcgacaccagaatcatcacccccatgtgcagcagcagcggcatcgtgtacaaggtgcagttcgacaccaagcccctgaagttcgtgagatggcagaacagcaagagactgctgtacggcagcctggtgtgcatgagcaaggacaacttcgagaccttcctgttcgccaccgtgagcaacagagagcaggaggacctgtgcagaggcatcgtgcagctgtgcttcaacgagcagagccagcagctgctggccgaggtgcagcccagcgacagcttcctgatggtggagaccaccgcctacttcgaggcctacagacacgtgctggagggcctgcaggaggtgcaggaggaggacgtgcccttccagagaaacatcgtggagtgcaacagccacgtgaaggagcccagatacctgctgatgggcggcagatacgacttcacccccctgatcgagaaccccagcgccaccggcgagttcctgagaaacgtggagggcctgagacaccccagaatcaacgtgctggaccccggccagtggcccagcaaggaggccctgaagctggacgacagccagatggaggccctgcagttcgccctgaccagagagctggccatcatccagggcccccccggcaccggcaagacctacgtgggcctgaagatcgtgcaggccctgctgaccaacgagagcgtgtggcagatcagcctgcagaagttccccatcctggtggtgtgctacaccaaccacgccctggaccagttcctggagggcatctacaactgccagaagaccagcatcgtgagagtgggcggcagaagcaacagcgagatcctgaagcagttcaccctgagagagctgagaaacaagagagagttcagaagaaacctgcccatgcacctgagaagagcctacatgagcatcatgacccagatgaaggagagcgagcaggagctgcacgagggcgccaagaccctggagtgcaccatgagaggcgtgctgagagagcagtacctgcagaagtacatcagcccccagcactgggagagcctgatgaacggccccgtgcaggacagcgagtggatctgcttccagcactggaagcacagcatgatgctggagtggctgggcctgggcgtgggcagcttcacccagagcgtgagccccgccggccccgagaacaccgcccaggccgagggcgacgaggaggaggagggcgaggaggagagcagcctgatcgagatcgccgaggaggccgacctgatccaggccgacagagtgatcgaggaggaggaggtggtgagaccccagagaagaaagaaggaggagagcggcgccgaccaggagctggccaagatgctgctggccatgagactggaccactgcggcaccggcaccgccgccggccaggagcaggccaccggcgagtggcagacccagagaaaccagaagaagaagatgaagaagagagtgaaggacgagctgagaaagctgaacaccatgaccgccgccgaggccaacgagatcgaggacgtgtggcagctggacctgagcagcagatggcagctgtacagactgtggctgcagctgtaccaggccgacaccagaagaaagatcctgagctacgagagacagtacagaaccagcgccgagagaatggccgagctgagactgcaggaggacctgcacatcctgaaggacgcccaggtggtgggcatgaccaccaccggcgccgccaagtacagacagatcctgcagaaggtggagcccagaatcgtgatcgtggaggaggccgccgaggtgctggaggcccacaccatcgccaccctgagcaaggcctgccagcacctgatcctgatcggcgaccaccagcagctgagacccagcgccaacgtgtacgacctggccaagaacttcaacctggaggtgagcctgttcgagagactggtgaaggtgaacatccccttcgtgagactgaactaccagcacagaatgtgccccgagatcgccagactgctgaccccccacatctaccaggacctggagaaccaccccagcgtgctgaagtacgagaagatcaaggccaagagcaacagctgcagagccctggccaccggcatgagaagaaagcacaagatcagcggcatgatcctgagcttcttcaagctgaccatcagaagcgccagattccagctgctgctgagcggcagctggaccaccgccagcttccccttcagcagaagcagattcgccgtgctgatctgcagagacaacaagagaatgcccgccgtgaagcccgtgagcaccaacaccggcagccacggcctgcagatgcccggcgccctgatgggcgagaccttccagaagggcagcaccagcagagacgccgccgcctgcctgctgagcagcctggtgaacaagatcccccccagaagcctgacctgggccagcgactgctgcatcagcttcagcagcgccagcagctgcagaaccgcctacaccagcttcagcatcttcagcatcctgagcagaaacctgagaatgaccagccagtgggagaagatcaagagaatctacaagtag

SEQ ID NO: 207234 - DNA, 2748 bp, Artificial Sequence
  derived and/or modified sequence
atggaggagagaagaccccacctggacgccagacccagaaacagccacaccaaccacagaggccccgtggacggcgagctgccccccagagccagaaaccaggccaacaacccccccgccaacgccctgagaggcggcgccagccaccccggcagacaccccagagccaacaaccaccccgccgcctactggcagagagaggagagattcagagccatgggcagaaacccccaccagggcagaagaaaccaggagggccacgccagcgacgaggccagagaccagagacacgaccaggagaacgacaccagatggagaaacggcaaccaggactgcagaaacagaagacccccctggagcaacgacaacttccagcagtggagaaccccccaccagaagcccaccgagcagccccagcaggccaagaagctgggctacaagttcctggagagcctgctgcagaaggaccccagcgaggtggtgatcaccctggccaccagcctgggcctgaaggagctgctgagccacagcagcatgaagagcaacttcctggagctgatctgccaggtgctgagaaaggcctgcagcagcaagatggacagacagagcgtgctgcacgtgctgggcatcctgaagaacagcaagttcctgaaggtgtgcctgcccgcctacgtggtgggcatgatcaccgagcccatccccgacatcagaaaccagtaccccgagcacatcagcaacatcatcagcctgctgcaggacctggtgagcgtgttccccgccagcagcgtgcaggagaccagcatgctggtgagcctgctgcccaccagcctgaacgccctgagagccagcggcgtggacatcgaggaggagaccgagaagaacctggagaaggtgcagaccatcatcgagcacctgcaggagaagagaagagagggcaccctgagagtggacacctacaccctggtgcagcccgaggccgaggaccacgtggagagctacagaaccatgcccatctaccccacctacaacgaggtgcacctggacgagagacccttcctgagacccaacatcatcagcggcaagtacgacagcaccgccatctacctggacacccacttcagactgctgagagaggacttcgtgagacccctgagagagggcatcctggagctgctgcagagcttcgaggaccagggcctgagaaagagaaagttcgacgacatcagaatctacttcgacaccagaatcatcacccccatgtgcagcagcagcggcatcgtgtacaaggtgcagttcgacaccaagcccctgaagttcgtgagatggcagaacagcaagagactgctgtacggcagcctggtgtgcatgagcaaggacaacttcgagaccttcctgttcgccaccgtgagcaacagagagcaggaggacctgtgcagaggcatcgtgcagctgtgcttcaacgagcagagccagcagctgctggccgaggtgcagcccagcgacagcttcctgatggtggagaccaccgcctacttcgaggcctacagacacgtgctggagggcctgcaggaggtgcaggaggaggacgtgcccttccagagaaacatcgtggagtgcaacagccacgtgaaggagcccagatacctgctgatgggcggcagatacgacttcacccccctgatcgagaaccccagcgccaccggcgagttcctgagaaacgtggagggcctgagacaccccagaatcaacgtgctggaccccggccagtggcccagcaaggaggccctgaagctggacgacagccagatggaggccctgcagttcgccctgaccagagagctggccatcatccagggcccccccggcaccggcaagacctacgtgggcctgaagatcgtgcaggccctgctgaccaacgagagcgtgtggcagatcagcctgcagaagttccccatcctggtggtgtgctacaccaaccacgccctggaccagttcctggagggcatctacaactgccagaagaccagcatcgtgagagtgggcggcagaagcaacagcgagatcctgaagcagttcaccctgagagagctgagaaacaagagagagttcagaagaaacctgcccatgcacctgagaagagcctacatgagcatcatgacccagatgaaggagagcgagcaggagctgcacgagggcgccaagaccctggagtgcaccatgagaggcgtgctgagagagcagtacctgcagaagtacatcagcccccagcactgggagagcctgatgaacggccccgtgcaggacagcgagtggatctgcttccagcactggaagcacagcatgatgctggagtggctgggcctgggcgtgggcagcttcacccagagcgtgagccccgccggccccgagaacaccgcccaggccgagggcgacgaggaggaggagggcgaggaggagagcagcctgatcgagatcgccgaggaggccgacctgatccaggccgacagagtgatcgaggaggaggaggtggtgagaccccagagaagaaagaaggaggagagcggcgccgaccaggagctggccaagatgctgctggccatgagactggaccactgcggcaccggcaccgccgccggccaggagcaggccaccggcgagtggcagacccagagaaaccagaagaagaagatgaagaagagagagaaggaggagaagaaggagagagagaagagaagaaagaagaagtag

SEQ ID NO: 207235 - DNA, 2124 bp, Artificial Sequence
  derived and/or modified sequence
agcaagatggacagacagagcgtgctgcacgtgctgggcatcctgaagaacagcaagttcctgaaggtgtgcctgcccgcctacgtggtgggcatgatcaccgagcccatccccgacatcagaaaccagtaccccgagcacatcagcaacatcatcagcctgctgcaggacctggtgagcgtgttccccgccagcagcgtgcaggagaccagcatgctggtgagcctgctgcccaccagcctgaacgccctgagagccagcggcgtggacatcgaggaggagaccgagaagaacctggagaaggtgcagaccatcatcgagcacctgcaggagaagagaagagagggcaccctgagagtggacacctacaccctggtgcagcccgaggccgaggaccacgtggagagctacagaaccatgcccatctaccccacctacaacgaggtgcacctggacgagagacccttcctgagacccaacatcatcagcggcaagtacgacagcaccgccatctacctggacacccacttcagactgctgagagaggacttcgtgagacccctgagagagggcatcctggagctgctgcagagcttcgaggaccagggcctgagaaagagaaagttcgacgacatcagaatctacttcgacaccagaatcatcacccccatgtgcagcagcagcggcatcgtgtacaaggtgcagttcgacaccaagcccctgaagttcgtgagatggcagaacagcaagagactgctgtacggcagcctggtgtgcatgagcaaggacaacttcgagaccttcctgttcgccaccgtgagcaacagagagcaggaggacctgtgcagaggcatcgtgcagctgtgcttcaacgagcagagccagcagctgctggccgaggtgcagcccagcgacagcttcctgatggtggagaccaccgcctacttcgaggcctacagacacgtgctggagggcctgcaggaggtgcaggaggaggacgtgcccttccagagaaacatcgtggagtgcaacagccacgtgaaggagcccagatacctgctgatgggcggcagatacgacttcacccccctgatcgagaaccccagcgccaccggcgagttcctgagaaacgtggagggcctgagacaccccagaatcaacgtgctggaccccggccagtggcccagcaaggaggccctgaagctggacgacagccagatggaggccctgcagttcgccctgaccagagagctggccatcatccagggcccccccggcaccggcaagacctacgtgggcctgaagatcgtgcaggccctgctgaccaacgagagcgtgtggcagatcagcctgcagaagttccccatcctggtggtgtgctacaccaaccacgccctggaccagttcctggagggcatctacaactgccagaagaccagcatcgtgagagtgggcggcagaagcaacagcgagatcctgaagcagttcaccctgagagagctgagaaacaagagagagttcagaagaaacctgcccatgcacctgagaagagcctacatgagcatcatgacccagatgaaggagagcgagcaggagctgcacgagggcgccaagaccctggagtgcaccatgagaggcgtgctgagagagcagtacctgcagaagtacatcagcccccagcactgggagagcctgatgaacggccccgtgcaggacagcgagtggatctgcttccagcactggaagcacagcatgatgctggagtggctgggcctgggcgtgggcagcttcacccagagcgtgagccccgccggccccgagaacaccgcccaggccgagggcgacgaggaggaggagggcgaggaggagagcagcctgatcgagatcgccgaggaggccgacctgatccaggccgacagagtgatcgaggaggaggaggtggtgagaccccagagaagaaagaaggaggagagcggcgccgaccaggagctggccaagatgctgctggccatgagactggaccactgcggcaccggcaccgccgccggccaggagcaggccaccggcgagtggcagaccgtgccctgcctggtgctgatgagcgccgaccccgcccagccctag

SEQ ID NO: 207236 - DNA, 2805 bp, Artificial Sequence
  derived and/or modified sequence
atggaagagcggagaccacacctcgacgccagaccccggaacagccacacaaatcatcgaggccctgtcgacggggagctgccgccccgcgcccgcaaccaggccaataacccccccgccaacgcgttgaggggaggagcatcgcaccctggaaggcacccgagggcaaataaccatcccgccgcatattggcagagggaggagaggttccgcgcaatgggtaggaacccgcatcagggacgcaggaaccaggagggacacgcttccgacgaagctagagaccagaggcacgatcaagagaacgacacgaggtggcggaatggaaatcaggattgcagaaacaggcgcccaccttggtctaatgacaattttcagcagtggaggacaccccaccagaaacctaccgagcagcctcagcaagctaaaaaactgggttataagtttttagaatctttgcttcagaaggatcctagtgaagtcgttattaccctggctacctcgttgggcctgaaggaactgctttctcattccagcatgaagtcaaactttctggagctcatttgccaggttcttcgtaaagcgtgcagctcaaagatggacagacagagtgtgctgcacgtgctgggtatcctcaagaactcgaaattcttgaaggtgtgtctgccagcatacgttgtgggcatgataacagagccgattccagatatccggaaccaataccccgaacatatctccaatattatttctttgctccaggatctggtgagtgtgtttcccgcatcgtcagtccaggaaacatccatgcttgtcagcctcctgcccacaagtctgaatgccctgagggcttccggagtggacatcgaagaagagaccgagaaaaatctggagaaagtccaaactatcattgagcacttacaagagaaacgccgagaaggcacgctcagggtagatacctatacactcgtgcagcccgaagcggaagatcacgttgagtcatacaggactatgcctatctatcccacttacaatgaagtacacctggacgagaggccctttctgagacccaacatcatctccggcaagtatgattcgactgcgatctacctcgacacgcacttccgcctgctccgcgaggactttgtccggccgctgagggaaggtatcctcgagctcctgcagagctttgaggaccaaggcttgagaaaacgcaagtttgacgatatcaggatttactttgatacacgaatcattacccccatgtgctctagcagtggaatagtgtataaggtgcagttcgacaccaaacccctgaagttcgtcagatggcagaacagtaagaggttactctatggatcactggtgtgcatgagtaaggacaatttcgagacctttctgtttgctacagtaagcaaccgtgagcaggaagatctatgcagaggaatcgtacaactgtgctttaacgaacagtcgcagcaactgctggcagaagtccagccttccgacagtttcctgatggtggagaccactgcttactttgaggcttacaggcatgtgctggaagggttacaggaggtgcaagaggaggacgtgccgttccagcggaacattgtggaatgcaactctcacgtcaaagagcctcgatacctgctgatgggaggacggtacgatttcacgccgctgattgagaacccctctgcaaccggcgaattcctgcgaaacgtggaggggctgcggcaccctcggataaacgtgctcgatccaggacaatggccatccaaagaggcgttgaaactggacgattcccagatggaggctttgcaattcgctctcactcgggagctggccatcatacaggggccaccgggcacaggaaaaacttatgtgggcctcaagatcgtgcaggccctgctgaccaacgaatcagtgtggcagatctctcttcagaagtttcccattctagtagtgtgctacactaatcacgcacttgaccagttcctggaagggatatataactgtcagaaaacaagcatcgtgcgagttggcgggcgtagcaacagcgaaatcctgaagcagtttactctgcgagaattacgcaacaagagggaattccggcgaaatttgcctatgcatttgcggcgagcttatatgtccattatgacccaaatgaaagaaagcgagcaagagttgcacgagggcgccaagacccttgagtgcactatgagaggtgtgttgagggagcagtatctccagaagtatatctctcctcaacattgggagtccctgatgaatgggcctgtgcaggactctgaatggatatgctttcagcattggaagcacagcatgatgctggaatggctcggattgggcgtcggatctttcacacaaagtgtgtcccctgcagggcccgaaaacactgcacaagccgaaggagacgaggaggaagagggtgaggaagagtcatctcttatcgagatcgctgaagaagcggacttgattcaggccgatagggttatcgaggaagaggaagtcgtgcgtccacaacgacgcaagaaggaagagagcggcgcagaccaggagcttgcaaaaatgctgctggcgatgaggctggaccactgcggcaccgggactgctgctggacaagagcaggctacaggcgagtggcagacgcagaggaaccaaaagaagaagatgaaaaaaagagtgaaggacgagctgcgcaaattgaatactatgaccgcagcggaagccaatgaaatagaggatgtgtggcaactggacctgtcttcacgttggcagttatactag

SEQ ID NO: 207237 - DNA, 5757 bp, Artificial Sequence
  derived and/or modified sequence
atggaagaaagaagaccccatcttgatgcccggcctagaaattctcataccaatcatcgcgggccggtggacggagagctcccacctagagctcgcaaccaagctaacaacccaccagcaaatgctctgcgcgggggggctagccatccaggccggcaccccagggccaataatcatcccgccgcctactggcaaagagaagagcgctttcgggcaatgggaaggaaccctcatcaaggaagacgaaaccaggaaggacacgcatctgacgaagcccgagaccagagacacgaccaagagaacgatacgcgctggcgtaatggcaatcaggactgtcggaaccgccgccccccctggtcaaacgacaatttccagcagtggagaaccccgcaccagaaacccactgagcaaccacagcaggccaaaaaactgggatataaattcctggagtcgctcctgcagaaagacccaagtgaagttgtgataactctggccacctcactcggattgaaagaactcttgtcccacagctcaatgaagtcaaattttctggagcttatctgccaagtgctccggaaagcttgttccagtaaaatggatagacaaagcgttctacatgtgctgggcatcctgaagaattccaaattcctgaaagtgtgtctgcccgcctatgtggtcggaatgatcaccgaacccatcccagatatccggaatcagtatcccgaacacataagtaacataatttctctgctacaggacctcgtctctgtgttccccgctagctctgtccaggaaacaagcatgctcgtgtcactgctccccacgtcgctgaacgcgctcagggcttccggcgtagacatagaggaagagaccgaaaagaacctagagaaagttcagacgatcattgagcacctgcaggagaagcgccgggagggcactctccgagtggacacatacacgttggtgcagcctgaggccgaggaccacgtagaatcctaccggacaatgcctatctaccctacctataacgaagtgcatcttgatgagcgtcctttcctgcgccctaatattatcagtggcaaatatgactcaacggcgatctacctcgatacgcattttcgcctgctgcgcgaagattttgttaggccactgagagaaggcatcctcgagctcctccagtcattcgaagaccaggggttgagaaaacgcaagtttgacgacatcagaatctactttgataccaggattatcactccaatgtgttccagttcgggcatcgtctacaaggtgcagtttgatactaaacctttgaagtttgtgagatggcaaaactccaaacgactgctgtacgggtctctcgtttgcatgtcaaaagacaacttcgagacctttctcttcgcaacggtttccaacagagagcaggaggacctctgcaggggaatagtacaactgtgttttaacgaacagtcccagcagctgctcgctgaggtgcagccatccgattcctttctcatggtggaaaccacagcttacttcgaggcctaccgccacgtattggagggcctacaggaggttcaggaggaggacgtcccttttcaaagaaatatcgtagagtgtaactcccacgtgaaggagcctcgctatctgctgatgggtggtagatacgacttcacccctctcatcgaaaatccctcagcaaccggtgaatttttaagaaatgtcgagggcctgcgtcaccctcggatcaacgtgctggaccccggacagtggccctctaaagaggcgcttaaattggacgattcccaaatggaggctctccagttcgccttaacaagagaacttgccataattcaaggcccacctggcacaggtaagacatatgtcgggcttaagatagtgcaggccctgctgaccaacgaatccgtctggcaaatctccttgcagaagttcccaatcctggtggtttgctacacaaatcatgcgctggaccagtttctggaagggatctacaactgccagaagaccagcatcgttagagtgggtggccgcagcaactcggaaatcctgaagcagttcaccctccgagaactcaggaataagcgagaatttaggcggaacttaccgatgcatctccgtcgggcctatatgtccatcatgactcaaatgaaagagtccgagcaggagctacacgaaggagccaaaaccctggagtgtacaatgagaggagtactgagggagcagtatttacaaaagtacatttcaccccaacattgggagagtctgatgaacggccctgtccaagactccgaatggatttgctttcagcattggaagcattccatgatgctggaatggctgggcttgggggtgggtagcttcacacaatcagtgagccccgccggaccagagaacaccgcacaggctgagggagacgaggaagaggagggcgaggaagagtcgagcctgattgaaatcgcggaagaagccgacctgatccaggccgaccgcgtgatcgaggaagaggaggtggttcgtccacagaggcgcaaaaaggaagagagtggcgccgaccaggagcttgctaagatgctcttggcaatgcggctggaccactgcgggaccggtacagctgccggacaagagcaggctacaggagaatggcagacacaacgcaaccagaagaaaaaaatgaagaagagagttaaggatgagttacgcaagctcaataccatgaccgccgccgaggcaaatgagatcgaagacgtgtggcaacttgacctgagctcacgatggcagctctatagactgtggctacagttgtaccaggccgacactaggagaaaaatcctgtcctatgagagacaatataggacatccgccgaaaggatggcagaactccgcctccaggaagatctgcacattttgaaagacgctcaggtggtcgggatgactactacgggtgcagccaagtatagacagatcctgcagaaggtggaacctagaatcgtgattgtggaggaagctgctgaggtgttagaggcgcatactattgccaccctgagtaaagcctgccagcacctgatccttatcggcgaccaccaacagctgcgcccctctgcaaacgtgtatgatctggccaaaaacttcaaccttgaagtgtctttgtttgagcgcctggttaaggtgaacattccatttgtgcgcctgaattaccaacaccggatgtgtcctgagatagccaggctgctcactcctcacatctatcaagatctggaaaatcacccctcagtgctgaaatacgaaaagattaagggagtgtcctctaacttgtttttcgtcgaacacaatttccctgagcaggaaatccaggaagggaaatcacatcagaaccagcacgaggcgcactttgtggtcgaactttgcaaatacttcttgtgccaggagtacctcccaagtcagattacaatcctgaccacctataccggacagctcttttgtctccgtaaactgatgccagctaagacgtttgcaggagtcagagttcacgtcgtggataagtaccagggagaagagaatgatatcatcctgttaagcctcgtacggagcaaccaggaagggaaagtggggtttctgcagatatccaaccgcatttgtgtggcactgtcccgagccaagaaagggatgtactgcatagggaatatgcagatgcttgccaaggtgcctctgtggtcaaagatcatccacaccctccgagagaataaccagataggtccaatgctccgactttgctgccagaaccaccctgaaacccacactctagtctcaaaggcctccgacttccagaaggttcctgagggcggatgctctctcccctgcgagttccgtctggggtgcggccacgtctgcacacgggcatgccatccgtacgatagctcgcataaagagttccagtgtatgaagccatgtcagaaagttatctgtcaggagggtcatcgttgccccctggtttgcttccaggaatgtcagccttgtcaggtgaaggtgcctaaaactataccacgctgtgggcacgaacagatggtgccctgctccgtgccagaaagcgatttttgttgccaggaaccatgctcaaaatcactgcggtgtggccaccggtgtagccacccttgtggggaagactgcgtacagctatgttcggagatggtgacaattaaactgaaatgcggccacagtcagcccgttaagtgcggccacgtagaaggtttactgtacggcggactccttgttaagtgtacaaccaagtgcgggactatcttggactgcggccatccatgtcccggtagctgccacagttgcttcgaagggagatttcacgagcggtgccagcaaccatgcaaacgactgttgatctgtagccacaagtgccaggaaccttgcatcggggagtgcccaccttgccagcgcacgtgccagaataggtgcgttcactctcaatgtaaaaagaagtgcggagagctctgctccccttgtgtggagccctgtgtctggcggtgccagcactatcagtgcactaagctatgctcagaaccctgcaaccgacctccatgctacgtgccatgtaccaaactgctcgtgtgtggtcacccctgcataggcctgtgtggcgagccttgccccaaaaagtgccggatttgtcacatggatgaagtgacccagattttttttggcttcgaggacgaaccagacgccagattcgttcaactggaagactgcagccacatctttgaggtgcaggcccttgatcgctacatgaacgagcagaaagacgatgaagtcgccatccggcttaaagtctgccccatttgccaagtgccgatcagaaaaaatctgcgttacggtacaagcattaagcagaggctcgaggaaatagaaataattaaagagaagatccaaggctctgccggggagatagccacttcccaagaacggcttaaggctctgctagaacggaagagcctccttcaccaactgcttcccgaagatttccttatgctcaaggaaaagctggcacagaagaacctgagcgtgaaggatctcggcctcgtggagaactatataagcttctacgaccacctcgcctctctgtgggattcactgaagaagatgcacgtgctggaggagaaaagggtgaggacccggctggaacaggtgcacgagtggcttgccaagaagagactcagtttcaccagccaggagttgtcagatcttagaagcgaaatccaacgattaacatatcttgtgaatctactgaccagatacaagatcgcggagaaaaaagtcaaagactctatcgctgtggaggtctactccgttcagaatatcctcgagaaaacctgcaagtttactcaagaggatgaacaacttgtccaggagaaaatggaagccctcaaggcgacacttccttgttccggtctggggatttctgaagaagagagggttcagatcgtatctgcgattggatatccccgggggcattggtttaagtgccggaatgggcatatctatgtaatcggggattgtggaggagcaatggagagggggacctgccccgattgcaaagaggtgattggtggcacaaaccacacgctggagcgaagcaatcagctggcttccgaaatggacggtgcacagcacgccgcctggtctgacacagccaataacctgatgaacttcgaagaaatccagggcatgatgtag

SEQ ID NO: 207238 - DNA, 3813 bp, Artificial Sequence
  derived and/or modified sequence
atggaggaaagacggccccatctggatgcacgacctcgcaactcacacactaatcataggggccccgtggatggggagctgccaccccgtgcccgtaatcaggccaataatccccccgccaatgcactacgtggcggcgcttcacacccagggcggcaccctagggccaacaatcaccctgcagcgtactggcagagagaggagagattccgggccatgggcagaaacccgcaccaggggcgtagaaaccaggagggccatgcctctgatgaagcacgggaccagcgacatgatcaagaaaacgacactcggtggagaaacgggaaccaagactgccgtaacaggcggccaccatggtccaacgacaacttccagcaatggcgcacccctcaccagaaacccactgagcagccccagcaagcaaaaaaactgggttacaaattcttagaaagtttactgcaaaaagatccaagtgaagtagtgatcacccttgcaacgtcactgggtttgaaagaactactatcacattctagcatgaaatccaatttcttggaattgatctgccaggtccttcggaaagcttgctcatccaaaatggaccgccagtctgtcttacacgtgttgggtattcttaagaatagtaaatttctgaaagtttgtcttccagcgtatgtcgtgggaatgatcacagaaccaatccctgatattaggaaccagtaccctgagcacatttcaaacatcataagcctgctacaggatctggtgtctgtctttcctgcatcctctgtgcaggagacctccatgctcgtttccttgctaccaacttcgctaaacgcgctgcgcgccagcggggttgatatcgaggaggaaaccgaaaaaaacctggaaaaggtgcagaccataatagagcacttgcaggaaaaacgtagagaggggactttacgagtggatacttacacgttggttcagccagaggcagaggaccacgtggagagttatcgcactatgccaatctacccaacatataacgaggttcacctcgacgaaagacccttcctcagaccgaatattatctctggaaagtatgattccactgctatttatcttgatactcatttcagactcctccgagaagacttcgtgcgacccttgagagaggggattttggaactgttacagagctttgaggaccaaggcttaagaaagcgtaagttcgacgatattaggatctacttcgatacccgaattattacgcccatgtgtagttcgagcggcatcgtgtacaaggtccagtttgatactaagcctctcaaatttgtgcggtggcagaacagcaagcgcttactatacggcagcctcgtttgtatgtctaaggacaacttcgagactttcctcttcgcgacggttagtaatcgggagcaggaggatctgtgtagaggtatagtacagctttgcttcaatgaacagtctcagcagctccttgctgaggtccagcccagcgactcattcctcatggttgagaccaccgcgtacttcgaggcttataggcatgtcttggagggtcttcaagaggtccaggaagaggacgtacccttccagcgtaatatcgtagaatgtaacagccacgttaaggaaccaagatacttgctaatgggcggcaggtacgatttcaccccactgatcgagaatcctagcgccaccggcgagtttttgagaaacgttgaggggttgcgccatccgcgaattaatgtcttggatccaggtcagtggcccagcaaagaggcacttaagctggatgattctcagatggaggccctccagttcgccctaacccgggaacttgccataattcagggacctcccggcactgggaaaacgtacgttggactgaaaatcgtgcaggccttgcttaccaatgagagcgtgtggcaaatttcccttcaaaaattcccaatcctggtagtgtgctacactaatcacgctctggaccagtttctcgagggaatatacaattgtcagaagacgtcaatcgtcagagtggggggacgaagcaattccgagattctgaagcagtttactcttcgggagttgagaaacaagagagagttcagacggaacctgcccatgcatcttcgccgtgcctatatgtctattatgacccaaatgaaagaatctgagcaggagctgcatgagggggcaaagacactcgaatgtaccatgaggggcgtcctccgcgaacagtacctccagaagtacataagcccacaacactgggagagtctcatgaacggacccgtccaggatagcgagtggatttgtttccagcattggaagcatagcatgatgctggaatggctaggattaggcgtgggctccttcacccaaagcgtaagtcccgctggtcccgagaatacagcacaggcagaaggcgacgaggaggaagagggagaggaggagtcctctcttatcgaaattgccgaagaggccgatctgattcaagctgatcgagtgatagaagaagaggaagtggtgagaccacagaggcgcaaaaaggaggagagtggtgcggaccaggagctcgcgaaaatgctccttgccatgcggctggaccactgtgggacaggcacggccgcaggccaagaacaggcaacaggcgagtggcaaacgcagcggaatcagaaaaagaaaatgaagaagcgtgtgaaggatgagttgaggaagctgaatacaatgactgccgctgaggccaacgagatcgaggacgtgtggcagctcgacttaagttcccggtggcaattgtaccggctatggctccagttataccaggctgatactagacgaaaaattctctcatatgagagacagtatagaacctcggccgagcggatggcagagctgcggctccaggaagaccttcacattctgaaggatgctcaggtagtgggcatgacaaccactggggcggccaaataccggcaaatcctgcagaaagtggagccccggatcgtgatcgtggaagaagcagctgaggtcttggaagcacacactatagccacactcagtaaagcatgccagcatttaatcctaatcggcgaccatcagcaactacgtccaagtgccaatgtgtatgatctagccaagaattttaatctcgaggtttccctttttgagaggctagtgaaagtcaacatcccctttgttagacttaactatcagcacaggatgtgtccagaaatcgcccgcctactcaccccacatatctatcaggacctggaaaatcatccgagtgttcttaagtacgaaaaaattaaggccaagtcaaactcatgtagagcgctggccaccgggatgcggcgaaaacacaagatctcagggatgattttaagcttcttcaaactcacgattaggagtgcccggtttcagctgctactgtccggtagctggaccacggccagcttcccttttagccgctcacgcttcgcggttctcatttgccgtgacaacaagcggatgcccgccgtgaaacccgtttccacaaacactggctcgcacggcctgcagatgcccggggccctcatgggggaaacattccagaaggggagcacttctcgggatgccgcggcttgtcttctgagttctctggtgaacaaaattcccccaagatccttaacttgggcttcagattgctgcatttcctttagcagtgcttcctcatgtcggacggcatacacttcattttccatcttttcgatcctgtcgagaaacctgcggatgacttcacagtgggaaaaaattaagcgcatttacaaatag

SEQ ID NO: 207239 - DNA, 5757 bp, Artificial Sequence
  derived and/or modified sequence
atggaggagcgcagacctcacctggatgcgaggccaagaaacagccatacaaaccacaggggccctgtcgatggtgaactgcccccccgggctaggaatcaggcaaacaacccacccgctaacgctctacggggaggcgcctcccatccgggacgacaccctcgcgccaacaaccatcccgctgcatactggcagagggaagaacggttccgagccatgggtagaaatccccatcagggacgacgtaatcaagaaggccacgcctcagatgaagctcgggatcagagacatgaccaggaaaatgatactcgctggaggaatgggaaccaggactgccgtaaccgacggcccccatggtctaacgataactttcagcagtggcggacaccacatcagaaacctaccgagcagccacagcaagctaagaagctggggtataagttccttgagtccttactccagaaggacccaagcgaggtcgttataacgctcgccacgagtctcggtctgaaggagctcctctctcactcctcgatgaaatctaatttccttgaactgatttgccaggtccttcgtaaggcatgcagttctaaaatggaccgtcaatcagtgttgcacgtgctcggcattttaaaaaattccaagttcctaaaggtatgtctccctgcctatgttgttgggatgattacagaacctattccagacattcgcaatcagtatcctgaacatatttccaacattattagtctcctgcaggaccttgtgagtgtgtttccagcctcttccgtccaggaaacatctatgttggtaagcttgcttcccacttccctgaatgcccttcgcgcgtcaggcgtggacatcgaggaggagactgagaagaatctcgagaaggtgcaaaccataattgagcacctgcaagaaaaacggagagaggggaccctgcgcgtggatacctacacactcgtgcaaccggaagctgaggatcacgtggagtcctatcggactatgcctatctacccaacctacaacgaagtgcatctggacgagaggccatttctgcggcccaatatcatttcaggcaagtacgattctacagctatataccttgatactcatttcagactgctgcgcgaggatttcgttaggcctctgcgtgaaggaatcttggaactcctacagagcttcgaggatcagggactacgcaagagaaagtttgatgacattagaatatattttgacacccggatcatcacgcctatgtgttcctctagcggtatcgtgtacaaggtgcagtttgacacaaaacctctgaaattcgtgagatggcaaaattctaaaaggttgctttacggtagcttggtgtgtatgagtaaagataacttcgaaacattcctgtttgccacagtgtcaaatagggaacaggaggacttatgtcgcgggattgtacagttgtgtttcaacgagcagagtcaacagttattggccgaagtacaaccctccgactcctttcttatggtcgagacaactgcctactttgaggcttaccgccacgtgctggaaggcctccaggaggtccaagaagaggacgtgcccttccaacgtaatatagtggaatgtaatagtcacgtgaaggaacccaggtacttgctgatgggaggtaggtatgactttacgcctctgattgagaatccaagcgccacaggagagttcctgcgcaatgtagaaggccttcggcatccccggataaatgtgctggatccagggcagtggcctagcaaagaggcccttaaactcgatgattctcagatggaggcccttcagtttgctcttactagggaactcgccattattcaggggccacctgggacaggtaagacctacgtaggcctgaaaatagttcaggccctgctgaccaacgagtccgtatggcaaatcagtctccagaagttcccaattcttgtggtctgctataccaatcatgctctcgaccagttcctggagggaatttacaattgtcaaaaaacctcgattgtgagggtcggcggtagatccaactccgaaatactcaaacagtttacgttgcgcgagttgaggaacaagcgcgagttcagaaggaatctgcctatgcacctgcgaagagcatacatgagcattatgacccagatgaaagagagtgaacaggaacttcacgagggagccaaaactttggagtgcacaatgaggggagtgctgagggagcagtatttgcaaaaatacatatcacctcaacactgggaatccttaatgaacgggcccgtgcaagactctgagtggatttgttttcagcattggaagcactctatgatgctggagtggctcggccttggagtcggttccttcacacaaagtgtgtcacctgccggtccagagaacaccgcacaagcagagggagatgaggaggaagagggagaggaagagagctccttgatagaaatcgctgaagaggctgacttgatacaagccgatagagtgattgaagaagaggaggtcgtcagaccacagcggcggaagaaagaggagtcaggcgccgatcaagagctggcaaagatgttactcgccatgagactggaccactgcggtaccggcacggccgcagggcaggaacaagccacgggcgagtggcaaacacagcgtaatcagaagaagaagatgaagaaacgcgtaaaggacgaactgagaaagctgaacacaatgaccgccgccgaggctaacgaaatcgaggacgtttggcagctggatttgagcagccggtggcagctgtaccggctgtggctccaactgtaccaagctgataccaggcggaaaattttgagttacgagagacaataccggacgtctgccgaacgcatggccgaactccgcctgcaggaagacctgcacatcctcaaagacgctcaggtggtgggtatgacaaccacgggcgctgccaaataccgtcagattctccaaaaagtcgagccgcggatcgtgattgtagaggaagctgcagaagtgctcgaagcccataccattgctacattgtccaaggcctgccaacacctgatccttataggggatcaccaacagctgagaccatcagccaatgtgtacgacttggctaagaactttaacctggaggtgtcgctgtttgagagactggtgaaggtgaatatcccctttgtccggttaaattaccagcaccggatgtgccccgaaattgcccggcttttgactcctcatatctatcaagacctcgagaaccatccgtccgtcttgaaatacgagaagattaagggcgtctcgtctaacttgttttttgttgagcataactttccggagcaggaaatccaagagggtaaaagccaccagaatcagcatgaagcacacttcgtcgtcgagttgtgtaagtattttctttgtcaggagtacctccctagccagatcacaatcttgaccacatacactggacaattgttttgtctgagaaagctcatgcctgcgaagacttttgccggcgtccgcgttcatgtggtggataaataccagggagaggagaacgacatcatcctcctgtccttggtaaggtctaaccaggaggggaaagtcgggtttctgcagattagcaacaggatttgtgtggctcttagtcgagctaaaaaaggtatgtattgcattggaaacatgcaaatgttagctaaggtcccactgtggtccaagatcatccacaccctaagggaaaacaaccagatcggaccaatgctgagactctgctgccaaaaccatccagagacccatactctagtttctaaagcgagtgactttcagaaggtccctgagggaggatgctctctcccttgcgaatttcgcctaggctgcgggcatgtgtgtaccagggcttgtcacccctacgactctagccacaaggaatttcaatgtatgaaaccatgtcagaaggttatttgtcaagagggccaccggtgcccactggtttgttttcaggaatgtcaaccctgtcaggtgaaggttccgaaaaccatccctcgatgcgggcatgagcagatggtgccctgctctgtgcccgagtccgacttttgctgccaggaaccttgtagcaaatctctgagatgtgggcatcgatgctcccacccttgtggagaggattgtgtgcagctgtgttccgagatggtcaccataaagctgaagtgcggacatagtcagcccgtgaaatgtggccacgtggagggactcttatacggcggcctgctggtgaaatgcaccactaagtgcggcactattctggattgtggacatccatgtccggggtcatgtcactcttgctttgaaggccgttttcacgaacggtgccagcagccttgtaaaaggctgctcatttgctcccataaatgtcaggagccatgtatcggggagtgcccgccatgtcagagaacgtgccagaaccgatgtgtgcactcgcagtgcaagaagaagtgcggagagctgtgttcaccatgcgttgagccttgcgtatggaggtgccaacattatcaatgcacgaagttatgctcagaaccatgcaatagaccaccctgctatgtgccatgcaccaagttgctcgtgtgcgggcacccttgcatcggtctttgcggggagccttgccctaaaaagtgcaggatttgccatatggacgaagttactcagatcttcttcggctttgaggatgaacccgacgcacgctttgtgcagctggaagattgcagtcatatctttgaagtgcaggccctggataggtacatgaatgaacaaaaggacgacgaagtggcaataagactcaaggtgtgccctatctgtcaagttcccatcagaaaaaatttgcggtacgggacctccattaaacagaggctggaagagattgagatcatcaaggagaagatccaagggtctgccggcgagatcgccaccagccaggaaagacttaaggccctgctagagaggaaaagtttgctacaccagttgctcccggaggactttctaatgctgaaggagaagctcgcacaaaagaacctgtctgtgaaggaccttggactagtggagaattacatctccttttatgatcacctggctagcctttgggacagcctgaagaaaatgcacgtccttgaagaaaaacgagtgcgaacgaggctcgaacaggttcacgagtggttagccaaaaaacggctctctttcacctcccaggagctctccgacctcagaagcgagatccagcgcctcacatatcttgtcaacctgttaacccgctacaaaatcgccgagaaaaaagtcaaagattccatagccgtggaagtctatagcgtccagaacatcctagaaaaaacttgcaagtttacccaggaagacgaacagcttgttcaggaaaaaatggaggctttgaaagcgaccctgccctgcagtggcctgggcattagtgaagaagagagggtgcagatcgtgtcggcaatcggttatccacggggccattggttcaagtgtaggaatggacatatctacgtcatcggggattgtggtggcgccatggagagaggcacttgcccagattgtaaagaggtgattggtggaacgaaccacacactagagcgcagtaaccaattggcatcagagatggatggcgcccagcatgctgcatggtccgatactgctaacaatcttatgaatttcgaggagattcagggaatgatgtag

SEQ ID NO: 207240 - DNA, 2748 bp, Artificial Sequence
  derived and/or modified sequence
atggaagaacgccgtccccacctcgatgcccggccacggaattctcacactaaccaccgtgggcctgtggacggcgagctgcctccacgcgcaaggaatcaagctaacaaccctcctgccaatgccctgcgaggaggcgcctcccaccctggaaggcatcctagagctaataatcatcccgccgcctactggcaacgggaggagcggttcagagcaatgggacgcaacccccatcagggtaggcgcaaccaggaaggacatgcctctgatgaagctagagaccagcgacacgatcaagagaatgatacacgctggcgcaacgggaaccaagattgtaggaaccgacggcccccatggagtaatgacaacttccagcagtggaggaccccacaccagaaacctactgagcagccgcaacaagccaagaaacttggatacaagttcctggagtcccttttgcagaaggaccctagcgaagtggtgataactctggctacgagccttggtctcaaggaactcctgtcccacagtagcatgaaaagtaactttctggagctgatatgtcaagtccttcgcaaagcctgcagctctaaaatggataggcagtctgtgctacacgttcttggaatcctgaagaactctaagtttcttaaagtgtgcctgcccgcatacgttgttggaatgataacagaaccaattcctgatatccgcaaccaatacccagagcacatttccaacatcatttctctcctgcaggacctggtcagtgtgtttcccgcttctagcgtacaggaaacctcgatgctggtctccctcttacctacctcccttaatgctctacgcgccagtggggtcgacatcgaagaggagactgagaaaaacctggagaaagtccagaccatcatagaacatttacaggagaagcgacgcgagggaacgctgagagtagacacatacacactcgtccagcccgaggcagaagaccacgtggagtcctatcgcactatgcctatttacccaacctataacgaggtacacctggacgaaaggccgtttttgcgcccgaatatcatcagtggcaagtatgactccaccgcgatctatttagatacgcatttccggctgttgcgcgaggatttcgttcgcccccttcgcgaaggaattctcgagctgctgcagagcttcgaggaccaaggattgcggaaacggaaatttgacgacatcagaatctacttcgacacccgcataatcacgcctatgtgtagctcaagtggcatcgtttacaaagtgcagtttgatactaagcctctgaaatttgtacgctggcagaattcaaagcgtctcctctacggaagcttggtttgcatgagcaaagacaattttgagaccttcctcttcgccacagtaagtaatagggagcaggaagacttgtgcaggggaatcgtccagttgtgctttaacgagcagtcccagcagctgcttgcagaggttcagcccagtgatagctttttgatggtggagacaactgcctattttgaagcatatcgtcatgtccttgaaggattgcaggaagtccaggaagaggacgtccccttccagcgtaacattgtcgagtgtaactcacacgttaaagagccaaggtacctactcatgggtggcagatatgacttcactccgcttatcgagaacccatccgccacaggcgagttcctgcgcaatgtcgaaggtttgcgtcatccccgaatcaacgtactcgacccagggcaatggcctagcaaggaagctctgaagcttgatgactcccaaatggaggctctgcaattcgcattgactcgggaactcgccattattcagggcccccccggtacagggaagacatacgtcggactcaaaattgtccaggctctgctcactaatgagtctgtttggcagatctcccttcaaaaatttcccattctggtggtttgctacaccaaccacgccctggatcaatttctcgaaggaatctacaattgtcagaaaactagtatagtgcgagtcggtggaaggtccaatagtgagatcctgaagcaatttaccctgagggaactcaggaacaagcgagaattcagaagaaatctgcccatgcacctgcggagggcatacatgtccattatgacacagatgaaggaatccgagcaggaactgcatgagggcgccaagactttggaatgtaccatgaggggcgtgctgagggagcaatacttgcagaagtacataagcccccagcattgggagagcttgatgaatgggcctgtacaggacagcgaatggatctgctttcaacactggaagcactctatgatgttggagtggttaggactcggcgtgggctccttcacgcagagcgtctctccggccggccctgagaacacagctcaagccgagggggacgaggaagaggagggggaggaggagagctcattaatcgaaatcgcagaggaggctgatctaattcaagctgatcgggtgattgaagaggaggaagtggtgaggcctcagagacggaaaaaagaagagagcggagccgaccaggagttagcaaagatgctcttagctatgcgcctcgatcactgcggtactggaaccgctgcgggtcaggagcaggctaccggggagtggcagacacagcgaaaccagaaaaaaaaaatgaagaaaagagagaaagaggaaaaaaaagagcgagaaaagagacgcaagaaaaaatag

SEQ ID NO: 207241 - DNA, 2124 bp, Artificial Sequence
  derived and/or modified sequence
tccaagatggacagacagtctgtgttgcacgtactcggaatcctcaagaactcgaagttcctgaaagtgtgcctccctgcctacgtggtgggaatgatcaccgaacctatccctgatatcagaaaccagtacccagagcacatctcaaatatcatatccctcctgcaggatctggtttcagtttttcccgccagctctgtgcaggaaactagcatgctggtgtctctgttgcccacctcattgaacgcattgagggcttccggtgtagacatcgaggaagagacagagaagaacctcgaaaaggtgcagaccattattgagcatcttcaggagaaaagaagagaaggcacactccgagtggacacttataccctggtgcagccagaggccgaggaccatgttgagtcctataggaccatgccgatatatccaacatacaacgaggtgcacctcgatgaaaggccattcctccgccctaatattatcagcgggaaatacgactccaccgctatttacctggatactcacttccgtcttctgagagaagacttcgtgcgtccactgagagagggtatccttgagttgttgcaatcctttgaggatcagggcttgcgcaaacggaagttcgacgacatcaggatatacttcgacactaggataatcactccaatgtgcagttcgagcggcattgtatacaaagttcagttcgataccaagcctcttaagttcgtgcgctggcagaacagcaagcgtctcctctacggctccctagtgtgcatgagcaaggataattttgaaacctttctctttgctaccgtgagcaaccgggagcaggaggatttgtgccgcggtatcgttcaactctgtttcaatgaacagagccagcagctgctggccgaagttcagccatcagactccttccttatggtggagaccacagcatatttcgaggcctaccgccacgttcttgagggattacaggaagtgcaggaggaggacgtgccattccagaggaacattgtggaatgtaattctcacgtgaaagaacccagatacctgctgatggggggccggtacgacttcacaccactaatagaaaacccaagcgcaaccggcgaattccttaggaatgtggaaggtctgcgtcatcctagaataaacgtgctggaccccggccaatggcccagcaaggaggctctgaaactggacgattctcaaatggaggctctgcagttcgcgctgaccagagaattagctattatccaggggccccccgggacaggcaagacatacgtgggccttaagattgtgcaggccctcttaactaacgagagtgtgtggcaaatcagcctccagaagttccctatcttagttgtctgctatacaaatcatgcccttgatcagttcctggaggggatctacaactgccagaagaccagtatcgtgagggtgggaggaagatcaaactccgagattcttaaacagttcacattgcgagagttgaggaataaacgagagttccgccgcaacctgcctatgcatcttcggagggcgtacatgtctatcatgacgcagatgaaggagtctgaacaggagcttcacgagggcgctaaaactttggagtgtacaatgaggggagtgctgagagaacaatacctgcagaaatacatctccccacaacactgggagtcgttaatgaacggccctgtacaagatagcgagtggatctgctttcaacattggaagcactcaatgatgctggagtggcttggtctaggggttggctccttcacacagtctgtatccccagctggccctgagaatacagctcaggcagaaggcgacgaggaggaagaaggggaagaagagagctctctgattgaaattgctgaggaggcggatttaattcaggccgaccgggtaatagaggaggaagaggtagtcagaccccaacgacgcaagaaggaggagagtggggctgatcaagagcttgctaagatgttgttggctatgcggcttgaccactgtggcactgggacggctgctggacaggaacaggctaccggcgaatggcagacggttccttgtctcgtgcttatgagcgctgatcccgcccagccctag

SEQ ID NO: 207242 - DNA, 2805 bp, Artificial Sequence
  derived and/or modified sequence
atggaggagcggcggccccacctggatgcccggcccaggaacagccacaccaaccaccggggccctgtggatggagagctgcccccccgggccaggaaccaggccaacaaccccccagccaatgccctgcggggcggggccagccaccctggccgccacccccgggccaacaaccaccctgctgcctactggcagcgggaggagcgcttccgggccatgggcaggaacccccaccagggcagaagaaaccaggagggccacgccagtgatgaggcccgggaccagagacatgaccaggagaatgacacccgctggagaaatggaaaccaggactgcaggaacagaagaccaccctggagcaatgacaacttccagcagtggaggaccccccaccagaagcccacagagcagccccagcaggccaagaagctgggctacaagttcctggagagcctgctgcagaaggaccccagcgaggtggtgatcaccctggccaccagcctgggcctgaaggagctgctgagccacagctccatgaagagcaacttcctggagctgatctgccaggtgctgaggaaggcctgcagcagcaagatggaccggcagagcgtgctgcacgtgctgggcatcctgaagaacagcaagttcctgaaggtgtgcctgcctgcctacgtggtgggcatgatcacagagcccatcccagacatccggaaccagtacccagagcacatcagcaacatcatcagcctgctgcaggacctggtgtctgtgtttcctgccagctctgtgcaggagacctccatgctggtgtccctgctgcccaccagcctgaatgccctgcgggccagcggcgtggacatcgaggaggagacagagaagaacctggagaaggtgcagaccatcatcgagcacctgcaggagaagagaagagagggcaccctgcgggtggacacctacaccctggtgcagcctgaggctgaagatcatgtggagagctaccgcaccatgcccatctaccccacctacaatgaggtgcacctggatgagcggcccttcctgcggcccaacatcatcagcggcaagtatgacagcacagccatctacctggacacccacttccggctgctgcgggaggactttgtgcggcccctgcgggagggcatcctggagctgctgcagagctttgaggaccagggcctgaggaagaggaagtttgatgacatccgcatctactttgacacccgcatcatcacccccatgtgcagcagcagcggcatcgtgtacaaggtgcagtttgacaccaagcccctgaagtttgtgcgctggcagaacagcaagaggctgctgtatggcagcctggtgtgcatgagcaaggacaactttgagaccttcctgtttgccaccgtgagcaaccgggagcaggaggacctgtgccggggcatcgtgcagctgtgcttcaatgagcagagccagcagctgctggccgaggtgcagcccagcgacagcttcctgatggtggagaccacagcctactttgaggcctacagacatgtgctggagggcctgcaggaggtgcaggaggaggatgtgcccttccagaggaacatcgtggagtgcaacagccacgtgaaggagccccgctacctgctgatgggcggccgctatgacttcacccccctgattgagaaccccagcgccactggagagttcctgagaaatgtggagggcctgcggcacccccgcatcaacgtgctggaccccggccagtggcccagcaaggaggccctgaagctggatgacagccagatggaggccctgcagtttgccctgacccgggagctggccatcatccagggccccccaggcaccgggaagacctacgtgggcctgaagatcgtgcaggccctgctgaccaatgaatctgtgtggcagatcagcctgcagaagttccccatcctggtggtgtgctacaccaaccacgccctggaccagttcctggagggcatctacaactgccagaagaccagcatcgtgcgggtgggcggccgcagcaacagcgagatcctgaagcagttcaccctgcgggagctgaggaacaagcgggagttcagaagaaacctgcccatgcacctgcggcgggcctacatgagcatcatgacccagatgaaggagagcgagcaggagctgcacgagggcgccaagaccctggagtgcaccatgaggggcgtgctgcgggagcagtacctgcagaagtacatcagcccccagcactgggagagcctgatgaatggacctgtgcaggacagcgagtggatctgcttccagcactggaagcacagcatgatgctggagtggctgggcctgggcgtgggcagcttcacccagagcgtgtccccagctggcccagaaaatacagcccaggccgagggagatgaggaggaggagggggaggaggagagcagcctgattgaaattgctgaggaggccgacctgatccaggccgacagagtcatcgaggaggaggaggtggtgcggccccagaggaggaagaaggaggagagcggggctgaccaggagctggccaagatgctgctggccatgaggctggaccactgcggcaccggcacagctgctggccaggagcaggccaccggggagtggcagacccagaggaaccagaagaagaagatgaagaagagggtgaaggatgagctgaggaagctgaacaccatgacagctgctgaggccaatgaaattgaagatgtgtggcagctggacctgagcagccgctggcagctgtactag

SEQ ID NO: 207243 - DNA, 5757 bp, Artificial Sequence
  derived and/or modified sequence
atggaggagcggcggccccacctggatgcccggcccaggaacagccacaccaaccaccggggccctgtggatggagagctgcccccccgggccaggaaccaggccaacaaccccccagccaatgccctgcggggcggggccagccaccctggccgccacccccgggccaacaaccaccctgctgcctactggcagcgggaggagcgcttccgggccatgggcaggaacccccaccagggcagaagaaaccaggagggccacgccagtgatgaggcccgggaccagagacatgaccaggagaatgacacccgctggagaaatggaaaccaggactgcaggaacagaagaccaccctggagcaatgacaacttccagcagtggaggaccccccaccagaagcccacagagcagccccagcaggccaagaagctgggctacaagttcctggagagcctgctgcagaaggaccccagcgaggtggtgatcaccctggccaccagcctgggcctgaaggagctgctgagccacagctccatgaagagcaacttcctggagctgatctgccaggtgctgaggaaggcctgcagcagcaagatggaccggcagagcgtgctgcacgtgctgggcatcctgaagaacagcaagttcctgaaggtgtgcctgcctgcctacgtggtgggcatgatcacagagcccatcccagacatccggaaccagtacccagagcacatcagcaacatcatcagcctgctgcaggacctggtgtctgtgtttcctgccagctctgtgcaggagacctccatgctggtgtccctgctgcccaccagcctgaatgccctgcgggccagcggcgtggacatcgaggaggagacagagaagaacctggagaaggtgcagaccatcatcgagcacctgcaggagaagagaagagagggcaccctgcgggtggacacctacaccctggtgcagcctgaggctgaagatcatgtggagagctaccgcaccatgcccatctaccccacctacaatgaggtgcacctggatgagcggcccttcctgcggcccaacatcatcagcggcaagtatgacagcacagccatctacctggacacccacttccggctgctgcgggaggactttgtgcggcccctgcgggagggcatcctggagctgctgcagagctttgaggaccagggcctgaggaagaggaagtttgatgacatccgcatctactttgacacccgcatcatcacccccatgtgcagcagcagcggcatcgtgtacaaggtgcagtttgacaccaagcccctgaagtttgtgcgctggcagaacagcaagaggctgctgtatggcagcctggtgtgcatgagcaaggacaactttgagaccttcctgtttgccaccgtgagcaaccgggagcaggaggacctgtgccggggcatcgtgcagctgtgcttcaatgagcagagccagcagctgctggccgaggtgcagcccagcgacagcttcctgatggtggagaccacagcctactttgaggcctacagacatgtgctggagggcctgcaggaggtgcaggaggaggatgtgcccttccagaggaacatcgtggagtgcaacagccacgtgaaggagccccgctacctgctgatgggcggccgctatgacttcacccccctgattgagaaccccagcgccactggagagttcctgagaaatgtggagggcctgcggcacccccgcatcaacgtgctggaccccggccagtggcccagcaaggaggccctgaagctggatgacagccagatggaggccctgcagtttgccctgacccgggagctggccatcatccagggccccccaggcaccgggaagacctacgtgggcctgaagatcgtgcaggccctgctgaccaatgaatctgtgtggcagatcagcctgcagaagttccccatcctggtggtgtgctacaccaaccacgccctggaccagttcctggagggcatctacaactgccagaagaccagcatcgtgcgggtgggcggccgcagcaacagcgagatcctgaagcagttcaccctgcgggagctgaggaacaagcgggagttcagaagaaacctgcccatgcacctgcggcgggcctacatgagcatcatgacccagatgaaggagagcgagcaggagctgcacgagggcgccaagaccctggagtgcaccatgaggggcgtgctgcgggagcagtacctgcagaagtacatcagcccccagcactgggagagcctgatgaatggacctgtgcaggacagcgagtggatctgcttccagcactggaagcacagcatgatgctggagtggctgggcctgggcgtgggcagcttcacccagagcgtgtccccagctggcccagaaaatacagcccaggccgagggagatgaggaggaggagggggaggaggagagcagcctgattgaaattgctgaggaggccgacctgatccaggccgacagagtcatcgaggaggaggaggtggtgcggccccagaggaggaagaaggaggagagcggggctgaccaggagctggccaagatgctgctggccatgaggctggaccactgcggcaccggcacagctgctggccaggagcaggccaccggggagtggcagacccagaggaaccagaagaagaagatgaagaagagggtgaaggatgagctgaggaagctgaacaccatgacagctgctgaggccaatgaaattgaagatgtgtggcagctggacctgagcagccgctggcagctgtaccgcctgtggctgcagctgtaccaggccgacaccaggaggaagatcctgtcctatgaaaggcagtaccgcaccagcgctgagaggatggccgagctgcggctgcaggaggacctgcacatcctgaaggatgcccaggtggtgggcatgaccaccaccggggccgccaagtaccggcagatcctgcagaaggtggagccccgcatcgtcatcgtggaggaggccgctgaggtgctggaggcccacaccatcgccaccctgagcaaggcctgccagcacctgatcctgattggagaccaccagcagctgcggcccagcgccaacgtgtatgacctggccaagaacttcaacctggaggtgtccctgtttgagcggctggtgaaggtgaacatcccctttgtgcggctgaactaccagcacaggatgtgcccagaaattgcccggctgctgaccccccacatctaccaggacctggagaaccaccccagcgtgctgaagtatgagaagatcaagggcgtgagcagcaacctcttctttgtggagcacaacttccctgagcaggagatccaggagggcaagagccaccagaaccagcacgaggcccactttgtggtggagctgtgcaagtacttcctgtgccaggagtacctgcccagccagatcaccatcctgaccacctacacaggccagctgttctgcctgaggaagctgatgcctgccaagacctttgctggggtgcgggtgcacgtggtggacaagtaccagggcgaggagaatgacatcatcctgctgagcctggtgcgcagcaaccaggagggcaaggtgggcttcctgcagatcagcaaccgcatctgtgtggccctgagccgggccaagaagggcatgtactgcatcggcaacatgcagatgctggccaaggtgcccctgtggagcaagatcatccacaccctgcgggagaacaaccagatcggccccatgctgcggctgtgctgccagaaccaccctgagacccacaccctggtgtccaaggccagtgacttccagaaggtgcctgagggcggctgcagcctgccctgtgagttccggctgggctgcggccacgtgtgcacccgggcctgccacccctatgacagcagccacaaggagttccagtgcatgaagccctgccagaaggtgatctgccaggagggccaccgctgccccctggtgtgcttccaggagtgccagccctgccaggtgaaggtgcccaagaccatcccccgctgtggccacgagcagatggtgccctgcagcgtgcctgagagtgacttctgctgccaggagccctgcagcaagagcctgcgctgtggccaccgctgcagccacccctgtggggaggactgtgtgcagctgtgcagcgagatggtgaccatcaagctgaagtgtggccacagccagcctgtgaagtgtggccacgtggagggcctgctgtatggaggcctgctggtgaagtgcaccaccaagtgtggcaccatcctggactgtggccacccctgccccggcagctgccacagctgctttgagggccgcttccacgagcgctgccagcagccctgcaagaggctgctgatctgcagccacaagtgccaggagccctgcatcggggagtgccccccctgccagaggacctgccagaacagatgtgtgcacagccagtgcaagaagaagtgtggggagctgtgcagcccctgtgtggagccctgtgtgtggcgctgccagcactaccagtgcaccaagctgtgcagcgagccctgcaaccggcccccctgctacgtgccctgcaccaagctgctggtgtgtggccacccctgcatcggcctgtgtggggagccctgccccaagaagtgccgcatctgccacatggatgaggtgacccagatcttctttggatttgaagatgagccagatgccaggtttgtgcagctggaggactgcagccacatctttgaggtgcaggccctggaccgctacatgaatgagcagaaggatgatgaggtggccatccggctgaaggtgtgccccatctgccaggtgcccatcaggaagaacctgcgctatggcaccagcatcaagcagaggctggaggagattgagatcatcaaggagaagatccagggcagcgctggggagatcgccaccagccaggagcggctgaaggccctgctggagaggaagagcctgctgcaccagctgctgcctgaggacttcctgatgctgaaggagaagctggcccagaagaacctgtctgtgaaggacctgggcctggtggagaactacatctccttctatgaccacctggccagcctgtgggacagcctgaagaagatgcacgtgctggaggagaagagggtgaggacccggctggagcaggtgcatgagtggctggccaagaagaggctgtccttcaccagccaggagctgagtgacctgcggtctgagatccagaggctgacctacctggtgaacctgctgacccgctacaagattgctgagaagaaggtgaaggacagcattgctgtggaggtgtacagcgtgcagaacatcctggagaagacctgcaagttcacccaggaggatgagcagctggtgcaggagaagatggaggccctgaaggccaccctgccctgcagcggcctgggcatcagcgaggaggagcgggtgcagatcgtgtctgccatcggctacccccggggccactggttcaagtgcagaaatggccacatctacgtgattggagactgtggcggggccatggagcggggcacctgcccagactgcaaggaggtgattggaggcaccaaccacaccctggagaggagcaaccagctggccagcgagatggatggagcccagcacgccgcctggagcgacacagccaacaacctgatgaactttgaggagatccagggcatgatgtag

SEQ ID NO: 207244 - DNA, 3813 bp, Artificial Sequence
  derived and/or modified sequence
atggaggagcggcggccccacctggatgcccggcccaggaacagccacaccaaccaccggggccctgtggatggagagctgcccccccgggccaggaaccaggccaacaaccccccagccaatgccctgcggggcggggccagccaccctggccgccacccccgggccaacaaccaccctgctgcctactggcagcgggaggagcgcttccgggccatgggcaggaacccccaccagggcagaagaaaccaggagggccacgccagtgatgaggcccgggaccagagacatgaccaggagaatgacacccgctggagaaatggaaaccaggactgcaggaacagaagaccaccctggagcaatgacaacttccagcagtggaggaccccccaccagaagcccacagagcagccccagcaggccaagaagctgggctacaagttcctggagagcctgctgcagaaggaccccagcgaggtggtgatcaccctggccaccagcctgggcctgaaggagctgctgagccacagctccatgaagagcaacttcctggagctgatctgccaggtgctgaggaaggcctgcagcagcaagatggaccggcagagcgtgctgcacgtgctgggcatcctgaagaacagcaagttcctgaaggtgtgcctgcctgcctacgtggtgggcatgatcacagagcccatcccagacatccggaaccagtacccagagcacatcagcaacatcatcagcctgctgcaggacctggtgtctgtgtttcctgccagctctgtgcaggagacctccatgctggtgtccctgctgcccaccagcctgaatgccctgcgggccagcggcgtggacatcgaggaggagacagagaagaacctggagaaggtgcagaccatcatcgagcacctgcaggagaagagaagagagggcaccctgcgggtggacacctacaccctggtgcagcctgaggctgaagatcatgtggagagctaccgcaccatgcccatctaccccacctacaatgaggtgcacctggatgagcggcccttcctgcggcccaacatcatcagcggcaagtatgacagcacagccatctacctggacacccacttccggctgctgcgggaggactttgtgcggcccctgcgggagggcatcctggagctgctgcagagctttgaggaccagggcctgaggaagaggaagtttgatgacatccgcatctactttgacacccgcatcatcacccccatgtgcagcagcagcggcatcgtgtacaaggtgcagtttgacaccaagcccctgaagtttgtgcgctggcagaacagcaagaggctgctgtatggcagcctggtgtgcatgagcaaggacaactttgagaccttcctgtttgccaccgtgagcaaccgggagcaggaggacctgtgccggggcatcgtgcagctgtgcttcaatgagcagagccagcagctgctggccgaggtgcagcccagcgacagcttcctgatggtggagaccacagcctactttgaggcctacagacatgtgctggagggcctgcaggaggtgcaggaggaggatgtgcccttccagaggaacatcgtggagtgcaacagccacgtgaaggagccccgctacctgctgatgggcggccgctatgacttcacccccctgattgagaaccccagcgccactggagagttcctgagaaatgtggagggcctgcggcacccccgcatcaacgtgctggaccccggccagtggcccagcaaggaggccctgaagctggatgacagccagatggaggccctgcagtttgccctgacccgggagctggccatcatccagggccccccaggcaccgggaagacctacgtgggcctgaagatcgtgcaggccctgctgaccaatgaatctgtgtggcagatcagcctgcagaagttccccatcctggtggtgtgctacaccaaccacgccctggaccagttcctggagggcatctacaactgccagaagaccagcatcgtgcgggtgggcggccgcagcaacagcgagatcctgaagcagttcaccctgcgggagctgaggaacaagcgggagttcagaagaaacctgcccatgcacctgcggcgggcctacatgagcatcatgacccagatgaaggagagcgagcaggagctgcacgagggcgccaagaccctggagtgcaccatgaggggcgtgctgcgggagcagtacctgcagaagtacatcagcccccagcactgggagagcctgatgaatggacctgtgcaggacagcgagtggatctgcttccagcactggaagcacagcatgatgctggagtggctgggcctgggcgtgggcagcttcacccagagcgtgtccccagctggcccagaaaatacagcccaggccgagggagatgaggaggaggagggggaggaggagagcagcctgattgaaattgctgaggaggccgacctgatccaggccgacagagtcatcgaggaggaggaggtggtgcggccccagaggaggaagaaggaggagagcggggctgaccaggagctggccaagatgctgctggccatgaggctggaccactgcggcaccggcacagctgctggccaggagcaggccaccggggagtggcagacccagaggaaccagaagaagaagatgaagaagagggtgaaggatgagctgaggaagctgaacaccatgacagctgctgaggccaatgaaattgaagatgtgtggcagctggacctgagcagccgctggcagctgtaccgcctgtggctgcagctgtaccaggccgacaccaggaggaagatcctgtcctatgaaaggcagtaccgcaccagcgctgagaggatggccgagctgcggctgcaggaggacctgcacatcctgaaggatgcccaggtggtgggcatgaccaccaccggggccgccaagtaccggcagatcctgcagaaggtggagccccgcatcgtcatcgtggaggaggccgctgaggtgctggaggcccacaccatcgccaccctgagcaaggcctgccagcacctgatcctgattggagaccaccagcagctgcggcccagcgccaacgtgtatgacctggccaagaacttcaacctggaggtgtccctgtttgagcggctggtgaaggtgaacatcccctttgtgcggctgaactaccagcacaggatgtgcccagaaattgcccggctgctgaccccccacatctaccaggacctggagaaccaccccagcgtgctgaagtatgagaagatcaaggccaagagcaacagctgccgggccctggccaccggcatgaggaggaagcacaagatcagcggcatgatcctgtccttcttcaagctgaccatccgcagcgcccgcttccagctgctgctgagcggctcctggaccacagccagcttccccttcagccgcagcagatttgctgtgctgatctgccgggacaacaagaggatgcctgctgtgaagcctgtgtccaccaacacaggcagccacggcctgcagatgcctggggccctgatgggagagaccttccagaagggcagcaccagcagagatgctgctgcctgcctgctgagcagcctggtgaacaagatccccccaagaagcctgacctgggccagtgactgctgcatctccttcagcagcgccagcagctgcaggacagcctacaccagcttcagcatcttcagcatcctgagcaggaacctgaggatgaccagccagtgggagaagatcaagaggatctacaagtag

SEQ ID NO: 207245 - DNA, 2748 bp, Artificial Sequence
  derived and/or modified sequence
atggaggagcggcggccccacctggatgcccggcccaggaacagccacaccaaccaccggggccctgtggatggagagctgcccccccgggccaggaaccaggccaacaaccccccagccaatgccctgcggggcggggccagccaccctggccgccacccccgggccaacaaccaccctgctgcctactggcagcgggaggagcgcttccgggccatgggcaggaacccccaccagggcagaagaaaccaggagggccacgccagtgatgaggcccgggaccagagacatgaccaggagaatgacacccgctggagaaatggaaaccaggactgcaggaacagaagaccaccctggagcaatgacaacttccagcagtggaggaccccccaccagaagcccacagagcagccccagcaggccaagaagctgggctacaagttcctggagagcctgctgcagaaggaccccagcgaggtggtgatcaccctggccaccagcctgggcctgaaggagctgctgagccacagctccatgaagagcaacttcctggagctgatctgccaggtgctgaggaaggcctgcagcagcaagatggaccggcagagcgtgctgcacgtgctgggcatcctgaagaacagcaagttcctgaaggtgtgcctgcctgcctacgtggtgggcatgatcacagagcccatcccagacatccggaaccagtacccagagcacatcagcaacatcatcagcctgctgcaggacctggtgtctgtgtttcctgccagctctgtgcaggagacctccatgctggtgtccctgctgcccaccagcctgaatgccctgcgggccagcggcgtggacatcgaggaggagacagagaagaacctggagaaggtgcagaccatcatcgagcacctgcaggagaagagaagagagggcaccctgcgggtggacacctacaccctggtgcagcctgaggctgaagatcatgtggagagctaccgcaccatgcccatctaccccacctacaatgaggtgcacctggatgagcggcccttcctgcggcccaacatcatcagcggcaagtatgacagcacagccatctacctggacacccacttccggctgctgcgggaggactttgtgcggcccctgcgggagggcatcctggagctgctgcagagctttgaggaccagggcctgaggaagaggaagtttgatgacatccgcatctactttgacacccgcatcatcacccccatgtgcagcagcagcggcatcgtgtacaaggtgcagtttgacaccaagcccctgaagtttgtgcgctggcagaacagcaagaggctgctgtatggcagcctggtgtgcatgagcaaggacaactttgagaccttcctgtttgccaccgtgagcaaccgggagcaggaggacctgtgccggggcatcgtgcagctgtgcttcaatgagcagagccagcagctgctggccgaggtgcagcccagcgacagcttcctgatggtggagaccacagcctactttgaggcctacagacatgtgctggagggcctgcaggaggtgcaggaggaggatgtgcccttccagaggaacatcgtggagtgcaacagccacgtgaaggagccccgctacctgctgatgggcggccgctatgacttcacccccctgattgagaaccccagcgccactggagagttcctgagaaatgtggagggcctgcggcacccccgcatcaacgtgctggaccccggccagtggcccagcaaggaggccctgaagctggatgacagccagatggaggccctgcagtttgccctgacccgggagctggccatcatccagggccccccaggcaccgggaagacctacgtgggcctgaagatcgtgcaggccctgctgaccaatgaatctgtgtggcagatcagcctgcagaagttccccatcctggtggtgtgctacaccaaccacgccctggaccagttcctggagggcatctacaactgccagaagaccagcatcgtgcgggtgggcggccgcagcaacagcgagatcctgaagcagttcaccctgcgggagctgaggaacaagcgggagttcagaagaaacctgcccatgcacctgcggcgggcctacatgagcatcatgacccagatgaaggagagcgagcaggagctgcacgagggcgccaagaccctggagtgcaccatgaggggcgtgctgcgggagcagtacctgcagaagtacatcagcccccagcactgggagagcctgatgaatggacctgtgcaggacagcgagtggatctgcttccagcactggaagcacagcatgatgctggagtggctgggcctgggcgtgggcagcttcacccagagcgtgtccccagctggcccagaaaatacagcccaggccgagggagatgaggaggaggagggggaggaggagagcagcctgattgaaattgctgaggaggccgacctgatccaggccgacagagtcatcgaggaggaggaggtggtgcggccccagaggaggaagaaggaggagagcggggctgaccaggagctggccaagatgctgctggccatgaggctggaccactgcggcaccggcacagctgctggccaggagcaggccaccggggagtggcagacccagaggaaccagaagaagaagatgaagaagcgggagaaggaggagaagaaggagcgggagaagaggaggaagaagaagtag

SEQ ID NO: 207246 - DNA, 2124 bp, Artificial Sequence
  derived and/or modified sequence
agcaagatggaccggcagagcgtgctgcacgtgctgggcatcctgaagaacagcaagttcctgaaggtgtgcctgcctgcctacgtggtgggcatgatcacagagcccatcccagacatccggaaccagtacccagagcacatcagcaacatcatcagcctgctgcaggacctggtgtctgtgtttcctgccagctctgtgcaggagacctccatgctggtgtccctgctgcccaccagcctgaatgccctgcgggccagcggcgtggacatcgaggaggagacagagaagaacctggagaaggtgcagaccatcatcgagcacctgcaggagaagagaagagagggcaccctgcgggtggacacctacaccctggtgcagcctgaggctgaagatcatgtggagagctaccgcaccatgcccatctaccccacctacaatgaggtgcacctggatgagcggcccttcctgcggcccaacatcatcagcggcaagtatgacagcacagccatctacctggacacccacttccggctgctgcgggaggactttgtgcggcccctgcgggagggcatcctggagctgctgcagagctttgaggaccagggcctgaggaagaggaagtttgatgacatccgcatctactttgacacccgcatcatcacccccatgtgcagcagcagcggcatcgtgtacaaggtgcagtttgacaccaagcccctgaagtttgtgcgctggcagaacagcaagaggctgctgtatggcagcctggtgtgcatgagcaaggacaactttgagaccttcctgtttgccaccgtgagcaaccgggagcaggaggacctgtgccggggcatcgtgcagctgtgcttcaatgagcagagccagcagctgctggccgaggtgcagcccagcgacagcttcctgatggtggagaccacagcctactttgaggcctacagacatgtgctggagggcctgcaggaggtgcaggaggaggatgtgcccttccagaggaacatcgtggagtgcaacagccacgtgaaggagccccgctacctgctgatgggcggccgctatgacttcacccccctgattgagaaccccagcgccactggagagttcctgagaaatgtggagggcctgcggcacccccgcatcaacgtgctggaccccggccagtggcccagcaaggaggccctgaagctggatgacagccagatggaggccctgcagtttgccctgacccgggagctggccatcatccagggccccccaggcaccgggaagacctacgtgggcctgaagatcgtgcaggccctgctgaccaatgaatctgtgtggcagatcagcctgcagaagttccccatcctggtggtgtgctacaccaaccacgccctggaccagttcctggagggcatctacaactgccagaagaccagcatcgtgcgggtgggcggccgcagcaacagcgagatcctgaagcagttcaccctgcgggagctgaggaacaagcgggagttcagaagaaacctgcccatgcacctgcggcgggcctacatgagcatcatgacccagatgaaggagagcgagcaggagctgcacgagggcgccaagaccctggagtgcaccatgaggggcgtgctgcgggagcagtacctgcagaagtacatcagcccccagcactgggagagcctgatgaatggacctgtgcaggacagcgagtggatctgcttccagcactggaagcacagcatgatgctggagtggctgggcctgggcgtgggcagcttcacccagagcgtgtccccagctggcccagaaaatacagcccaggccgagggagatgaggaggaggagggggaggaggagagcagcctgattgaaattgctgaggaggccgacctgatccaggccgacagagtcatcgaggaggaggaggtggtgcggccccagaggaggaagaaggaggagagcggggctgaccaggagctggccaagatgctgctggccatgaggctggaccactgcggcaccggcacagctgctggccaggagcaggccaccggggagtggcagacagtgccctgcctggtgctgatgtctgctgaccctgcccagccctag

SEQ ID NO: 207247 - DNA, 2805 bp, Artificial Sequence
  derived and/or modified sequence
atggaggagcggcggccccacctggacgcccggccccggaacagccatactaaccaccggggacccgtggatggtgaactaccgccgagggctcgaaatcaagccaacaacccacccgcgaacgctctgagaggtggagctagccaccctggacggcatccaagggcaaataatcatcccgctgcatattggcagcgcgaagagcgcttccgggctatgggacgcaatccccaccaggggcgccggaaccaagaaggccatgcttcagatgaggcgcgggatcagagacacgatcaggaaaatgataccaggtggaggaacggcaaccaggactgtagaaatagaaggcctccatggagcaacgacaatttccagcagtggcgaacaccacaccagaaaccaacagagcagccacagcaggccaagaagctgggctacaagttccttgaaagtctgctgcaaaaagaccctagcgaagttgtaattactctggccacatctctgggtttgaaggagctgctgagccactcgagcatgaaatccaactttttagaactgatttgtcaggtgctgagaaaggcatgttcctcaaagatggataggcagagcgtgctgcacgtactgggcattttgaagaatagcaaatttctaaaggtgtgcttgcctgcatacgtggtcggcatgattactgaacctattccagatattcggaaccagtatccagaacatatttccaatatcatcagcctgttacaggacttggttagcgtgtttcctgcatctagcgttcaggagacttctatgctggtgagccttctgcctacatcactcaatgcactgcgagccagcggcgtggatattgaggaggagacggagaagaacttagagaaagttcaaacaattatcgagcatttgcaggagaagagacgcgaaggcaccctgagggtggacacctataccctggtgcagccggaggcagaggaccacgtcgaatcctacagaaccatgccgatctaccccacctataatgaagtgcacctggacgaacgtccgtttctgcgccccaacatcatttccgggaaatacgactcaacagctatttatctggatactcactttcggctgctacgagaggatttcgtgaggcccctgcgagaaggaatcctggaattgctgcagtcgtttgaggaccaggggctgcgcaaacggaagtttgacgatattcgtatctacttcgatactaggatcattactccgatgtgttcttctagcgggatcgtgtacaaggtgcagttcgataccaagcctctgaagttcgtgcgctggcaaaattccaaaaggctgctgtacggttccctggtttgtatgtcgaaagacaacttcgagacgttcttgtttgccacagtgagtaaccgcgaacaggaggacctgtgtcgcggaattgtacagctgtgttttaacgagcaaagccaacagcttctggccgaggtgcaaccttctgacagctttttgatggtggagaccaccgcctattttgaggcatacagacacgtcctggagggcttgcaggaggtgcaggaagaggacgtgccttttcagcgcaacatcgtggagtgcaacagccatgtaaaggagccaaggtaccttctcatgggtggtcggtatgacttcacgcccctgattgagaacccttcagctaccggcgaattcctgcgtaacgtggagggactgaggcacccacgcatcaatgtgcttgacccaggccagtggccgagtaaggaagccttgaagctggacgattcccagatggaagccctccagtttgccctcacacgggaattagctataatacagggtccacctggcactggtaagacctacgtggggctcaaaattgttcaggccttgttaacgaacgaatctgtgtggcagatcagcttacaaaagtttcccatcctggttgtctgctacacaaaccacgcccttgaccagttcctggaaggtatctacaattgtcagaagacatccattgtgagagtggggggccgatccaattctgagattctgaaacagtttactcttcgtgagctgcgcaacaaacgcgagtttcggcgcaacttgccaatgcatttaaggcgggcatacatgtccataatgacccagatgaaagagagcgagcaggagctgcatgagggggccaagacattggagtgcactatgaggggagtccttcgagaacagtacctgcagaaatacatctctccgcaacactgggagtcactcatgaatgggccagtgcaggattccgaatggatatgcttccagcattggaagcatagtatgatgttggagtggctcggacttggcgtggggagtttcacccaatcagtgtctcccgcgggaccagagaacaccgcacaggcagaaggagatgaagaagaagaaggagaggaagaatcctcattgattgaaattgctgaggaggccgacttaattcaggctgatcgagtgatcgaggaggaggaggtggtccgccctcagcgccgcaaaaaagaggaatctggagccgaccaggaactagctaagatgcttctggctatgcgtctggaccattgtggaaccggaacagccgcaggtcaggaacaagccacgggcgaatggcaaacacagagaaaccagaagaagaagatgaagaaaagagtaaaggacgagttgagaaaattgaatactatgactgctgccgaggctaacgagattgaggacgtctggcagctggatctgagttcccgctggcaactttactag

SEQ ID NO: 207248 - DNA, 5757 bp, Artificial Sequence
  derived and/or modified sequence
atggaggagcggcggccccacctggacgcccggccccggaacagccataccaaccataggggaccagtcgacggcgaactgccccctagggcgcgaaaccaggccaataatccgcccgcaaatgctttacgcgggggcgcgtctcacccgggtagacaccctcgggccaacaatcaccccgctgcatactggcaacgtgaggagcggtttagggctatgggccggaatcctcatcaggggaggaggaaccaggaaggccacgctagcgacgaggcaagggatcaaagacacgaccaggagaacgatactaggtggagaaatggaaatcaagactgccgcaataggaggccaccctggagcaacgataattttcagcaatggcgcaccccgcatcagaaacctactgagcagccacaacaggccaagaaactgggctacaaatttcttgaatcccttctgcaaaaagacccgtccgaggtggtcattaccctcgccaccagcctaggccttaaggaacttctgtcacactcctccatgaaaagcaatttccttgagctgatctgtcaggtactgaggaaagcatgcagctccaaaatggaccgacagtccgtgttgcatgtgcttggcatccttaaaaatagcaagttcctgaaggtgtgtttgcctgcctacgtagtgggaatgattacagaaccaatacctgatataaggaatcaataccctgagcatataagcaatattatatctctactgcaggacctagtttccgtctttcctgctagcagtgtgcaagaaacgtccatgcttgtaagtctccttcccaccagcttaaatgctctgagagcttctggcgtcgatattgaggaggagaccgagaaaaatctggaaaaggttcaaaccatcatcgaacatctacaagagaagcgaagggaaggtaccttgcgggtcgacacatatactttggttcaacctgaggccgaagaccacgtcgagtcatacaggaccatgccaatttatccgacttataacgaagtccaccttgacgagaggccttttttacggccaaacattatttccggcaagtacgacagtaccgctatttatcttgatacccacttcagactgttacgggaggacttcgtgaggcctctaagagagggaatcttggagctcctgcagtcctttgaggaccagggcctgaggaagaggaagtttgatgacatccgcatttactttgacacgcgaatcattaccccgatgtgctcttccagtggtattgtttacaaggtccagtttgacacaaagcctctgaagttcgtgaggtggcagaactcaaagcgactattgtatggctctctggtatgtatgtccaaggacaatttcgaaacgttcttgttcgccacagtgtctaaccgggaacaagaagacttatgccgcggcattgtccagctgtgcttcaacgaacaatcccaacagcttctggcagaagtccagcctagcgatagtttcctcatggttgagaccactgcctattttgaggcatatcgacatgtcctggagggactccaggaggtgcaggaggaagatgtgcccttccaacggaacatcgtggagtgcaattctcacgtcaaggaacccaggtacctcctgatgggcggtagatatgacttcacaccattaatcgagaatccttcagcaactggggagttcctccgcaacgtagaaggactgagacacccgaggatcaatgtgcttgaccctggccagtggccctccaaagaagccctgaaacttgacgactcgcagatggaagcactacagttcgccctcactcgggagctcgccatcatccagggtccccctggaactggtaaaacctatgtgggccttaaaattgtacaagctctgctgaccaatgagtcggtctggcagatctccctccaaaagttccccattcttgtagtgtgttacaccaatcacgcgttagatcagtttctggaaggcatttataactgtcagaagacctctattgtccgcgtgggaggtagaagcaactccgagatcctcaagcagttcacactgagggagctgcggaacaagcgggagtttagaaggaacctgcccatgcatctgaggcgcgcctatatgagtatcatgacgcagatgaaggagtccgaacaggaattacacgagggagccaagaccctggagtgtactatgaggggagtcctgagggaacagtatctgcagaagtacataagtccacaacattgggaaagcctgatgaatgggccagttcaggacagtgagtggatctgctttcagcactggaaacattcgatgatgctcgaatggcttggacttggtgtgggatcctttacacagtccgtctcgcctgcggggcccgaaaacaccgcccaggccgagggagacgaagaagaagaaggagaggaggagagctcattgatcgagattgcagaagaggcagacctcattcaggctgatagagtgatcgaggaggaagaagtcgttcggccccagagacgaaagaaagaggagtctggcgcagatcaggaactggctaagatgctgctcgctatgagacttgaccactgcggaaccggaactgccgctggccaggaacaggctacaggcgagtggcagactcaacgtaatcagaagaaaaaaatgaaaaaaagagtgaaggatgaactgaggaagctgaacacaatgactgccgccgaggcgaacgagatagaggacgtatggcagctggatttaagcagcagatggcagctgtaccgattgtggctgcaactgtaccaggccgataccagaagaaaaatcctgagttatgagcggcaatatcgaacttctgcagaacggatggccgaactgcgccttcaagaggatctgcatatcctgaaagatgcccaggtagttggcatgaccacaactggggccgccaagtaccggcaaatcctgcagaaagtagagccacggattgtcatcgtcgaggaagccgctgaggtgcttgaagcccatacgatcgccactctaagtaaagcctgccaacacctgatacttataggggatcaccaacagcttagaccatccgccaatgtatatgatctggcaaaaaatttcaatctggaggtgagcctgttcgaaaggctggttaaggtgaacatcccctttgtccggctgaattaccagcatagaatgtgcccggaaattgccagattactcaccccacatatctaccaggacctggaaaatcacccttccgtgctgaagtacgagaaaattaaaggcgtgtcgagtaacttgttttttgttgaacacaactttcctgaacaggagatccaggaaggcaagagccaccaaaaccagcacgaggcccactttgtcgtagaactgtgcaaatacttcctctgccaggaatatctaccaagtcagatcactattctgacgacatacactgggcagctcttttgtttgagaaaactgatgccagctaaaaccttcgcaggcgttagggtgcatgtcgtggacaagtatcaaggggaggaaaacgacattattctgctttcccttgtgcgatcaaaccaagagggaaaggtgggctttctgcagatctccaatagaatctgcgtagctctcagccgcgctaaaaaaggcatgtactgcataggaaacatgcaaatgctggccaaagttcctctatggagtaagatcatacacactttgagggagaacaaccagattggaccaatgctcagactttgttgtcaaaatcaccctgaaactcacacactggttagcaaggcctccgatttccaaaaagtgccggaaggagggtgcagtttgccatgcgaatttaggttgggatgcgggcacgtgtgtacaagggcctgtcacccttatgattcctcccacaaagagtttcagtgcatgaaaccttgccagaaagtgatctgccaggaagggcatcgttgtcccctggtatgttttcaggaatgccagccctgtcaggtgaaagtgcccaagacaattccccgctgcgggcacgaacagatggtgccctgttctgtacccgaaagcgacttttgctgccaagagccgtgctctaagtcattaaggtgcgggcatcgctgttcccacccttgtggggaagactgtgtgcaactgtgcagcgagatggtgaccataaagctgaagtgtgggcattcacagcccgtgaaatgtggacacgtggaggggctgctgtatggaggattactggtgaaatgcaccacgaaatgcggcactattctggactgtggtcatccttgccccgggtcatgtcattcatgctttgagggtagattccacgaacgttgtcaacaaccatgcaaacgcctgctaatttgcagtcacaaatgccaggaaccttgtattggtgagtgcccaccttgccaacgtacctgccaaaatcggtgcgtacacagccaatgcaaaaagaaatgcggcgagctgtgttccccctgtgtggagccgtgcgtatggaggtgtcagcattaccagtgtaccaagctatgctcagagccatgcaatcgccctccctgctacgtaccatgcacaaaacttttggtttgtggccatccctgtataggcctctgtggggaaccatgtccgaagaagtgcagaatctgtcacatggatgaggtcacccagatttttttcgggttcgaggacgaacccgacgcgcggtttgtgcagctcgaggactgtagtcatatttttgaggtgcaggcactggatagatacatgaacgaacagaaagatgatgaggttgctattaggctgaaggtttgccccatctgccaggtgcctatccgtaagaatcttcgctatggcacttctataaaacagcgtttagaagaaatcgaaataatcaaggagaagatacaggggagcgcaggggagattgccacatcccaggagaggctaaaagctctgttggaaagaaaatcactgctccaccagttgcttcccgaggattttctgatgctgaaggaaaagctcgctcagaagaacctgagcgtcaaagatcttggactcgttgagaattatattagtttctacgaccatttggcttccctgtgggattcactgaagaagatgcacgttctagaggagaaaagagtccggacccggctggagcaggtacacgaatggttagcgaagaagaggctttctttcacatctcaggagctttccgatcttcgctcagagatacagcggctcacttacctcgtcaacctgcttacacggtacaagatcgctgaaaagaaagtcaaagattccattgccgtagaggtgtactccgtgcagaacattttagagaaaacctgcaagttcacacaggaggacgagcagctggtgcaagaaaagatggaagcactcaaagccaccctcccctgttcaggtctgggtatcagcgaggaagaaagagtacagatcgtcagcgccatcggatatcccagaggacactggtttaagtgtcgcaacggccacatttatgtgatcggcgattgtggtggggcaatggagcgcggcacttgccctgactgtaaggaggtcatcgggggtacaaaccatactctggagaggagcaatcagctggccagtgagatggacggtgcacagcatgctgcttggagcgatacggcaaataatcttatgaactttgaggaaatccaaggtatgatgtag

SEQ ID NO: 207249 - DNA, 3813 bp, Artificial Sequence
  derived and/or modified sequence
atggaggagcggcggccccacctggacgcccggccccggaacagccatacaaaccatcggggccctgttgacggcgagctgcctcctagggcgaggaaccaagccaataatccacccgccaatgctctacgtggtggcgcatcacaccctggacggcacccacgcgcaaacaatcaccctgcagcatactggcaaagagaagagcggttccgagccatgggccggaaccctcatcagggcaggaggaaccaggaaggacatgcctcagacgaagcaagagatcaacggcacgatcaggaaaatgatacccggtggcggaatggaaaccaggactgcagaaaccgccgtcccccctggtctaacgataacttccagcagtggaggaccccgcaccaaaagcccacggagcagcctcagcaagcaaagaagctggggtataaattcctggaaagcctgctgcaaaaagacccatccgaggtggtgatcaccctggctaccagtctgggtttgaaagaattactttcccatagctccatgaaatccaactttctggagctgatctgtcaggtgttacgtaaggcttgttcaagcaagatggataggcagtccgtactacacgtcctcggtatattaaagaactccaaatttctgaaggtatgcttgcctgcttatgtggttgggatgattacggagccgatcccagatattcgtaaccagtatcccgagcacatcagtaatatcatttctctcctgcaggatttggtgtctgtttttccggcatcatcagtacaagagacatcaatgcttgtctctctactgccaacaagtctcaacgcgttgcgggcttccggcgtggacatcgaggaagagacggaaaaaaacctggagaaagtccagacaataatagagcacttgcaggagaaacggcgggaggggaccctccgcgtggacacctacaccttggtgcagccagaagccgaagaccatgttgaaagttaccggactatgcctatttatcctacttacaacgaagtgcatctggacgagagaccgttccttcggcctaatattatatccggcaaatacgacagtactgcgatctacctcgacacacacttcaggctgctccgagaagacttcgtgcgcccactacgggagggtattctggagttgcttcagtcttttgaagatcaggggctgcgtaagagaaagtttgacgacatcaggatttactttgacactcgaatcatcacgccgatgtgttctagcagtggcatcgtgtacaaagtgcagttcgatactaagcccctaaagtttgtaaggtggcaaaattccaagcgccttctgtacggttccctagtatgtatgtctaaagataatttcgaaacatttctgttcgcaaccgtcagcaaccgtgagcaggaggatctttgtagaggaattgtgcaattgtgcttcaatgaacagtcccagcagctgctggctgaggtgcagccttctgactctttcctgatggtggagaccaccgcatacttcgaagcctacagacacgtgctcgagggtctgcaggaggtgcaggaagaagacgtgccattccagcgaaacatcgtagaatgtaactcccatgtgaaggaacctcgctacctacttatggggggaaggtatgacttcactcctctgatagaaaatccatccgccaccggagagttcctgaggaatgtggagggtctacgccatccaaggattaacgtgcttgaccccggccaatggcccagcaaggaagcactgaaactggacgattcacagatggaagcgctacagttcgcactgacccgagagctggcaattattcaaggtcctccaggaactgggaaaacgtacgtcggtctcaaaatcgtgcaggcgctgcttacaaatgaatctgtttggcagatctccttacagaaatttccaattctggttgtttgctacacaaatcacgcgctggatcagttcctagagggtatttacaactgtcagaagaccagtattgtcagagttggggggagatcaaatagcgaaattctgaagcagttcacactgagggaactgagaaataagagagagtttcggcgcaatcttccgatgcatctccgtcgcgcctacatgagcatcatgacccaaatgaaagagtctgaacaggagctccatgagggtgcaaaaacactggagtgcactatgagaggcgtgttgcgggagcagtatctgcagaagtatatctcaccacaacactgggaaagccttatgaatggtccagtgcaagactccgagtggatctgttttcagcactggaagcactcaatgatgctggagtggcttggcttgggagttggaagcttcacccagagcgtcagtccagccggccctgagaacactgctcaggctgaaggtgacgaggaggaagaaggcgaagaggagagttctctgatcgaaatcgccgaggaagccgatctcattcaggccgaccgcgtcatcgaagaggaagaagtcgtcaggccacagcgccggaagaaagaagagagcggcgccgatcaggagcttgcaaaaatgctcctcgcgatgcgtctagatcactgcggcacaggaactgccgccggtcaagagcaggcaaccggggagtggcagactcagaggaaccagaaaaaaaagatgaagaagcgcgttaaagatgagttgcgcaaactcaacaccatgacagcagccgaagccaatgaaattgaagatgtgtggcagcttgacctgtctagccgctggcaactgtataggctgtggttgcaactttatcaggccgacacccggcgtaaaatcctcagttatgagcggcaataccgaacctccgcagaacgtatggcggagctgcgtctgcaggaggatcttcatatactgaaggatgctcaggtggttgggatgaccacaacaggcgcagccaagtatcgccagattctccagaaggtggagccaagaattgtcattgtggaggaggctgccgaagttctggaggctcatacgatcgccacgctgtcgaaagcctgccagcatctgatcctgatcggcgatcaccagcagctccggccatccgccaacgtatatgacttggccaagaattttaaccttgaggtgtcactgtttgaacggcttgtgaaggtcaacatcccatttgtgagattgaactaccaacatcggatgtgtcccgagatcgcccggcttctaacaccccacatctatcaggatttggaaaaccacccatctgtcttaaagtacgaaaagatcaaagccaagagcaactcatgccgggcgcttgctacaggcatgcgtaggaaacacaagatttctggcatgattctgtcattctttaagctgactatccgctctgcccggtttcagctgttgctgagcggatcttggacaactgccagctttcctttttctagaagtagatttgctgtgctgatctgtcgcgacaacaaacggatgcccgctgtgaagcccgtgtccacgaatactgggtctcatgggcttcagatgccaggagctctcatgggggagacttttcaaaaaggtagtacatcacgggacgccgctgcatgcctgctcagcagcctggttaataagataccaccccgcagtttgacgtgggcctctgactgctgcattagcttctccagtgcatcctcatgccgcacagcttacaccagcttttccatcttttcaattctttctagaaatttaaggatgacctctcagtgggaaaagataaagcgtatctacaaatag

SEQ ID NO: 207250 - DNA, 5757 bp, Artificial Sequence
  derived and/or modified sequence
atggaggagcggcggccccacctggacgcccggccccggaacagccatacgaaccataggggacccgtcgatggagaactgcctccccgtgccaggaaccaggcaaacaaccctccggccaacgcgctccgaggcggcgccagccatccgggcaggcaccctcgcgccaacaaccatcccgccgcctattggcagcgagaagaacggtttagggctatgggccggaatccccaccagggccgacgcaaccaggaaggacacgcgtcagatgaagcgcgtgaccagcgccacgaccaggaaaacgacacccgatggcgcaacggcaatcaggattgccgtaacagacggcccccctggtcaaatgataattttcaacagtggcgcaccccccaccagaagcccacagagcaaccacagcaggcaaagaaattgggctacaagttcctcgagtccctgctgcagaaggatccttccgaggtggtgatcactcttgcaacaagtcttggcctaaaagagctgctctcacactcatccatgaagagcaatttcctggaactgatttgtcaagtgttgcggaaggcctgctccagcaaaatggacaggcagagcgtcttgcatgtgttggggatactcaagaacagcaaattcctaaaggtctgtctcccagcatacgtcgtcggaatgatcaccgagcctattcccgatatccggaaccagtaccctgagcacattagcaacattatcagtctgttgcaagatctggtgagcgtcttcccagcttcctccgttcaggaaacatccatgctggtgagcttgctgccaacctccctgaatgcccttagagcatctggggttgatatcgaggaggagactgagaagaatcttgagaaggttcagactatcattgagcacctccaagagaagagaagagagggcaccttaagggttgacacctataccctggtgcaacctgaagcggaggaccacgtggagagctaccgtacgatgccaatctacccgacttacaacgaagtacacctggacgaaaggccgtttctgaggcccaatatcatatctggcaagtacgacagtacagccatttatttggatacccacttccgcttactccgtgaagactttgtccggccactcagagagggtatcttggagctgttgcagtcctttgaggaccagggactgagaaaaaggaaatttgatgatatcaggatttacttcgacacacgaatcatcacaccgatgtgctcttcatcaggcattgtgtataaagttcagtttgacactaaaccactcaagttcgtgcgttggcagaacagcaaaagactcctgtacggatcccttgtttgtatgagcaaggataactttgagaccttcctcttcgcaaccgtgtccaatagggagcaggaggatctatgccggggcattgtgcagctgtgctttaatgagcagtcccagcaactcctggccgaagtgcagccctctgactcattcctcatggtagaaactacagcctacttcgaggcctacaggcacgtgctggaagggctccaagaggtacaggaggaagatgttcctttccaacgtaacattgtagaatgcaactcccacgtaaaggaaccacgatatctcctgatgggaggacgttacgatttcactccgctgatcgagaacccctccgccacaggcgaatttttacgcaatgtcgaagggctgcggcatccacgtattaacgtactggatcccggccagtggccttctaaggaggctctcaaactagacgacagccaaatggaggcccttcaatttgctctaacccgcgaacttgcaataatacagggacctcccggaaccggaaagacttacgtgggactcaaaattgtccaggccttgctcactaatgaaagtgtatggcagatctccctgcaaaagtttcctatcctggtcgtttgttacactaatcacgcattggaccagttcctggaaggaatttacaattgtcagaagacctcaatcgtgagggttggcggaaggtccaattccgaaatacttaagcagtttaccctgagagagctgcgtaacaaaagagagtttaggcgcaacctgccaatgcatctgagaagggcatacatgagtatcatgacccagatgaaggagagcgagcaggagctgcacgagggagccaagacacttgaatgtacaatgagaggtgtgctcagagaacagtatctccagaagtatatcagcccgcagcactgggaatccttaatgaacggccctgtccaggattcggagtggatctgctttcagcactggaagcactccatgatgttagaatggctggggctgggcgttgggtcattcacccagagcgtgtcacccgccgggcctgagaatacagctcaggcagaaggcgatgaagaagaggagggcgaagaggaatcctcattaatcgagatcgcggaggaggctgacctgattcaggcggatagggtaatcgaggaggaggaggttgttcggccccagaggcgcaagaaagaagagagcggggccgaccaggaattggccaagatgctgttggccatgcggctagaccattgtggaaccggcacggctgcggggcaagagcaagctacgggcgagtggcagacacagcggaatcaaaagaagaaaatgaagaagcgggtgaaggacgagttgcggaagttgaacactatgacagcagcggaggcaaatgagatagaagacgtctggcaactagacctttccagtcgatggcagctctataggctgtggctacaactgtatcaggctgatacacggcggaaaatcctgtcctacgaacggcagtataggacgagtgccgaacggatggccgagctgcggctgcaggaagacctgcacatcttgaaggacgctcaggtggttggaatgactaccacaggcgccgctaagtatagacagatcttacagaaggttgaaccgaggatcgtgatcgtcgaagaagctgccgaagtgctggaggcccataccatagcgactctctcgaaggcatgtcagcacctgatcttgatcggagatcaccagcagttgcggccctccgcaaatgtgtatgacctcgcaaagaattttaatcttgaggtcagcctattcgaacgactcgtgaaagtgaacatcccctttgtgcgtctgaattaccagcaccggatgtgccctgaaatcgcacggctgctaacccctcatatttaccaggatctggaaaaccaccctagtgtactcaagtacgagaaaatcaaaggtgtatcaagcaatctgttttttgttgagcacaactttcccgagcaggaaattcaggagggcaaatcccatcaaaatcagcacgaagcccatttcgttgtcgagctatgtaaatattttctttgtcaagaatacctccctagccaaattactattctcactacttacacaggccagctcttctgcctacggaaacttatgcctgctaagaccttcgccggcgtccgtgtacacgtggtggacaagtaccagggggaagaaaacgacatcatactccttagtctagtgcgatcaaatcaggaagggaaagttggtttcctacagatttccaaccggatctgtgtcgcattaagtagggctaagaaaggcatgtattgcatagggaatatgcagatgctcgcgaaagtgcccctttggtcaaagatcatacacaccttacgagaaaacaaccagatcggccccatgctgagattgtgctgtcaaaaccatcctgagactcacacgttggtgtccaaagcgtcagattttcagaaggttccagaaggcggctgcagcctgccatgcgagtttagactgggatgtgggcacgtttgcactcgtgcatgccacccttacgatagtagccataaggagttccagtgcatgaagccatgtcagaaggtgatttgccaagaggggcacaggtgccccctcgtgtgttttcaagagtgtcagccctgtcaagtcaaggtgccaaagacgatcccacgatgcggtcatgagcagatggtgccgtgctcagttcctgagagcgatttctgttgtcaggagccctgctccaaaagtctgagatgtggccaccgttgcagccatccatgtggtgaagactgtgtgcagctgtgttctgagatggtaaccatcaagctaaagtgtggtcatagccaacctgtaaaatgcggacacgtggagggtctgctgtacggtggactgctcgtaaaatgtacaacgaagtgcggcaccattttagactgtggccacccttgtcccgggtcgtgtcactcttgctttgaaggaaggttccacgaacggtgccagcagccctgcaagaggcttctgatctgctctcataagtgccaggagccctgtataggggaatgcccaccttgccagcgcacctgccagaacaggtgcgtgcactcccagtgcaaaaagaagtgcggggaactgtgttcaccatgcgtggaaccttgcgtctggaggtgccagcattatcagtgcacaaaattgtgctccgaaccttgcaacagacccccctgctacgtgccctgtaccaagctgctcgtatgcgggcacccttgtatcggcctttgcggcgaaccttgtcccaagaaatgcagaatatgccatatggacgaggtcactcagatattttttggctttgaagacgaacctgatgcccgcttcgtgcagcttgaggactgtagccacatcttcgaggtccaagcactggaccggtacatgaatgagcagaaggacgatgaagtcgctatccggttgaaggtctgccctatctgccaagtgccgattagaaagaacttgcgctacggcacctccataaaacagagactcgaggaaattgagattataaaagaaaagattcaagggtctgccggtgagatcgcaacaagccaggagaggctcaaggccttgttagagcgtaaatcgttactgcaccaactacttcctgaggactttttaatgctgaaggagaaactcgcgcagaagaatctgagcgtcaaggacctgggactggtcgagaattatatctcgttttacgaccacttagcctcactctgggattctttaaaaaagatgcatgtcttggaggagaaaagagtccggaccaggttggaacaggtgcatgaatggcttgccaaaaaacgactctcctttacttcccaagagctgtctgatttaagaagtgagatccagcgactgacctatctggtcaatcttctcacacgctacaaaatcgcagaaaagaaagtgaaggacagtatcgcagtcgaggtttattccgtgcagaacatcctggaaaaaacgtgcaaatttacgcaggaggacgaacagctggtccaggaaaagatggaagctttgaaggcaactctgccctgcagtggactgggaatcagtgaggaggagcgggttcaaatcgtgagtgctattggatacccaagggggcattggtttaaatgtcggaacggccacatttacgtgatcggggactgtggcggcgctatggagcggggtacttgccccgactgcaaggaagtcatcggaggaactaaccacacactggagagaagcaaccaattagcctccgagatggacggagcccagcatgccgcttggtcggacacagccaataatctgatgaacttcgaggagatccaggggatgatgtag

SEQ ID NO: 207251 - DNA, 2748 bp, Artificial Sequence
  derived and/or modified sequence
atggaggagcggcggccccacctggacgcccggccccggaacagccacaccaatcaccgagggcctgtcgacggagaactgccgccacgcgccagaaatcaggctaacaaccccccagctaatgcacttaggggcggagctagccacccaggacggcatcctcgagccaacaatcacccagctgcgtactggcaaagagaggagcggttcagggccatgggccgcaatccgcaccagggccggagaaatcaagaggggcatgcctctgatgaggcaagggatcagcggcatgaccaggagaatgatacacggtggaggaacgggaaccaggactgcagaaataggagacccccctggtcaaatgataacttccagcagtggagaacgcctcaccagaaacctacagagcaaccccagcaggccaaaaaactgggatacaaattcctggaatctcttctgcagaaggacccaagcgaggtggtgatcacactcgctaccagcctgggccttaaggagctgttaagccatagttctatgaaatcgaatttcctggaacttatctgccaggttctgaggaaggcttgcagcagcaagatggaccgccagtccgttctgcatgtgcttggcattcttaaaaactctaaattcctgaaggtttgcctgcccgcttacgtggttggaatgattacagagcctataccagacattaggaaccagtatcctgagcacatatccaacatcatctctcttctgcaggatctcgtttcagtattccctgcttcttctgtccaggagacaagtatgttagtgtctctgctgccgactagcttgaatgctctgcgggcctcaggcgtagacatcgaagaagaaacagagaagaatttggaaaaggtacagacaattatcgagcaccttcaggagaagagacgtgaaggaactttgcgggtagacacctataccctcgtccagccggaagccgaggaccatgtggagtcataccggaccatgcccatctaccccacatacaatgaagtgcatctggacgaacgcccctttctccgaccaaacattatttccggtaagtacgactccaccgctatctatcttgacacacacttccgcctccttagggaagactttgtaagaccactaagggaaggcattctagagctcctgcaaagctttgaagatcagggtcttaggaagaggaaatttgacgatatccggatttatttcgatacccgtatcattacacccatgtgctcctcttcaggcattgtgtataaggtgcagtttgacacgaaacctctgaaatttgtacggtggcagaatagtaagcggctgttgtacggaagcctggtgtgcatgtcaaaggacaacttcgagacttttctgttcgcaacagtgtctaatcgggagcaggaagacctctgccggggtatagtccagctgtgcttcaatgagcagtcgcagcagctgctcgccgaggtccagccttctgattcctttctgatggttgagacaaccgcttatttcgaagcttacagacatgtattagaaggactccaggaagtgcaagaagaagatgtaccttttcaaaggaacattgtggaatgcaactctcatgtcaaagagcccagatacctgttgatgggagggcgatacgattttaccccccttatcgaaaatccttccgccaccggtgaattccttcgaaatgtggaagggctccggcatccgagaattaatgtcctcgatcccgggcagtggcctagtaaggaggctcttaagttggatgacagccagatggaggctctgcagttcgccctcactagagagctggctattatacagggaccccccggaaccggtaagacatacgtaggcctgaaaattgtgcaggctctgctgaccaacgagtccgtatggcaaatttccctgcaaaagttccctatcctcgtcgtttgctataccaatcatgcactggatcagtttctagagggaatctacaactgccaaaaaacttctatcgtaagagtcggagggcgtagtaactccgagattctaaagcagttcacgttaagagagcttcgtaacaaacgagaatttcgcaggaatcttcctatgcacctgcgtagggcttacatgtcgataatgacccagatgaaggaaagcgagcaggagcttcacgagggagccaaaactttagagtgcacgatgaggggtgtcctgcgtgaacagtatcttcagaaatacatcagtccccaacactgggagtcgcttatgaacgggccagtgcaggactctgagtggatctgtttccaacattggaaacatagtatgatgttagagtggctcggcctcggtgtaggcagctttacccagtctgtgagccccgctgggcctgaaaatactgcgcaagctgagggagatgaggaggaggaaggagaagaagaaagtagtctgatagagatagcagaggaggcggatctcattcaggcagatagggtaatcgaggaggaagaagttgtaaggcctcagagaaggaaaaaagaagaaagcggggccgatcaggagctcgccaaaatgctgttggctatgaggttggaccactgtggaacaggcaccgccgccggccaggagcaggcaactggagaatggcagacgcagcggaaccaaaaaaagaaaatgaagaagcgcgaaaaggaggagaaaaaagagagagagaaacgccggaaaaagaaatag

SEQ ID NO: 207252 - DNA, 2124 bp, Artificial Sequence
  derived and/or modified sequence
agcaagatggaccggcagagcgtgctgcacgtgctgggcatcctgaaaaactctaaattcctgaaggtctgcctccctgcttatgtggtgggaatgatcacagaaccaatccccgacatcaggaaccaataccccgagcacatcagtaatattataagtttgctccaggatctggtcagcgtgtttcctgcgagtagtgtgcaggaaaccagtatgttggtcagtctcctgcctacctcactgaatgcattacgagcaagcggagtcgatatcgaggaagagaccgagaagaacctggagaaagtccaaacaattatcgagcacctgcaggagaaacggcgggaggggaccctaagggtcgacacctacaccttggtacagcctgaagccgaggaccacgtcgagagttatcgaacgatgccaatttaccccacatataatgaggtccacctggatgaaagaccctttctgcgaccaaatattataagcggtaagtacgactcaacagccatttacttggacacacacttcaggcttttgagagaagatttcgtgagacccttgcgtgaaggaatcctggagctgcttcaatcgttcgaggatcagggcctgcggaaacgaaagtttgacgacattaggatctactttgataccaggatcattacaccaatgtgcagctcttcaggcatcgtgtacaaagtccagtttgacacaaagccacttaagtttgtccggtggcaaaactctaaacggctcctgtacggttctcttgtctgtatgtctaaagacaattttgagacttttctgttcgcaactgtctccaatagggagcaggaggatctgtgtcggggcattgttcaactctgcttcaatgaacagtcgcagcagctcttagctgaagtgcagccatccgattctttcttgatggtggagacaaccgcgtactttgaagcttacaggcacgtgttagagggactccaggaggtgcaggaagaggacgtgccatttcagcggaacattgttgagtgcaactctcacgtgaaggagcctagatacctcctgatggggggtaggtacgatttcacgcctctgatcgagaacccctccgccacaggggagttccttcggaatgtcgaaggcctgcgccatccacgcattaacgtcttggaccccggccagtggccatccaaggaagcactgaagctcgacgattcgcagatggaggcactgcaatttgctcttacccgggaacttgcaattatccaggggccccctggcactggtaagacatacgttggactgaaaatcgtccaggcccttctgacaaatgagtctgtctggcagatctcactgcaaaagttccctattctagtggtatgctatactaaccacgcgctggaccagttccttgagggcatctacaactgtcaaaagacatcaatagtgagagtgggaggaaggtccaactctgagatccttaagcagttcacactcagagagttgaggaataaacgagagttccgaaggaaccttccaatgcacctgcgccgggcctacatgtccatcatgacccagatgaaggaatccgaacaagaattgcatgagggcgcaaagactctggagtgcactatgcgaggggtccttagagagcagtatctgcaaaagtacatcagcccccagcattgggagtctctcatgaacggaccagtgcaggatagcgagtggatctgtttccagcactggaaacactcaatgatgctggaatggcttgggctgggcgtaggatcattcacgcagtcagtgtctcccgcgggccctgagaacacagcccaggccgaaggtgatgaggaggaggaaggggaagaagagagttcgctgatagagattgctgaagaggctgatctcattcaagcagatcgtgttatcgaggaggaggaagttgtccggccccagagaagaaagaaagaagaaagtggtgctgaccaggagcttgccaagatgcttctggccatgagactggaccactgcggcaccggaacggcagcagggcaagagcaggccacaggcgaatggcagaccgtgccctgcctggtattgatgagcgctgacccagcacagccctag

SEQ ID NO: 207253 - DNA, 2805 bp, Artificial Sequence
  derived and/or modified sequence
atggaggagcgaagaccccacctggatgcgagacccagaaactctcacaccaatcataggggaccagtggacggggaactgccccctcgggcacgaaatcaggcaaataaccctccagcaaacgctctccgtggaggggctagccacccaggccgacaccccagagcgaacaatcacccagctgcttactggcagagggaagagaggttccgcgctatgggtaggaaccctcaccaggggaggcggaaccaagagggtcacgcttcagacgaggccagagatcagcgccatgatcaagaaaacgatactcgttggcgcaatggcaatcaggactgccgcaatcgtcgcccaccttggagcaacgataatttccagcagtggcgtactccgcaccagaagccgacagagcagccacagcaggcaaaaaagttgggctacaaatttctggagtcgttgctgcagaaggatccttccgaggtggtgataactctcgcgacatccctggggctgaaagagcttttatcccacagcagcatgaagagcaactttttggaactgatatgtcaggtgctgaggaaagcctgcagctccaaaatggatagacagagtgtcttgcacgtgcttgggattctcaagaatagtaaatttctgaaggtctgcctccctgcctatgtagtgggaatgatcacggaacccatccctgacatccgcaaccagtatccagagcacatctctaatattatcagtctgctgcaggatttggtctccgtgttccccgcttcctcagttcaggaaacttctatgctggtgtccctgctgcccacttcgctaaatgcgctgcgggcttctggagtggatattgaagaggagacagagaagaatctggaaaaagtgcagactattattgagcatctgcaggagaaaagaagggagggaaccctgcgcgtggacacttatacactcgttcagcctgaagctgaagaccacgtggagagttatagaactatgcccatctatccgacctataacgaagtgcatttagacgagcgaccattccttagaccgaacattatttccgggaagtacgactcaacggcgatttacttggatacacattttagacttctgagggaagatttcgttcgaccgctgcgcgaaggcatcctcgagctacttcaaagctttgaggatcagggtttgcgcaagcggaaattcgacgacattcgcatttattttgatactaggatcatcacgccaatgtgctctagctcaggcatagtgtataaagtacaattcgatacaaagccattgaagtttgtacggtggcagaattcaaaaaggctgctgtacggctctctggtatgcatgagcaaagacaatttcgagacttttctcttcgccaccgtctcaaaccgagagcaggaggatctgtgcagaggcatcgtgcagctttgctttaacgagcaaagtcaacagctgttggccgaggtgcagcccagcgacagcttcctgatggttgaaactaccgcatacttcgaggcttacagacacgtgctggagggcctgcaagaggtgcaggaggaggacgtgccttttcagcgaaacatcgttgagtgcaactctcacgtaaaggaacctcgttatcttctgatgggagggcgttacgattttaccccacttatcgagaaccccagcgcgacaggagagtttctacggaacgtggaaggactgaggcatccacggatcaacgtattagacccgggtcagtggcccagtaaggaggctcttaagctcgatgactcccaaatggaggctctgcaattcgccctgactcgtgagctggcaattatacagggtccccctggcacaggcaagacgtatgtggggctgaagatcgttcaggcgctattgacgaacgaatctgtttggcagatcagcctgcagaagttcccgatactggtggtttgctatacgaatcatgcattggaccaattcctggaagggatctataactgtcaaaagacaagcatcgtgcgggtagggggacgatcgaactccgaaattctgaaacaattcactcttcgggaactgcgtaacaaaagagagtttcgaagaaatctgcctatgcatctgagacgcgcatacatgtcaattatgacacagatgaaggagtcagaacaggagttgcatgaaggagctaagacactggagtgcacaatgaggggcgttctgcgcgaacagtatttgcagaaatatatttccccgcaacattgggaatctctaatgaacggacccgtgcaggactctgaatggatctgtttccagcactggaaacactcgatgatgcttgaatggctcgggctaggcgttggttctttcacacagtcagtgtctccagccggtccagagaatacagcgcaggctgagggggatgaagaggaagaaggcgaagaggagtcttcactgatagagatcgctgaagaagccgatctaatacaggcggatagggtgatcgaagaggaagaggtcgttcggcctcagcgcagaaagaaggaggagtcaggagctgaccaagaactcgctaagatgctgctcgctatgcgtctggatcattgtggcaccggcacagccgctgggcaggaacaggcgacaggagaatggcagacgcagcgtaatcagaaaaaaaaaatgaaaaagagggtaaaagatgagctcaggaaattaaacactatgaccgccgcagaagccaatgaaatcgaagatgtctggcagctagatctgagtagcagatggcaactatattag

SEQ ID NO: 207254 - DNA, 5756 bp, Artificial Sequence
  derived and/or modified sequence
atggaagagcgacgaccacacctggacgctcgccctcgcaattctcatactaatcaccgcggacccgtggatggggaactgccccctagagcccgtaatcaggccaacaatcctcctgctaatgcgctacggggtggagcatcccaccccggtcgccaccctcgcgcaaataatcaccccgcagcttattggcaacgggaggaacgtttccgggctatgggcaggaaccctcaccagggaagaagaaatcaagagggccacgctagcgacgaggcccgtgaccagcgccatgatcaggaaaacgacaccaggtggagaaatgggaaccaggactgcagaaaccgaaggccaccttggtccaacgataactttcagcagtggaggacaccgcatcaaaagcccacagaacagccacagcaggcaaagaagctgggatacaagtttcttgagagtctactgcagaaggatccgagcgaggtggtcatcacattggctacatcgctgggcctcaaggagctcttgagtcacagcagcatgaaaagtaacttcctggagctcatctgccaagtccttagaaaagcgtgtagcagtaagatggatcggcagtctgtgctgcatgtccttggtatcttaaagaattcgaaattcctgaaagtgtgcctcccagcgtatgtggtggggatgataactgaaccgatcccagacattagaaatcagtaccccgagcacatctcaaacatcatctccctgctacaggacctggtgtctgtgtttccagcgagtagtgtacaagaaacaagtatgttggtaagtttgctcccaacaagcctaaatgcattacgggcttctggcgtggacattgaggaagagacagaaaagaacctcgagaaagtccagactattatagagcacctccaggagaagagacgagaggggacgctgcgggtcgacacttataccctggttcagcccgaggccgaagaccacgtggaaagctatcgaaccatgccgatctacccaacctataacgaggtgcaccttgacgagcgccctttcttgaggccaaatatcatcagtggtaaatacgactcaaccgccatctatctggatactcattttcgactgctacgagaagattttgtgagacctctgagagagggcatcttagaactcctccaaagcttcgaagatcagggcttgcggaagcgcaaattcgatgatatcaggatatactttgatacaagaataatcacacccatgtgctcctcttccggaatcgtctataaagttcagttcgatacaaagccccttaaattcgtgcgatggcaaaacagcaagaggcttttatacggatcattggtgtgtatgtctaaagataatttcgaaacctttctctttgcgacagttagcaaccgtgagcaggaggacctgtgccggggtatcgtccagctttgctttaatgagcagtctcaacagctgctcgctgaggttcaaccttccgatagcttcctgatggtcgagacgactgcatacttcgaggcctaccgtcatgtgctcgagggcctccaagaagtgcaggaggaagacgttcccttccagagaaatatcgtggaatgtaactcccacgtgaaggaacctagatacttactgatgggcggaaggtatgattttacgcctctcattgagaacccgtcagcaactggagagttccttcgcaacgtggaaggtcttcggcatccgaggattaacgtgctggatcccggtcagtggccatctaaggaggccttgaagttagacgatagtcaaatggaggccctgcaatttgcactcactagggagctcgccattatccaaggaccacctggtactggtaaaacttatgtgggtctgaaaattgttcaggccctgctaactaacgagtcagtctggcagatcagcctccagaagttcccgatactcgtggtatgttataccaatcacgccctggaccagttcttggaggggatttacaactgtcagaaaactagcattgtacgggtcggtggaagaagcaactccgaaattctgaaacagttcaccctgagggagctgaggaataagcgggagtttcgaaggaatctaccaatgcacttgcggcgagcctacatgagcataatgactcagatgaaagagagtgagcaggagctccatgaaggggctaaaactcttgagtgtacaatgcggggtgtcttgcgggagcaatacctccagaaatacatctccccccagcactgggagtcccttatgaatggtcccgtgcaggacagcgagtggatttgttttcagcattggaagcactccatgatgctggagtggctcggcctcggcgtcggttctttcactcagtccgtgtcccctgcaggcccagaaaacaccgcccaggccgagggcgatgaagaagaagagggagaggaggagagctcacttatagagatcgccgaggaggcggacctgatccaagctgaccgggttatcgaggaagaggaggtcgtgagacctcagagaaggaaaaaggaggaatcaggggcagaccaagagctggcaaagatgctcctggccatgagactggaccattgtggaacagggacagctgcagggcaagagcaggccaccggagagtggcaaacacagaggaatcagaagaaaaaaatgaaaaagcgtgtgaaagacgagctgagaaaactgaacacaatgactgccgcagaagcaaatgaaattgaagacgtgtggcagctggatctgtcgtcacggtggcagctctatcgcctatggctacaactgtatcaggctgatactaggcggaaaatcctatcatacgagcggcagtatcgaaccagcgcagagaggatggctgaactgagactgcaggaagacctccacatcctgaaggacgctcaggtggtcggcatgaccacaaccggggctgcaaagtatcgccagattctgcagaaggtggagccccgtatcgtgatcgttgaagaggcggcagaagtgttagaagcccacaccatagcaaccttgagcaaggcttgtcagcatcttatactgattggagaccatcaacagctgcgcccatccgccaatgtgtacgacctggctaaaaacttcaacttagaggtgagcctgttcgaaagactcgtcaaggttaatattccttttgtgaggctgaactatcaacatcgcatgtgtccagaaattgccagactgctcacccctcatatctatcaagacttagaaaatcacccatctgtactaaaatatgagaaaattaaaggcgtatcgagtaacctgttctttgtggaacacaatttcccggagcaagaaatacaagaaggcaagagtcaccagaatcagcacgaggcccatttcgtggtggaactctgcaagtacttcctctgtcaagaatacttgccttctcagatcaccatactcactacttatacaggtcagctattttgcctgagaaaactgatgccggcaaaaacttttgccggagtaagggtccatgtcgtagacaagtaccagggcgaggaaaacgacatcatcctgctctctctagtccgctcaaatcaggaggggaaggttggctttctgcaaattagcaatcggatctgcgttgcgctctctcgcgcaaagaaagggatgtactgtatcgggaacatgcagatgctcgcgaaggtccctctgtggagtaagattattcacacattgcgcgagaataatcagatcggtcccatgctgcgcctttgttgtcaaaaccacccagagactcataccctcgtgtcgaaagccagtgacttccaaaaggtgcctgagggcggttgctcattaccctgcgaatttaggctgggctgtggccacgtctgtaccagagcttgtcacccatacgattcttcccacaaagaattccagtgcatgaaaccctgtcaaaaggtcatctgtcaggaaggtcacagatgtccacttgtgtgtttccaggagtgtcagccatgccaggtcaaagtgcctaagactataccgcgatgtgggcatgaacagatggtgccctgtagcgtgccagaatctgacttctgctgccaggaaccttgcagcaagtccctgaggtgcggccaccggtgcagccacccttgcggagaagattgcgtacagttatgttccgagatggtcactattaagcttaagtgcggtcactctcaacccgtgaaatgtggtcatgtggagggacttttgtacgggggactcttggttaagtgcactacaaagtgcggcactatcttagattgtgggcacccctgccccggtagctgccactcctgctttgaaggcaggttccatgagagatgccaacaaccctgtaagcggctactgatttgttcacataagtgtcaggaaccatgcattggggagtgtcctccatgtcagcgcacgtgtcagaacaggtgcgtccacagtcaatgtaaaaaaaaatgcggtgagctctgttctccttgcgtcgagccatgcgtctggcgctgccagcattatcagtgcactaaattgtgttccgagccctgcaataggcccccttgctacgtcccgtgcaccaagcttctggtgtgtggtcacccgtgtatcgggctctgtggcgagccctgtcctaaaaaatgtcgtatctgccatatggatgaagtgacacagatcttctttgggtttgaggatgaaccggatgcgaggtttgtccaactcgaggactgttctcacattttcgaggtgcaggccctagatcggtacatgaacgagcaaaaagatgacgaggtagctattcgcctgaaggtgtgtcccatttgccaggttcccatcaggaaaaacctaaggtacggcacttctatcaaacagaggctagaggagatcgagataatcaaggagaagattcagggtagtgcaggtgaaattgccacatcacaggagcgcctgaaggctctgttggagaggaagagcctactccatcagctgcttcccgaggatttcctgatgcttaaggaaaagttggcccagaaaaacctctccgtgaaggacctgggactggtcgagaattatattagtttctacgaccacctggcttctctgtgggactctctcaagaagatgcatgtgctggaagaaaagcgcgttcgcacccgcttggaacaggtgcatgaatggctggccaagaaacggctgtcattcacgtcacaggaactaagtgatttgcgcagcgagattcagcgacttacttacctcgtcaacctcctgacccgctataagatcgccgagaaaaaagtcaaggattcaattgccgtcgaagtgtacagcgtgcagaatatcctggagaaaacttgcaagttcacccaggaggacgagcaactggtgcaggaaaaaatggaggcgttaaaggcgacactcccatgctccggcttaggcatctccgaggaagagagagtgcagatcgtgagtgcgatcggataccccagagggcactggttcaaatgtaggaacggacacatatatgttatcggtgactgcggcggagcgatggaacggggaacatgccccgattgcaaggaagtcattggaggaacgaatcatactctcgagcgtagtaatcaactggccagtgaaatggatggggctcagcatgctgcatggagtgacactgccaacaacctcatgaacttcgaggagatccagggcatgatgta

SEQ ID NO: 207255 - DNA, 3813 bp, Artificial Sequence
  derived and/or modified sequence
atggaagagagacggccacatcttgacgccaggccacgaaattctcatacaaatcaccgtggccctgtggatggtgaactcccaccaagagccagaaaccaggcaaacaacccaccagctaacgctcttaggggcggtgcttcccacccaggccgacaccctcgggctaacaaccaccctgctgcctactggcagcgcgaggaacgattccgcgcaatggggagaaatccacaccagggcaggaggaaccaggaaggacatgccagcgacgaagccagagaccagagacacgatcaggagaacgatacccgatggagaaacgggaatcaggactgtaggaacaggcgtccaccctggagcaacgacaattttcaacagtggcgcactcctcaccagaagccaaccgaacagccccaacaggcaaagaaacttggctacaagtttcttgagtccttgcttcagaaggacccatccgaggttgtaataaccctggctacctccctgggtcttaaggagcttctcagtcattcctctatgaagtccaattttctggagctgatttgccaggtccttagaaaggcatgctccagtaaaatggaccggcagagcgtcttacatgtgctggggatcttgaaaaactcaaagtttctgaaagtgtgtctgccagcttacgttgtcggcatgataactgagcctatccctgatatccggaatcagtaccctgagcacattagcaatattatctctttactacaggatctggtgtcagtgttccctgcctcatcagtgcaggagacgtccatgttggtgagcctcctccctacgagcctcaatgcccttcgagcctcaggagtcgacattgaagaggaaacagagaagaacctggaaaaggtccaaactatcattgagcacctgcaggagaaacggagggaggggacactgcgtgtggacacctatacactggtgcagcctgaggctgaggatcatgttgaatcttaccggaccatgccaatctacccaacctataatgaggtgcatcttgatgaaagacccttcttgagaccaaacatcatttctgggaagtacgacagcaccgctatctacctggacacacatttcaggctgcttagggaggacttcgtccgccctttaagggaaggcattttagaactgctgcagtcctttgaggaccaaggcctgcgcaaacggaaatttgatgatatcaggatatacttcgatactagaatcattacacctatgtgctcgtcctctgggatagtgtataaagtgcaattcgacactaagccgctgaaattcgtgaggtggcagaactctaaaaggttgttatacggatccctggtttgcatgagcaaggataacttcgaaacattcctcttcgcaaccgtctcaaatagggagcaggaagacctctgtcggggtattgtgcagctctgttttaacgagcagagtcagcagctgcttgccgaagttcagcctagtgactccttccttatggtggagactactgcttatttcgaagcttacaggcacgtcctggaaggtctccaggaggttcaggaagaggacgttcccttccagaggaatattgtggaatgtaattcccacgtgaaggagcctcgttacctgctcatggggggacgctatgacttcacaccactgatagaaaacccctcagcaaccggcgaatttctgcgaaatgtcgagggcctgcggcaccctcgcataaacgttctggacccgggtcagtggccgagcaaggaggccctgaaattagatgactctcagatggaggctctccagtttgctctgacgagagaactggccattattcaaggtccacccggaaccgggaagacatatgtcggccttaagatagtacaggcactactcactaacgagtcagtctggcagattagtctccagaagtttccaatactcgttgtttgttatactaatcacgccctggatcagttcctggaggggatatacaattgccagaagacctcaatagttcgcgtgggcggaaggtcaaattccgaaatcttgaaacagttcacgctaagggaattgcgaaacaagcgcgagtttcgcagaaatctgcccatgcatttacggagggcttatatgagtatcatgacacagatgaaagagtcggagcaggagctccacgagggggcaaagaccttggagtgcacaatgcgtggggtcctgcgtgagcagtacctccagaagtacatcagcccacagcactgggagtctttgatgaatggccctgtacaggattccgaatggatttgcttccaacactggaaacactcaatgatgctcgagtggctgggcctgggcgtggggtcgtttactcagtccgtgagccctgccggtccagagaacacggcgcaggccgaaggggacgaagaggaggaaggtgaagaagagtccagcttaatcgagattgctgaggaagccgatttaatccaggctgaccgtgttatcgaggaagaagaagttgtcaggccccaacgtcggaagaaagaggaatccggggctgaccaagaacttgcgaagatgctcttggcaatgcggcttgaccattgcggaaccggaaccgcggctggacaggaacaggctaccggggaatggcagacccaaagaaaccagaagaagaagatgaagaaacgcgtaaaggatgagctaagaaagctgaatactatgactgcggctgaagcaaacgagattgaggacgtgtggcagctggatctgagcagcaggtggcagctctacagactctggctgcagctctatcaggccgatactagacggaaaatcttgagttacgaaaggcagtaccggacctccgctgaacggatggccgagttacgccttcaggaagatctccacattctgaaggatgctcaggtagtgggtatgacaacgaccggcgctgctaagtacaggcagatcctgcagaaggtggagcctaggattgtgattgtggaggaggccgcagaagtattagaagcccacactattgccaccttaagcaaggcatgccagcacctaatcctcatcggagaccaccagcaactgcggccatcagccaatgtgtatgacctggccaaaaatttcaacttagaagtgtctctttttgaaaggctggtgaaagttaatattccatttgtaagacttaactaccagcaccggatgtgtcccgaaattgctcggcttctgacaccccatatttaccaggacctcgaaaatcacccaagcgtgttgaagtacgaaaagattaaggccaaatctaatagctgccgggctctggcaaccggcatgaggcgcaagcataagatctccggaatgattctgagcttcttcaagctgacaattcgctctgctcgcttccagcttctactgtcaggaagctggaccacagcttccttccccttctccaggtcccgttttgcagtgctcatctgtcgggacaataagcgaatgccagcggtaaaaccggtgagcaccaacacgggttcgcatggcctgcagatgcctggtgcacttatgggtgaaaccttccagaaggggtcgacctccagggacgcagcagcttgtctactcagctccctggtcaataagattccaccaaggtcactaacctgggcgtccgactgttgtatcagcttcagctctgcgtcgagttgtcgcaccgcgtatacatcattctcgattttctcaatacttagtagaaatctgagaatgacgagtcagtgggagaaaatcaaacgaatttacaagtag

SEQ ID NO: 207256 - DNA, 5756 bp, Artificial Sequence
  derived and/or modified sequence
atggaagaacgtcggcctcatctagatgcccgtcctaggaactcacatactaaccacagaggccctgttgacggagaacttcctcccagggctcggaaccaggcaaacaaccctcccgctaatgcattacgtggcggtgccagccaccccggacgccatccccgtgcgaacaaccacccagctgcgtactggcaacgtgaagagcgattccgcgcaatgggcaggaatccacaccaggggcgtaggaaccaggaggggcacgcttcagatgaggctagggatcagaggcacgatcaagagaacgacactcggtggagaaatggaaatcaggattgccgcaaccgcaggccaccctggtcaaacgataacttccaacagtggcgaaccccgcatcagaaaccgactgagcagcctcaacaagcaaaaaagcttggctacaagtttctggagagcttactccagaaagaccctagtgaggtcgtcataacattggccaccagtctgggactcaaggagctcctgtcccatagctccatgaagagcaatttcctggagctgatctgccaggtgctgcgcaaggcatgctcttccaagatggatcgacagagcgtgcttcatgtgctgggcattctcaagaatagtaagttcctcaaggtttgtctccctgcctatgtggtaggcatgattacagaacccatccctgacatccgtaatcagtatccggaacacatcagcaatatcatcagtttgctacaggacctcgtgtccgtgttccccgcttcaagcgtgcaggagacctctatgctcgttagcctgctgccaaccagtctcaatgccctgcgcgcatctggcgttgacatagaagaggaaacagagaaaaatcttgagaaggtccagaccataatcgagcatctgcaggagaagagacgcgaaggaacactgcgcgtcgatacttatactctggtgcagccagaagctgaagaccacgttgagagttacaggacaatgcccatctacccaacgtataatgaagtccaccttgatgagagaccctttctcaggccaaatattatcagcggcaagtacgactcaaccgcaatttatctggatacccactttcgtcttctgcgggaagattttgtgcggcctttgcgcgagggcatcctggaactactgcaaagcttcgaggatcagggccttcggaaacgtaaattcgacgacatcaggatttactttgacacacggatcattaccccgatgtgcagctccagtggtatcgtttacaaagtgcagtttgataccaagccactgaaattcgtgagatggcaaaacagtaagcgactattgtacggctccctcgtgtgcatgagcaaagataatttcgagacattcctgtttgcaaccgtctcaaatcgagaacaagaagatctctgcagaggcatcgtccaactctgtttcaacgagcaatcccagcaactgttagcagaggtgcaacctagtgactcctttttaatggtggagacaaccgcttatttcgaggcctataggcatgtgctggaagggctgcaagaggtgcaggaagaggatgttcctttccagaggaatatagttgaatgtaactctcacgtgaaggagcccagatacctgctgatgggtggtcgctatgactttacccccctgatcgaaaaccccagcgcaactggcgaatttctacggaatgtggaaggcctgcgtcatccgcgtattaatgtcctggatcccggacagtggccctccaaagaagccttgaaacttgacgatagccagatggaggctttgcaatttgcactaacccgtgagttggccatcatacaaggaccaccagggactgggaaaacatacgtgggccttaagattgtccaagcacttctgacaaatgaatccgtgtggcagatctccttgcaaaaattccctatactggtggtgtgctacacaaaccacgcattggatcagttcttagagggaatctataactgtcagaaaacctcaatcgttcgtgttgggggtaggtccaactctgagatcctgaaacagttcacgctgcgggaactgcgtaataaacgggaatttaggaggaacttgcccatgcacctgcgcagggcatatatgagcattatgacgcagatgaaagagtccgagcaagagctccatgagggggcaaaaaccctcgagtgcactatgagaggggtactcagagagcagtatctccagaagtacatctctcctcagcattgggaatccctcatgaatggtccagtgcaagactccgagtggatttgctttcagcattggaagcatagcatgatgctcgaatggctaggcttgggcgtgggctcctttacacaaagtgtttcgccagcaggacccgagaacaccgctcaggccgaaggagacgaagaagaggaaggggaagaagagtcctctctgatcgagatcgccgaggaagctgacctcattcaagccgacagggtgatcgaagaggaagaagtcgtgagaccccagaggcgcaaaaaggaggagtcaggcgctgaccaagagttggccaaaatgttgctggctatgcgcctggaccactgcggcacaggcacagctgccggacaggagcaggcgaccggggagtggcagactcagcggaatcagaagaaaaagatgaaaaaaagggtgaaagacgaactacgcaagcttaacaccatgactgccgctgaggcaaatgagatcgaagacgtctggcagctcgatctttcatcacgctggcagctctatcggctgtggctacagttgtatcaggcagacacacggaggaaaatcctgagctacgaaagacagtataggacctcagcggaaaggatggcagaactgcgtttgcaagaggacctgcatatcctgaaggacgcccaggtggtggggatgaccaccacgggcgctgcgaaatacaggcagattttacagaaagtagagccccgaatcgtaatcgttgaggaggcagccgaggtgcttgaagcccacacaattgccacgctgagcaaagcgtgccagcacctgatcttgatcggtgatcatcagcagctgaggccgagcgcaaacgtctatgacctggccaaaaactttaatctggaggtttccttattcgaacgccttgtcaaagtcaacatcccattcgtgagactgaattatcaacaccggatgtgtccggagatagcccgtctgctgactccccacatctaccaagacctggagaatcacccaagcgtgctgaagtatgagaagatcaagggagtgtcctctaaccttttcttcgtcgagcataactttccagagcaggagatccaggaggggaaatcccaccagaaccaacacgaagctcactttgtggtcgaactgtgtaagtattttctgtgccaggagtaccttccgagtcaaattacaatccttacaacttatactggccagctattctgcctccgcaagctgatgccggctaagaccttcgcaggagtcagggtccacgtggtcgataaataccaaggagaggaaaacgatattatactcctctccctagtgagaagtaaccaggaggggaaagtgggatttctacagatcagtaaccgcatctgtgttgccctgtcacgtgccaagaagggtatgtattgtattgggaacatgcagatgctggcaaaagtgccactttggtctaagatcatccacacgctgcgggagaacaatcagatcggtccaatgctccgcttatgttgccaaaaccatccagaaactcatacacttgttagcaaagcttcagattttcagaaggtaccagaagggggatgctccttaccttgcgaatttcggctcgggtgtggacacgtgtgcactcgggcttgccacccttatgattcatcccataaggagttccagtgcatgaagccttgtcaaaaggtcatttgtcaggagggccaccggtgcccccttgtgtgctttcaagagtgccaaccctgtcaggtgaaggtaccgaagaccattcctcgctgtgggcacgagcagatggtgccctgctccgtgcccgaaagcgatttttgttgtcaggaaccgtgctccaaatctctccggtgtggccaccgctgtagtcacccctgtggagaggattgtgttcagctgtgttcagaaatggttaccattaaactgaaatgtgggcacagtcaaccagtgaagtgcggacatgtcgaaggattactctacggcggattgctagtgaaatgtaccacaaagtgtggaacaattttagactgtgggcacccgtgccctggatcatgccacagctgttttgaaggacgctttcacgagcgctgtcagcagccctgtaagcggctgctcatctgctcccataaatgtcaggagccctgcattggggagtgccctccttgtcagagaacgtgccaaaatcggtgtgtgcatagtcagtgtaagaaaaaatgtggtgaactgtgcagcccttgtgtcgagccttgcgtatggcgttgtcagcactaccagtgcaccaagctgtgcagcgaaccttgcaatcgaccaccctgttatgtaccctgcaccaagcttttggtgtgcggacacccatgcattgggctgtgtggagagccatgtcccaagaaatgcaggatatgtcacatggacgaggtgacccaaatcttctttggattcgaggatgaacctgatgcccgattcgtccaactggaggattgcagccacatttttgaagtccaagccctagatcgctacatgaatgagcagaaggacgatgaagtggccatacggctgaaggtgtgtccgatatgccaggtgccaataaggaaaaatctgaggtatggcacttctataaagcagagactggaagagattgaaattattaaagagaaaatccagggtagcgccggtgagatcgctacttcccaggaaagactcaaagctctgctggagaggaaaagtcttttgcatcagctcttgccagaggattttctgatgttgaaggaaaagctggcccagaaaaacctgagcgtgaaggatctcggcctggttgagaattacatatccttctacgaccatctggccagtctgtgggactccctgaagaaaatgcatgtactggaagagaaacgggtccgcaccagactggaacaggtgcacgagtggctggcaaaaaagcgactgtcattcacctctcaagaactgtccgatcttagatcagagatacagcgcctgacatatctggtgaacctgctcacaagatacaaaattgcagaaaaaaaagtgaaggattccatcgcggtagaggtttattctgtgcagaacatcctagaaaaaacatgcaagtttacccaggaggacgaacagctggtccaggagaagatggaagccctcaaggccacgctgccgtgtagtggcctcggcatctctgaggaagaacgggttcaaatagtgtccgcgattggctatccaaggggacattggttcaaatgccggaacggacatatttacgtcattggggattgtgggggtgcgatggagagaggcacttgccccgactgcaaggaagtcataggcggtactaaccatacgttggagaggtccaaccagctggcctctgagatggacggagcacagcatgcggcttggtcggacacagccaacaatctcatgaactttgaagaaatacagggcatgatgta

SEQ ID NO: 207257 - DNA, 2748 bp, Artificial Sequence
  derived and/or modified sequence
atggaggaaagaagacctcacctggacgctcgccctaggaatagccataccaaccaccgtggtccggtcgacggagagctgccacccagggctaggaaccaagccaacaaccctccggctaatgctttacgtggaggcgctagtcacccaggcaggcacccacgagccaacaatcatccagccgcttattggcagcgcgaagaaaggtttagagcgatgggccgtaatccacatcaaggcaggaggaatcaagagggtcatgcttcagatgaggcaagagatcaaagacacgaccaggaaaacgacacgagatggaggaatggaaaccaagactgtcgaaatagaaggcctccctggagcaacgacaattttcagcagtggcgaacccctcaccaaaaaccaactgagcagccgcagcaggccaagaaactgggctataagttccttgaaagtcttctgcaaaaggatccctctgaggtcgttatcacactagctaccagtctggggctaaaggagctgctgagtcactctagtatgaagagtaattttttggaactgatctgccaggtcctgcgtaaggcatgcagtagtaagatggacaggcaatctgtcctgcatgtcttgggcatcctgaaaaattccaagttcctgaaggtgtgtctgccggcatatgtagtaggtatgatcacagagcctatccctgatatccggaaccagtatcccgaacacatctctaatattattagcctgttacaagatttagtgtccgtgttccccgcatcatcagtgcaagaaacttctatgcttgtctccctcctacccacatctcttaacgccctgcgcgcttcaggagtggacatcgaggaagagaccgaaaagaatctggagaaggtgcagacgattatcgagcatctgcaggagaagagacgggagggaacccttcgggttgacacctatacgctcgtgcagcccgaagccgaggaccacgtcgagtcataccgcactatgcctatatatccgacatataacgaagttcaccttgacgagaggccctttcttcgtcctaacatcattagtggaaagtatgattcaaccgccatctatcttgacacccatttccgtcttctgcgagaggactttgtcaggcccttaagggagggcatcctggaactcctccagagttttgaggaccaggggctccggaagagaaaatttgatgatatacggatatactttgacacccggatcataacccccatgtgctcctcatcgggcattgtctataaagtgcagttcgatactaagcctcttaagttcgtgcggtggcagaacagtaagagactgctttacggctcattagtgtgtatgtctaaggataacttcgagacttttctgtttgctaccgtctcgaaccgcgagcaggaggacctgtgtcgcggaatcgtgcagctttgcttcaacgaacagtctcagcagctgctagctgaagtgcagcccagcgattcctttctgatggttgaaactacagcctattttgaggcctacagacatgtgctggaaggcctacaagaggtacaggaagaagacgtcccattccaacgaaatattgtcgagtgcaatagccacgttaaggaaccgaggtatcttctgatggggggtcgctacgacttcacaccactgattgagaacccgtccgcgactggcgagttcttgcggaacgtcgaaggccttcgccaccctcgtattaacgtgctcgatccaggtcaatggccctccaaagaagcgctgaaattagacgactcccaaatggaggctctgcagttcgcattgacccgggaactggcgatcattcagggccctcccggaaccggtaagacatatgttggccttaagatcgtccaggctctactaacaaatgaaagtgtgtggcagattagtctgcaaaaatttcctatccttgttgtttgttacacaaatcacgccctagaccagtttctggaaggcatctataactgccaaaagacaagcattgtccgtgtggggggacgaagtaatagtgagatactcaagcaatttaccctgagggagctgagaaataaacgtgagttccgtagaaacctgccaatgcatctgagacgtgcctacatgagtatcatgactcagatgaaagaaagtgagcaagagctccatgagggggctaaaactcttgagtgcactatgcgcggtgtgctcagagaacagtatctccagaaatacatctccccgcagcattgggagtccttaatgaatggaccggtgcaggacagtgaatggatctgttttcagcactggaaacacagtatgatgctcgagtggctgggcctcggagtcggttctttcacgcagagcgtctcccccgcagggccagagaacaccgcccaggctgagggggatgaagaggaagagggtgaggaggagtccagcttgatcgagattgctgaagaggctgacctgattcaggcagatagggttatagaagaggaggaggtggtccgacctcagcggagaaaaaaagaggagtccggcgcagatcaggaactcgctaagatgctcctggccatgcgactggatcactgcgggacaggaactgccgctgggcaggagcaagctacaggcgagtggcagacccagcgaaatcagaagaagaaaatgaaaaaacgggaaaaggaagaaaaaaaagagagggagaaacgcaggaaaaaaaagtag

SEQ ID NO: 207258 - DNA, 2124 bp, Artificial Sequence
  derived and/or modified sequence
tcaaaaatggacagacaatccgtgctgcacgttctgggaatactcaagaatagtaagtttcttaaggtttgcttgcctgcttatgtggtcggtatgatcaccgaacctattcctgacatacgtaaccaataccccgagcacatttccaatatcatctcactgctgcaggatctggtctctgtatttcccgctagttccgtgcaagagacctctatgcttgtgtccttgctgcccacctcactgaacgcccttcgcgcaagtggggtggatattgaggaggagacggagaaaaacctcgagaaagtacagacgataatcgaacacctccaggaaaagcgacgcgagggcactttaagagtcgacacatacaccttagtgcagcctgaggccgaggaccatgtggaaagctaccggaccatgcctatttaccccacatataatgaggtgcacctcgacgagcgtcctttcctgaggccaaacattatttccggaaaatacgactccaccgccatctacttggatacccatttcaggttattgagagaagattttgttcggcctcttagagagggcatccttgagctgttacagtcatttgaggatcaagggctgcgcaagcgcaaattcgacgacatccggatctactttgacacccgcataatcactccaatgtgttctagcagcggaatcgtgtacaaggtgcagttcgacaccaagcccttgaagttcgttaggtggcagaattcaaaacgcctactctacggcagcctggtctgcatgagtaaggacaactttgaaacctttttgtttgctacagtgagtaatcgcgaacaggaagacctgtgccgcggaatcgtgcagttgtgttttaacgagcagtcacaacagctgctggctgaggtccagccctccgacagcttccttatggttgaaaccactgcctatttcgaagcctatcgccacgtcctggaaggcctgcaagaggtgcaggaagaggatgtgcccttccaaaggaacattgtggagtgtaattcacacgtgaaggagcctaggtacctgcttatgggcggaaggtacgattttacaccactgatcgaaaatccatcggctaccggagagtttctgcgtaatgtggaggggctgcgccacccaaggattaatgtcctcgatcctggacagtggccaagcaaggaggccctcaagctggacgatagccaaatggaggcactgcagtttgcccttaccagggaactggcgattatacaaggtccacccggaacaggcaaaacgtatgtggggctgaagatcgtgcaagccctgctgactaatgagtccgtttggcagatatcccttcagaaatttcccattctagtagtctgctatacgaaccacgcattagaccagtttttagaaggtatctacaactgtcagaaaacaagtattgtccgcgtcggcggaaggagcaactctgagatcttaaaacagttcactctgcgggaattacgtaataagagagagttccggaggaatcttcccatgcatctacgcagggcctacatgtccattatgactcagatgaaggagtctgagcaagaactgcatgagggcgctaagaccctcgaatgcactatgagaggggtgttgcgggagcagtacctccagaaatacataagcccacagcattgggaatcactaatgaacgggcctgtgcaggattccgagtggatttgcttccagcactggaagcacagcatgatgctggagtggcttggactcggcgttggtagcttcactcagtcggtctcccctgccggtcccgagaacacagcgcaggctgagggcgatgaggaggaggagggggaagaagagtccagcctgatcgaaatcgccgaggaggccgatctgatccaagccgatcgagtcatcgaggaagaggaggtcgtccgtccccagcggaggaaaaaggaggagtccggggctgaccaggagcttgctaaaatgctgttggccatgcggctcgatcattgcggtacggggactgcagccggacaggaacaggctaccggggaatggcagactgtaccatgtctcgtgctgatgagtgccgatcctgcccagccctag

SEQ ID NO: 207259 - DNA, 2964 bp, Artificial Sequence
  derived and/or modified sequence
gaaaggacgcgccggagccgggtgagtggccccgcaactgcccctgcccctgattcttccttgcctcgccgcgaaccccggcgcccgcgccgacccgccactgcctctgcccttttccagataacagaaagtaacgtgaaggaattcaggtgactcagacatggaggagagaagacctcatctggatgccaggcccaggaattcccataccaaccacagaggccctgtggatggagagttaccaccaagagctagaaatcaggccaataacccaccagccaatgctctccgaggaggagccagccaccctggaaggcatcctagggccaacaaccatcctgctgcttactggcagagggaagagagatttagggccatgggcaggaacccacatcaaggaaggaggaaccaggaggggcatgccagcgacgaagctagagaccaaagacatgaccaggagaatgacaccaggtggagaaatggcaaccaggactgtaggaaccgcagaccaccatggtccaatgacaacttccagcagtggcggactccccaccagaagcctacagaacagccacagcaggcgaagaaactgggctacaagttcttagaaagtcttctgcagaaagacccttctgaggtggtcatcacacttgccacaagtttagggctgaaagagctcctttctcattcttccatgaaatctaacttccttgagctcatctgtcaggttcttcggaaggcttgtagctccaaaatggatcgccagagtgttctccatgtactgggcatattgaaaaactccaaatttctcaaagtctgcctgcctgcttatgtggtagggatgatcactgaacccatccctgacatccgaaaccagtatccagagcacataagcaacatcatctccctcctccaggaccttgtaagtgtcttccctgccagctctgtgcaggaaacttccatgctggtttccctcctgccaacctctcttaatgctctgagagcctctggtgttgacatagaagaggaaacggagaagaacctggaaaaggtacagactatcattgaacatctgcaggaaaagaggcgagagggcactttgagagtggatacctacactctagtgcagcctgaggcagaagaccatgttgagagctaccgaaccatgcccatttaccctacctacaatgaagtgcacttggatgagaggcccttccttcgccccaatatcatttctggaaaatacgacagcactgctatctatctggatacccacttccggctcctgcgagaagatttcgtcagacctttacgggaaggtattttggaacttctccaaagctttgaagaccagggcctgaggaagagaaagtttgatgacatccgaatctactttgacaccaggattatcacccccatgtgttcatcatcaggcatagtctacaaggtgcagtttgacacaaaaccactgaagtttgttcgctggcagaattccaaacgattgctctatgggtctttggtatgcatgtccaaggacaacttcgagacatttctttttgccaccgtatctaacagggagcaggaagatctctgccgaggaattgtccagctctgcttcaatgagcaaagccaacagctgctagcagaggtccagccctctgactctttcctcatggtagagacaactgcatactttgaggcctacaggcacgtcctggaaggactccaggaggtccaggaggaagatgttcccttccagaggaatatcgtggagtgtaactctcatgtgaaggagccaaggtacttgctaatggggggcagatacgactttacccccttaatagagaatccttcagccactggggaatttctaagaaatgtcgagggtttgagacatcccagaattaatgtcttagatcctggccagtggccctcaaaagaagccctgaagctggatgactcccagatggaagccttgcagtttgctctcacaagggaactggctattattcaaggacctcctggaacaggcaaaacctatgtgggtctaaaaattgttcaggccctcctaaccaacgagtctgtttggcaaattagcctccagaagttccccatcttggttgtgtgttatactaatcatgctttggaccagtttctggaaggcatctacaattgtcagaagaccagcattgtgcgggtgggtggaaggagcaacagtgaaatcctgaagcagttcaccctaagggagctgaggaacaagcgggaattccgccgcaacctccccatgcacctccgaagggcctacatgagtatcatgacacagatgaaggagtcagagcaagagcttcatgaaggagccaagaccctggagtgcaccatgcgtggtgtcctacgggaacagtacctgcagaagtacatctcaccccagcactgggaaagtctcatgaatggaccagtgcaggatagtgaatggatttgcttccagcactggaagcattccatgatgctggagtggctaggtcttggtgtcggttctttcacgcaaagtgtttctccagcaggacctgagaatacagcccaggcagaaggggatgaggaggaagaaggggaggaggagagttcgctgatagagatcgcagaggaagctgacctgattcaagcagaccgggtgattgaggaggaagaggtggtgaggccccagcggcggaagaaggaagagagtggagcagaccaggagttggctaaaatgcttctggccatgaggctagaccattgtggcactgggacagcagctggacaggagcaagccacaggagagtggcagacccagcgcaaccagaaaaagaaaatgaaaaaaagagtgaaggatgagcttcgcaaactgaacaccatgactgcagccgaggccaacgagatcgaggatgtttggcagctggacctcagttctcgctggcagctttatag

SEQ ID NO: 207260 - DNA, 7212 bp, Artificial Sequence
  derived and/or modified sequence
gccccagcactcgccggcggcagtgaaaggacgcgccggagccggataacagaaagtaacgtgaaggaattcaggtgactcagacatggaggagagaagacctcatctggatgccaggcccaggaattcccataccaaccacagaggccctgtggatggagagttaccaccaagagctagaaatcaggccaataacccaccagccaatgctctccgaggaggagccagccaccctggaaggcatcctagggccaacaaccatcctgctgcttactggcagagggaagagagatttagggccatgggcaggaacccacatcaaggaaggaggaaccaggaggggcatgccagcgacgaagctagagaccaaagacatgaccaggagaatgacaccaggtggagaaatggcaaccaggactgtaggaaccgcagaccaccatggtccaatgacaacttccagcagtggcggactccccaccagaagcctacagaacagccacagcaggcgaagaaactgggctacaagttcttagaaagtcttctgcagaaagacccttctgaggtggtcatcacacttgccacaagtttagggctgaaagagctcctttctcattcttccatgaaatctaacttccttgagctcatctgtcaggttcttcggaaggcttgtagctccaaaatggatcgccagagtgttctccatgtactgggcatattgaaaaactccaaatttctcaaagtctgcctgcctgcttatgtggtagggatgatcactgaacccatccctgacatccgaaaccagtatccagagcacataagcaacatcatctccctcctccaggaccttgtaagtgtcttccctgccagctctgtgcaggaaacttccatgctggtttccctcctgccaacctctcttaatgctctgagagcctctggtgttgacatagaagaggaaacggagaagaacctggaaaaggtacagactatcattgaacatctgcaggaaaagaggcgagagggcactttgagagtggatacctacactctagtgcagcctgaggcagaagaccatgttgagagctaccgaaccatgcccatttaccctacctacaatgaagtgcacttggatgagaggcccttccttcgccccaatatcatttctggaaaatacgacagcactgctatctatctggatacccacttccggctcctgcgagaagatttcgtcagacctttacgggaaggtattttggaacttctccaaagctttgaagaccagggcctgaggaagagaaagtttgatgacatccgaatctactttgacaccaggattatcacccccatgtgttcatcatcaggcatagtctacaaggtgcagtttgacacaaaaccactgaagtttgttcgctggcagaattccaaacgattgctctatgggtctttggtatgcatgtccaaggacaacttcgagacatttctttttgccaccgtatctaacagggagcaggaagatctctgccgaggaattgtccagctctgcttcaatgagcaaagccaacagctgctagcagaggtccagccctctgactctttcctcatggtagagacaactgcatactttgaggcctacaggcacgtcctggaaggactccaggaggtccaggaggaagatgttcccttccagaggaatatcgtggagtgtaactctcatgtgaaggagccaaggtacttgctaatggggggcagatacgactttacccccttaatagagaatccttcagccactggggaatttctaagaaatgtcgagggtttgagacatcccagaattaatgtcttagatcctggccagtggccctcaaaagaagccctgaagctggatgactcccagatggaagccttgcagtttgctctcacaagggaactggctattattcaaggacctcctggaacaggcaaaacctatgtgggtctaaaaattgttcaggccctcctaaccaacgagtctgtttggcaaattagcctccagaagttccccatcttggttgtgtgttatactaatcatgctttggaccagtttctggaaggcatctacaattgtcagaagaccagcattgtgcgggtgggtggaaggagcaacagtgaaatcctgaagcagttcaccctaagggagctgaggaacaagcgggaattccgccgcaacctccccatgcacctccgaagggcctacatgagtatcatgacacagatgaaggagtcagagcaagagcttcatgaaggagccaagaccctggagtgcaccatgcgtggtgtcctacgggaacagtacctgcagaagtacatctcaccccagcactgggaaagtctcatgaatggaccagtgcaggatagtgaatggatttgcttccagcactggaagcattccatgatgctggagtggctaggtcttggtgtcggttctttcacgcaaagtgtttctccagcaggacctgagaatacagcccaggcagaaggggatgaggaggaagaaggggaggaggagagttcgctgatagagatcgcagaggaagctgacctgattcaagcagaccgggtgattgaggaggaagaggtggtgaggccccagcggcggaagaaggaagagagtggagcagaccaggagttggctaaaatgcttctggccatgaggctagaccattgtggcactgggacagcagctggacaggagcaagccacaggagagtggcagacccagcgcaaccagaaaaagaaaatgaaaaaaagagtgaaggatgagcttcgcaaactgaacaccatgactgcagccgaggccaacgagatcgaggatgtttggcagctggacctcagttctcgctggcagctttataggctctggctacagttgtaccaggctgacacccgccggaagatcctcagctatgaacgccagtaccgcacatcagcagaaagaatggccgagctgagactccaggaagacctgcacattcttaaagatgcccaggttgtaggaatgacaaccacaggtgctgccaaataccgccagatcctacagaaggtggagccgaggattgtcatagtggaagaagctgcggaagtccttgaggcccataccattgccacattgagcaaagcttgccagcacctcattttgattggggaccaccagcagctgcgccccagtgccaacgtgtatgatctggccaagaacttcaaccttgaggtgtccctttttgaacggctagtgaaagtaaacattccctttgtccgtctgaattaccagcaccgtatgtgccctgaaattgcccgccttttgaccccccacatttaccaggatctggagaatcatccatctgttcttaagtatgagaagattaagggggtgtcttccaaccttttctttgtagaacacaactttcctgaacaggaaatccaagagggcaaaagccatcagaaccagcatgaggctcactttgtggtagagctgtgcaagtacttcctgtgccaggaatacctgccttcccagatcaccatcctcactacctataccgggcagctcttctgcctgcgcaaactgatgcctgccaagacatttgctggcgtcagggtccatgttgtggacaaataccaaggggaagagaatgacatcatcctcctctcgctagtgcggagcaaccaagaaggcaaggtgggttttctgcagatatccaaccgcatctgtgtggccttgtcccgagccaagaagggaatgtactgcatcggaaacatgcagatgctggccaaggtgcccctgtggagcaagatcattcatacacttcgagagaacaatcaaataggccccatgctccggctctgctgccagaaccaccctgaaacccacaccttagtatccaaagcttctgacttccaaaaagtacccgaaggaggctgcagcctgccctgcgagttccgcctgggctgtgggcatgtctgcacccgtgcctgccacccttatgactcttcacacaaggagttccaatgcatgaagccatgccagaaggtcatctgtcaggaagggcaccggtgtccccttgtttgcttccaggagtgtcagccttgtcaggtgaaggtgcccaaaaccattcctcggtgcggccatgaacaaatggtcccttgttccgtgcctgagtcagatttctgctgccaggagccttgctccaagtctctgagatgtgggcacagatgcagccacccatgtggtgaggactgtgtgcagctgtgttcagaaatggtcaccataaaactcaagtgtgggcacagtcaaccggtaaaatgtggtcatgtggaaggcctcctgtatggtggtctgctagtcaagtgtaccacaaagtgtggcactatcttggactgcgggcatccttgcccaggctcctgccacagctgcttcgaagggcgtttccatgaacgctgtcagcagccctgcaagcgcctgcttatctgctcacacaagtgccaggaaccatgcattggtgagtgcccaccctgccagcggacctgtcagaaccgctgtgtccacagccagtgcaagaagaaatgtggggagctgtgtagtccctgcgtggaaccctgtgtctggcgctgccagcactaccagtgcaccaaactctgctctgagccctgcaaccgacccccatgctatgtgccttgtactaagctgctagtttgtggccacccctgcattggtctctgtggggagccatgccccaagaaatgccggatctgccacatggatgaggtcacccaaatattctttggctttgaggatgagcctgatgcccgctttgtgcagctggaagactgcagccacatctttgaggtgcaagccctagaccgctacatgaatgaacagaaggatgatgaagtcgccatcagattgaaagtctgccctatctgccaggtgcccatccgcaaaaacctgaggtatggaactagcataaaacagcggctagaagagattgaaatcatcaaggaaaagatccagggctcagcaggggaaatagcaaccagccaggaacggcttaaggccctgctggagaggaagagcctcctccaccagctgcttcctgaagacttcctgatgttaaaggagaagctggcccagaaaaatctgtcagtgaaggacctgggtctggttgagaattacatcagcttctatgaccacctggccagcctgtgggattccctgaaaaagatgcatgtcttagaagagaaaagagtgaggactcgactagaacaggtccatgagtggctggccaagaagcgcttgagcttcactagccaggaactaagtgacctccgaagtgaaatccagaggctcacatacctggtgaaccttctgacccgctacaagatagcagagaagaaggtgaaagatagcatagcagtagaggtctatagtgtccagaatatccttgagaaaacatgtaagttcacccaagaggatgaacaacttgtgcaggaaaagatggaagctctgaaagccacccttccctgctctggcctgggcatctcagaggaagagcgagtgcagattgtcagtgccataggttatcctcgtggtcactggttcaagtgccgcaatggccatatctatgtgattggcgattgtgggggagccatggagaggggcacgtgtcctgactgtaaggaagtgattggtggcacaaatcatactctggaaagaagcaaccagcttgcttctgaaatggatggagcccagcatgctgcctggtctgacacggccaacaacctgatgaactttgaggagatccaggggatgatgtaggaagatggtacaccactgccttttgccctcgccactgaatgactggggccagctccctaatgaaggaactgaagtttgttttttattatcatcctttttaggctgggcgcagtggcttacgcctgtaatcccagcactttgggaggccgaggcaggcggatcacgaggtcaggagttcgagaccagcctgaccaacatggcgaaaccccgtctctactaaaaatacaaaaattagctgggcgttatggcgggcgcctgtaatcccagctacttgggaggctgaggcagaagaatcgcttaaacccaggaggcggaggttgcagtgagctgagatcatgccattgcactccagtctgggcgacaggagcaagactctgtctcaaaaaaaaaaaaatcattctttttagtcttagcacctacttaaggatccacttttagggctcacccacatttgtttctagatttacccctgcgctagagtaagcactttatctccagaactgagagcaaagttaacaaatctcaccccttctctcctgcaaattagtggacagactccctggaacatgtttggggcttccacctagggccacctagtggtatctctgggtctttacttggtcagatgtttattctacattgttccccaggaacagagtatgagctcattgatgcagaccgattctaattgccaggccctaatttgcagactaactctcataataaacagaggcccatagttgtttatgaactgcttatcccttaaaggagcacaagaacccctccctgccctccttgggcaccctgcctccaggagatggaggcacgtgataagacaaaagactgcaccaactcaccctgacacagttacatagtcactgagagtggggaagatgggacagcccacatgctgcataagatgggccttatgcagcaggcccaggtcgtcattaaggagtgacccctttcctgtaacctgcactttgggatggtagaagtttctttacctgctgacaggtttggtggcactgctggttacccctgggccctgaatggagctaaaatcacatttggtaccagcagcacctatcccaagtgtgatccttcatcccaacactccctcttggagctgttccctgggtagagctagcatgccagcagcttctgcaggctccaaacccaggccagaagccagacccaggcctgctgcctgcatctgcattccctccttccagtgttccttagaacagacatttaggtatctcaggtcctttctaagtgtccctttcctatgtatgcatttcctttttttgtctttactatgcactttagcttataaagccaattaaaaacaatgattgagaaaatca

SEQ ID NO: 207261 - DNA, 5235 bp, Artificial Sequence
  derived and/or modified sequence
ttcctcgccatgtcgcgcttcacacgcaccaaaccgctcgacgggttccccttcctctggggccggctgaggcccgcaaaggccttgggcgcagtcatctcccgccccccgcggtccgctcccctcagccgcgcccgcctgagcccgccggctccgccgccggggggagctgaggtgacgccctcctcgagggcggaggcgccggccgtgcctgggccaggccctcgtgctctccaccctgggcccccgcctcctccttctcctcctctgggccgcccgcccggctccgcccagggtctgcggggaacggaaaccgaaagtgcgcggcgccgggcggggccaccgacctgcctgggccgaagccccagcactcgccggcggcagtgaaaggacgcgccggagccggttttccagataacagaaagtaacgtgaaggaattcaggtgactcagacatggaggagagaagacctcatctggatgccaggcccaggaattcccataccaaccacagaggccctgtggatggagagttaccaccaagagctagaaatcaggccaataacccaccagccaatgctctccgaggaggagccagccaccctggaaggcatcctagggccaacaaccatcctgctgcttactggcagagggaagagagatttagggccatgggcaggaacccacatcaaggaaggaggaaccaggaggggcatgccagcgacgaagctagagaccaaagacatgaccaggagaatgacaccaggtggagaaatggcaaccaggactgtaggaaccgcagaccaccatggtccaatgacaacttccagcagtggcggactccccaccagaagcctacagaacagccacagcaggcgaagaaactgggctacaagttcttagaaagtcttctgcagaaagacccttctgaggtggtcatcacacttgccacaagtttagggctgaaagagctcctttctcattcttccatgaaatctaacttccttgagctcatctgtcaggttcttcggaaggcttgtagctccaaaatggatcgccagagtgttctccatgtactgggcatattgaaaaactccaaatttctcaaagtctgcctgcctgcttatgtggtagggatgatcactgaacccatccctgacatccgaaaccagtatccagagcacataagcaacatcatctccctcctccaggaccttgtaagtgtcttccctgccagctctgtgcaggaaacttccatgctggtttccctcctgccaacctctcttaatgctctgagagcctctggtgttgacatagaagaggaaacggagaagaacctggaaaaggtacagactatcattgaacatctgcaggaaaagaggcgagagggcactttgagagtggatacctacactctagtgcagcctgaggcagaagaccatgttgagagctaccgaaccatgcccatttaccctacctacaatgaagtgcacttggatgagaggcccttccttcgccccaatatcatttctggaaaatacgacagcactgctatctatctggatacccacttccggctcctgcgagaagatttcgtcagacctttacgggaaggtattttggaacttctccaaagctttgaagaccagggcctgaggaagagaaagtttgatgacatccgaatctactttgacaccaggattatcacccccatgtgttcatcatcaggcatagtctacaaggtgcagtttgacacaaaaccactgaagtttgttcgctggcagaattccaaacgattgctctatgggtctttggtatgcatgtccaaggacaacttcgagacatttctttttgccaccgtatctaacagggagcaggaagatctctgccgaggaattgtccagctctgcttcaatgagcaaagccaacagctgctagcagaggtccagccctctgactctttcctcatggtagagacaactgcatactttgaggcctacaggcacgtcctggaaggactccaggaggtccaggaggaagatgttcccttccagaggaatatcgtggagtgtaactctcatgtgaaggagccaaggtacttgctaatggggggcagatacgactttacccccttaatagagaatccttcagccactggggaatttctaagaaatgtcgagggtttgagacatcccagaattaatgtcttagatcctggccagtggccctcaaaagaagccctgaagctggatgactcccagatggaagccttgcagtttgctctcacaagggaactggctattattcaaggacctcctggaacaggcaaaacctatgtgggtctaaaaattgttcaggccctcctaaccaacgagtctgtttggcaaattagcctccagaagttccccatcttggttgtgtgttatactaatcatgctttggaccagtttctggaaggcatctacaattgtcagaagaccagcattgtgcgggtgggtggaaggagcaacagtgaaatcctgaagcagttcaccctaagggagctgaggaacaagcgggaattccgccgcaacctccccatgcacctccgaagggcctacatgagtatcatgacacagatgaaggagtcagagcaagagcttcatgaaggagccaagaccctggagtgcaccatgcgtggtgtcctacgggaacagtacctgcagaagtacatctcaccccagcactgggaaagtctcatgaatggaccagtgcaggatagtgaatggatttgcttccagcactggaagcattccatgatgctggagtggctaggtcttggtgtcggttctttcacgcaaagtgtttctccagcaggacctgagaatacagcccaggcagaaggggatgaggaggaagaaggggaggaggagagttcgctgatagagatcgcagaggaagctgacctgattcaagcagaccgggtgattgaggaggaagaggtggtgaggccccagcggcggaagaaggaagagagtggagcagaccaggagttggctaaaatgcttctggccatgaggctagaccattgtggcactgggacagcagctggacaggagcaagccacaggagagtggcagacccagcgcaaccagaaaaagaaaatgaaaaaaagagtgaaggatgagcttcgcaaactgaacaccatgactgcagccgaggccaacgagatcgaggatgtttggcagctggacctcagttctcgctggcagctttataggctctggctacagttgtaccaggctgacacccgccggaagatcctcagctatgaacgccagtaccgcacatcagcagaaagaatggccgagctgagactccaggaagacctgcacattcttaaagatgcccaggttgtaggaatgacaaccacaggtgctgccaaataccgccagatcctacagaaggtggagccgaggattgtcatagtggaagaagctgcggaagtccttgaggcccataccattgccacattgagcaaagcttgccagcacctcattttgattggggaccaccagcagctgcgccccagtgccaacgtgtatgatctggccaagaacttcaaccttgaggtgtccctttttgaacggctagtgaaagtaaacattccctttgtccgtctgaattaccagcaccgtatgtgccctgaaattgcccgccttttgaccccccacatttaccaggatctggagaatcatccatctgttcttaagtatgagaagattaaggccaagtcaaattcctgcagagctttggcaactgggatgagaagaaagcataagatttcagggatgattttatctttttttaagcttacgataagaagtgcacgttttcaattgctcctctcgggctcttggaccactgcctccttccccttctccaggagccgctttgctgtattgatctgtagagataacaaaaggatgcctgccgtgaaacccgtatctactaacacaggaagccacgggctgcaaatgcctggggctctgatgggagaaacatttcagaagggcagcaccagcagggatgcagcagcttgcttactgagcagccttgtgaacaagatcccgcctcgcagcctcacctgggcttctgactgctgcatctctttttcctccgcctctagctgcagaactgcatacacatctttctccattttctcaatcttgtcccggaatttgaggatgacatctcaatgggagaaaataaaaaggatttacaaataagggtaggccaggcatggtggctcacacctgtaacccggcactctgggagattgaggtgggaggattgcttgagcccaggaatttgaggccagcctgggcaacgtggccagactctgtctctacaaaaaaaaaaaaaaaaaaaaaaaaagccaggcacagtggctcatgcctgtaatcccacgctttgggaggccaaggcaggtggatcacctgaggtcaggagtttgagaccagcttggccaatgctgtgaaaccccgtctctattaaaaatacaaaaatcagctgggtgtgggggcacacgcctgtaatcccagctactactcagaaggctgaggcaggagaactgcttgaacccacgaggcggaggctgcagtaagccaagatgacaccactacactccagcctgggcaaaagagcgagactccatctaaaaaaaaaaaaaaaattagccatcatggtggcacacacctgtagtcccacctactcaggaggctgaggagaagaactgcttgaacccaggagttcgaggcaacagtaagctatgatcgcacccctgtaccccagcctgggcaacaaagcaagaccttatcttaaacaaaataaggcagtggctcaagcctgtaatcccagcactttgggaggccaaggcgggtggatcacgaggtcaagagatcgagaccatcctggacaacatggtgaaaccccacctgtactaaaaatataaaaattagctgggcgtggtggcatgcacctgtagtcccagctacttgggaggctgaggcaggaggatcacttgaacccgggacgcagaggttgcaatgggccgagatcgcaccactgcactccagcctggcaacagagcaagactccatctcaaaaataaattaaataaaataaaataagggtgactactaatactgtgtaactgatgaaaataatttagctgtgcatttactgacataggaaa

SEQ ID NO: 207262 - DNA, 7371 bp, Artificial Sequence
  derived and/or modified sequence
gtgcctgggccaggccctcgtgctctccaccctgggcccccgcctcctccttctcctcctctgggccgcccgcccggctccgcccagggtctgcggggaacggaaaccgaaagtgcgcggcgccgggcggggccaccgacctgcctgggccgaagccccagcactcgccggcggcagtgaaaggacgcgccggagccggttttccagataacagaaagtaacgtgaaggaattcaggtgactcagacatggaggagagaagacctcatctggatgccaggcccaggaattcccataccaaccacagaggccctgtggatggagagttaccaccaagagctagaaatcaggccaataacccaccagccaatgctctccgaggaggagccagccaccctggaaggcatcctagggccaacaaccatcctgctgcttactggcagagggaagagagatttagggccatgggcaggaacccacatcaaggaaggaggaaccaggaggggcatgccagcgacgaagctagagaccaaagacatgaccaggagaatgacaccaggtggagaaatggcaaccaggactgtaggaaccgcagaccaccatggtccaatgacaacttccagcagtggcggactccccaccagaagcctacagaacagccacagcaggcgaagaaactgggctacaagttcttagaaagtcttctgcagaaagacccttctgaggtggtcatcacacttgccacaagtttagggctgaaagagctcctttctcattcttccatgaaatctaacttccttgagctcatctgtcaggttcttcggaaggcttgtagctccaaaatggatcgccagagtgttctccatgtactgggcatattgaaaaactccaaatttctcaaagtctgcctgcctgcttatgtggtagggatgatcactgaacccatccctgacatccgaaaccagtatccagagcacataagcaacatcatctccctcctccaggaccttgtaagtgtcttccctgccagctctgtgcaggaaacttccatgctggtttccctcctgccaacctctcttaatgctctgagagcctctggtgttgacatagaagaggaaacggagaagaacctggaaaaggtacagactatcattgaacatctgcaggaaaagaggcgagagggcactttgagagtggatacctacactctagtgcagcctgaggcagaagaccatgttgagagctaccgaaccatgcccatttaccctacctacaatgaagtgcacttggatgagaggcccttccttcgccccaatatcatttctggaaaatacgacagcactgctatctatctggatacccacttccggctcctgcgagaagatttcgtcagacctttacgggaaggtattttggaacttctccaaagctttgaagaccagggcctgaggaagagaaagtttgatgacatccgaatctactttgacaccaggattatcacccccatgtgttcatcatcaggcatagtctacaaggtgcagtttgacacaaaaccactgaagtttgttcgctggcagaattccaaacgattgctctatgggtctttggtatgcatgtccaaggacaacttcgagacatttctttttgccaccgtatctaacagggagcaggaagatctctgccgaggaattgtccagctctgcttcaatgagcaaagccaacagctgctagcagaggtccagccctctgactctttcctcatggtagagacaactgcatactttgaggcctacaggcacgtcctggaaggactccaggaggtccaggaggaagatgttcccttccagaggaatatcgtggagtgtaactctcatgtgaaggagccaaggtacttgctaatggggggcagatacgactttacccccttaatagagaatccttcagccactggggaatttctaagaaatgtcgagggtttgagacatcccagaattaatgtcttagatcctggccagtggccctcaaaagaagccctgaagctggatgactcccagatggaagccttgcagtttgctctcacaagggaactggctattattcaaggacctcctggaacaggcaaaacctatgtgggtctaaaaattgttcaggccctcctaaccaacgagtctgtttggcaaattagcctccagaagttccccatcttggttgtgtgttatactaatcatgctttggaccagtttctggaaggcatctacaattgtcagaagaccagcattgtgcgggtgggtggaaggagcaacagtgaaatcctgaagcagttcaccctaagggagctgaggaacaagcgggaattccgccgcaacctccccatgcacctccgaagggcctacatgagtatcatgacacagatgaaggagtcagagcaagagcttcatgaaggagccaagaccctggagtgcaccatgcgtggtgtcctacgggaacagtacctgcagaagtacatctcaccccagcactgggaaagtctcatgaatggaccagtgcaggatagtgaatggatttgcttccagcactggaagcattccatgatgctggagtggctaggtcttggtgtcggttctttcacgcaaagtgtttctccagcaggacctgagaatacagcccaggcagaaggggatgaggaggaagaaggggaggaggagagttcgctgatagagatcgcagaggaagctgacctgattcaagcagaccgggtgattgaggaggaagaggtggtgaggccccagcggcggaagaaggaagagagtggagcagaccaggagttggctaaaatgcttctggccatgaggctagaccattgtggcactgggacagcagctggacaggagcaagccacaggagagtggcagacccagcgcaaccagaaaaagaaaatgaaaaaaagagtgaaggatgagcttcgcaaactgaacaccatgactgcagccgaggccaacgagatcgaggatgtttggcagctggacctcagttctcgctggcagctttataggctctggctacagttgtaccaggctgacacccgccggaagatcctcagctatgaacgccagtaccgcacatcagcagaaagaatggccgagctgagactccaggaagacctgcacattcttaaagatgcccaggttgtaggaatgacaaccacaggtgctgccaaataccgccagatcctacagaaggtggagccgaggattgtcatagtggaagaagctgcggaagtccttgaggcccataccattgccacattgagcaaagcttgccagcacctcattttgattggggaccaccagcagctgcgccccagtgccaacgtgtatgatctggccaagaacttcaaccttgaggtgtccctttttgaacggctagtgaaagtaaacattccctttgtccgtctgaattaccagcaccgtatgtgccctgaaattgcccgccttttgaccccccacatttaccaggatctggagaatcatccatctgttcttaagtatgagaagattaagggggtgtcttccaaccttttctttgtagaacacaactttcctgaacaggaaatccaagagggcaaaagccatcagaaccagcatgaggctcactttgtggtagagctgtgcaagtacttcctgtgccaggaatacctgccttcccagatcaccatcctcactacctataccgggcagctcttctgcctgcgcaaactgatgcctgccaagacatttgctggcgtcagggtccatgttgtggacaaataccaaggggaagagaatgacatcatcctcctctcgctagtgcggagcaaccaagaaggcaaggtgggttttctgcagatatccaaccgcatctgtgtggccttgtcccgagccaagaagggaatgtactgcatcggaaacatgcagatgctggccaaggtgcccctgtggagcaagatcattcatacacttcgagagaacaatcaaataggccccatgctccggctctgctgccagaaccaccctgaaacccacaccttagtatccaaagcttctgacttccaaaaagtacccgaaggaggctgcagcctgccctgcgagttccgcctgggctgtgggcatgtctgcacccgtgcctgccacccttatgactcttcacacaaggagttccaatgcatgaagccatgccagaaggtcatctgtcaggaagggcaccggtgtccccttgtttgcttccaggagtgtcagccttgtcaggtgaaggtgcccaaaaccattcctcggtgcggccatgaacaaatggtcccttgttccgtgcctgagtcagatttctgctgccaggagccttgctccaagtctctgagatgtgggcacagatgcagccacccatgtggtgaggactgtgtgcagctgtgttcagaaatggtcaccataaaactcaagtgtgggcacagtcaaccggtaaaatgtggtcatgtggaaggcctcctgtatggtggtctgctagtcaagtgtaccacaaagtgtggcactatcttggactgcgggcatccttgcccaggctcctgccacagctgcttcgaagggcgtttccatgaacgctgtcagcagccctgcaagcgcctgcttatctgctcacacaagtgccaggaaccatgcattggtgagtgcccaccctgccagcggacctgtcagaaccgctgtgtccacagccagtgcaagaagaaatgtggggagctgtgtagtccctgcgtggaaccctgtgtctggcgctgccagcactaccagtgcaccaaactctgctctgagccctgcaaccgacccccatgctatgtgccttgtactaagctgctagtttgtggccacccctgcattggtctctgtggggagccatgccccaagaaatgccggatctgccacatggatgaggtcacccaaatattctttggctttgaggatgagcctgatgcccgctttgtgcagctggaagactgcagccacatctttgaggtgcaagccctagaccgctacatgaatgaacagaaggatgatgaagtcgccatcagattgaaagtctgccctatctgccaggtgcccatccgcaaaaacctgaggtatggaactagcataaaacagcggctagaagagattgaaatcatcaaggaaaagatccagggctcagcaggggaaatagcaaccagccaggaacggcttaaggccctgctggagaggaagagcctcctccaccagctgcttcctgaagacttcctgatgttaaaggagaagctggcccagaaaaatctgtcagtgaaggacctgggtctggttgagaattacatcagcttctatgaccacctggccagcctgtgggattccctgaaaaagatgcatgtcttagaagagaaaagagtgaggactcgactagaacaggtccatgagtggctggccaagaagcgcttgagcttcactagccaggaactaagtgacctccgaagtgaaatccagaggctcacatacctggtgaaccttctgacccgctacaagatagcagagaagaaggtgaaagatagcatagcagtagaggtctatagtgtccagaatatccttgagaaaacatgtaagttcacccaagaggatgaacaacttgtgcaggaaaagatggaagctctgaaagccacccttccctgctctggcctgggcatctcagaggaagagcgagtgcagattgtcagtgccataggttatcctcgtggtcactggttcaagtgccgcaatggccatatctatgtgattggcgattgtgggggagccatggagaggggcacgtgtcctgactgtaaggaagtgattggtggcacaaatcatactctggaaagaagcaaccagcttgcttctgaaatggatggagcccagcatgctgcctggtctgacacggccaacaacctgatgaactttgaggagatccaggggatgatgtaggaagatggtacaccactgccttttgccctcgccactgaatgactggggccagctccctaatgaaggaactgaagtttgttttttattatcatcctttttaggctgggcgcagtggcttacgcctgtaatcccagcactttgggaggccgaggcaggcggatcacgaggtcaggagttcgagaccagcctgaccaacatggcgaaaccccgtctctactaaaaatacaaaaattagctgggcgttatggcgggcgcctgtaatcccagctacttgggaggctgaggcagaagaatcgcttaaacccaggaggcggaggttgcagtgagctgagatcatgccattgcactccagtctgggcgacaggagcaagactctgtctcaaaaaaaaaaaaatcattctttttagtcttagcacctacttaaggatccacttttagggctcacccacatttgtttctagatttacccctgcgctagagtaagcactttatctccagaactgagagcaaagttaacaaatctcaccccttctctcctgcaaattagtggacagactccctggaacatgtttggggcttccacctagggccacctagtggtatctctgggtctttacttggtcagatgtttattctacattgttccccaggaacagagtatgagctcattgatgcagaccgattctaattgccaggccctaatttgcagactaactctcataataaacagaggcccatagttgtttatgaactgcttatcccttaaaggagcacaagaacccctccctgccctccttgggcaccctgcctccaggagatggaggcacgtgataagacaaaagactgcaccaactcaccctgacacagttacatagtcactgagagtggggaagatgggacagcccacatgctgcataagatgggccttatgcagcaggcccaggtcgtcattaaggagtgacccctttcctgtaacctgcactttgggatggtagaagtttctttacctgctgacaggtttggtggcactgctggttacccctgggccctgaatggagctaaaatcacatttggtaccagcagcacctatcccaagtgtgatccttcatcccaacactccctcttggagctgttccctgggtagagctagcatgccagcagcttctgcaggctccaaacccaggccagaagccagacccaggcctgctgcctgcatctgcattccctccttccagtgttccttagaacagacatttaggtatctcaggtcctttctaagtgtccctttcctatgtatgcatttcctttttttgtctttactatgcactttagcttataaagccaattaaaaacaatgattgagaaaa

SEQ ID NO: 207263 - DNA, 2992 bp, Artificial Sequence
  derived and/or modified sequence
gtgcctgggccaggccctcgtgctctccaccctgggcccccgcctcctccttctcctcctctgggccgcccgcccggctccgcccagggtctgcggggaacggaaaccgaaagtgcgcggcgccgggcggggccaccgacctgcctgggccgaagccccagcactcgccggcggcagtgaaaggacgcgccggagccggttttccagataacagaaagtaacgtgaaggaattcaggtgactcagacatggaggagagaagacctcatctggatgccaggcccaggaattcccataccaaccacagaggccctgtggatggagagttaccaccaagagctagaaatcaggccaataacccaccagccaatgctctccgaggaggagccagccaccctggaaggcatcctagggccaacaaccatcctgctgcttactggcagagggaagagagatttagggccatgggcaggaacccacatcaaggaaggaggaaccaggaggggcatgccagcgacgaagctagagaccaaagacatgaccaggagaatgacaccaggtggagaaatggcaaccaggactgtaggaaccgcagaccaccatggtccaatgacaacttccagcagtggcggactccccaccagaagcctacagaacagccacagcaggcgaagaaactgggctacaagttcttagaaagtcttctgcagaaagacccttctgaggtggtcatcacacttgccacaagtttagggctgaaagagctcctttctcattcttccatgaaatctaacttccttgagctcatctgtcaggttcttcggaaggcttgtagctccaaaatggatcgccagagtgttctccatgtactgggcatattgaaaaactccaaatttctcaaagtctgcctgcctgcttatgtggtagggatgatcactgaacccatccctgacatccgaaaccagtatccagagcacataagcaacatcatctccctcctccaggaccttgtaagtgtcttccctgccagctctgtgcaggaaacttccatgctggtttccctcctgccaacctctcttaatgctctgagagcctctggtgttgacatagaagaggaaacggagaagaacctggaaaaggtacagactatcattgaacatctgcaggaaaagaggcgagagggcactttgagagtggatacctacactctagtgcagcctgaggcagaagaccatgttgagagctaccgaaccatgcccatttaccctacctacaatgaagtgcacttggatgagaggcccttccttcgccccaatatcatttctggaaaatacgacagcactgctatctatctggatacccacttccggctcctgcgagaagatttcgtcagacctttacgggaaggtattttggaacttctccaaagctttgaagaccagggcctgaggaagagaaagtttgatgacatccgaatctactttgacaccaggattatcacccccatgtgttcatcatcaggcatagtctacaaggtgcagtttgacacaaaaccactgaagtttgttcgctggcagaattccaaacgattgctctatgggtctttggtatgcatgtccaaggacaacttcgagacatttctttttgccaccgtatctaacagggagcaggaagatctctgccgaggaattgtccagctctgcttcaatgagcaaagccaacagctgctagcagaggtccagccctctgactctttcctcatggtagagacaactgcatactttgaggcctacaggcacgtcctggaaggactccaggaggtccaggaggaagatgttcccttccagaggaatatcgtggagtgtaactctcatgtgaaggagccaaggtacttgctaatggggggcagatacgactttacccccttaatagagaatccttcagccactggggaatttctaagaaatgtcgagggtttgagacatcccagaattaatgtcttagatcctggccagtggccctcaaaagaagccctgaagctggatgactcccagatggaagccttgcagtttgctctcacaagggaactggctattattcaaggacctcctggaacaggcaaaacctatgtgggtctaaaaattgttcaggccctcctaaccaacgagtctgtttggcaaattagcctccagaagttccccatcttggttgtgtgttatactaatcatgctttggaccagtttctggaaggcatctacaattgtcagaagaccagcattgtgcgggtgggtggaaggagcaacagtgaaatcctgaagcagttcaccctaagggagctgaggaacaagcgggaattccgccgcaacctccccatgcacctccgaagggcctacatgagtatcatgacacagatgaaggagtcagagcaagagcttcatgaaggagccaagaccctggagtgcaccatgcgtggtgtcctacgggaacagtacctgcagaagtacatctcaccccagcactgggaaagtctcatgaatggaccagtgcaggatagtgaatggatttgcttccagcactggaagcattccatgatgctggagtggctaggtcttggtgtcggttctttcacgcaaagtgtttctccagcaggacctgagaatacagcccaggcagaaggggatgaggaggaagaaggggaggaggagagttcgctgatagagatcgcagaggaagctgacctgattcaagcagaccgggtgattgaggaggaagaggtggtgaggccccagcggcggaagaaggaagagagtggagcagaccaggagttggctaaaatgcttctggccatgaggctagaccattgtggcactgggacagcagctggacaggagcaagccacaggagagtggcagacccagcgcaaccagaaaaagaaaatgaaaaaaagagagaaggaggaaaaaaaggagagagagaagaggaggaagaaaaaa

SEQ ID NO: 207264 - DNA, 2122 bp, Artificial Sequence
  derived and/or modified sequence
tccaaaatggatcgccagagtgttctccatgtactgggcatattgaaaaactccaaatttctcaaagtctgcctgcctgcttatgtggtagggatgatcactgaacccatccctgacatccgaaaccagtatccagagcacataagcaacatcatctccctcctccaggaccttgtaagtgtcttccctgccagctctgtgcaggaaacttccatgctggtttccctcctgccaacctctcttaatgctctgagagcctctggtgttgacatagaagaggaaacggagaagaacctggaaaaggtacagactatcattgaacatctgcaggaaaagaggcgagagggcactttgagagtggatacctacactctagtgcagcctgaggcagaagaccatgttgagagctaccgaaccatgcccatttaccctacctacaatgaagtgcacttggatgagaggcccttccttcgccccaatatcatttctggaaaatacgacagcactgctatctatctggatacccacttccggctcctgcgagaagatttcgtcagacctttacgggaaggtattttggaacttctccaaagctttgaagaccagggcctgaggaagagaaagtttgatgacatccgaatctactttgacaccaggattatcacccccatgtgttcatcatcaggcatagtctacaaggtgcagtttgacacaaaaccactgaagtttgttcgctggcagaattccaaacgattgctctatgggtctttggtatgcatgtccaaggacaacttcgagacatttctttttgccaccgtatctaacagggagcaggaagatctctgccgaggaattgtccagctctgcttcaatgagcaaagccaacagctgctagcagaggtccagccctctgactctttcctcatggtagagacaactgcatactttgaggcctacaggcacgtcctggaaggactccaggaggtccaggaggaagatgttcccttccagaggaatatcgtggagtgtaactctcatgtgaaggagccaaggtacttgctaatggggggcagatacgactttacccccttaatagagaatccttcagccactggggaatttctaagaaatgtcgagggtttgagacatcccagaattaatgtcttagatcctggccagtggccctcaaaagaagccctgaagctggatgactcccagatggaagccttgcagtttgctctcacaagggaactggctattattcaaggacctcctggaacaggcaaaacctatgtgggtctaaaaattgttcaggccctcctaaccaacgagtctgtttggcaaattagcctccagaagttccccatcttggttgtgtgttatactaatcatgctttggaccagtttctggaaggcatctacaattgtcagaagaccagcattgtgcgggtgggtggaaggagcaacagtgaaatcctgaagcagttcaccctaagggagctgaggaacaagcgggaattccgccgcaacctccccatgcacctccgaagggcctacatgagtatcatgacacagatgaaggagtcagagcaagagcttcatgaaggagccaagaccctggagtgcaccatgcgtggtgtcctacgggaacagtacctgcagaagtacatctcaccccagcactgggaaagtctcatgaatggaccagtgcaggatagtgaatggatttgcttccagcactggaagcattccatgatgctggagtggctaggtcttggtgtcggttctttcacgcaaagtgtttctccagcaggacctgagaatacagcccaggcagaaggggatgaggaggaagaaggggaggaggagagttcgctgatagagatcgcagaggaagctgacctgattcaagcagaccgggtgattgaggaggaagaggtggtgaggccccagcggcggaagaaggaagagagtggagcagaccaggagttggctaaaatgcttctggccatgaggctagaccattgtggcactgggacagcagctggacaggagcaagccacaggagagtggcagacagtaccctgcctggtattgatgtctgcagacccagcgcaaccag

SEQ ID NO: 207265 - protein, 382 aa, Artificial Sequence
  derived and/or modified sequence
MAVSVTPIRDTKWLTLEVCREFQRGTCSRPDTECKFAHPSKSCQVENGRVIACFDSLKGRCSRENCKYLHPPPHLKTQLEINGRNNLIQQKNMAMLAQQMQLANAMMPGAPLQPVPMFSVAPSLATNASAAAFNPYLGPVSPSLVPAEILPTAPMLVTGNPGVPVPAAAAAAAQKLMRTDRLEVCREYQRGNCNRGENDCRFAHPADSTMIDTNDNTVTVCMDYIKGRCSREKCKYFHPPAHLQAKIKAAQYQVNQAAAAQAAATAAAMGIPQAVLPPLPKRPALEKTNGATAVFNTGIFQYQQALANMQLQQHTAFLPPGSILCMTPATSVVPMVHGATPATVSAATTSATSVPFAATATANQIPIISAEHLTSHKYVTQM

SEQ ID NO: 207266 - DNA, 1149 bp, Artificial Sequence
  derived and/or modified sequence
atggccgtgtcagtgacaccaataagagataccaagtggctgacattagaagtttgtcgggagttccagcgcggaacatgttcccgtcctgatactgagtgcaagttcgcccacccttcgaagtcctgtcaggtagaaaatggacgagtgatcgcgtgctttgactccctgaagggccggtgtagccgtgagaactgcaaatacttgcatccccctccacatctcaagacacagctcgagatcaacggcaggaacaacttaatccaacagaagaacatggcgatgctggcgcagcagatgcaactggccaatgccatgatgcccggagcccctctgcagcccgttccaatgttttctgtggcaccttccttggcgactaacgcgtcggccgccgcgttcaacccctacctggggcccgtttcgcccagcttggttcccgccgagatactgcccaccgcaccaatgttggtgacgggcaaccctggcgttccggtgcccgccgctgccgccgcggccgcccagaagctcatgcggactgaccggctggaggtgtgcagagaatatcagcgaggaaattgcaataggggcgagaatgattgtcgctttgcgcatccagcggattcgacaatgattgataccaacgacaataccgttacagtgtgtatggactacatcaagggcagatgttcaagagagaaatgtaaatatttccacccacctgcacatctgcaagcaaagataaaagccgcacagtatcaagtcaatcaggccgccgctgcacaagctgccgccacagctgctgcaatgggaattccgcaagccgtacttccgccccttccaaaaagaccggcgttggagaaaaccaatggcgctacggcggtcttcaatacaggcatttttcagtatcaacaggcactagcaaacatgcagctgcagcagcatactgcattcctcccccccgggtctatcctgtgcatgacccccgcgacaagcgtggtccccatggtccacggtgccacacccgctacggtgtccgccgctacaacaagtgccactagcgtgcccttcgccgccaccgctacagccaaccagattccaatcatctcagctgagcaccttacatcacacaagtacgtgactcagatgtag

SEQ ID NO: 207267 - DNA, 1149 bp, Artificial Sequence
  derived and/or modified sequence
atggctgtgtctgtgacccccatccgggacaccaagtggctgaccctggaggtgtgccgggagttccagaggggcacctgcagcaggccagacacagagtgcaagtttgcccaccccagcaagagctgccaggtggagaatggccgggtgattgcctgctttgacagcctgaagggccgctgcagccgggagaactgcaagtacctgcaccccccaccccacctgaagacccagctggagatcaatggaagaaacaacctgatccagcagaagaacatggccatgctggcccagcagatgcagctggccaatgccatgatgcctggggcccccctgcagcctgtgcccatgttttctgtggcccccagcctggccaccaatgccagcgctgctgccttcaacccctacctgggccctgtgagccccagcctggtgcctgctgagatcctgcccacagcccccatgctggtgacaggcaaccctggggtgcctgtgcctgctgctgctgctgctgctgcccagaagctgatgaggacagaccggctggaggtgtgccgggagtaccagaggggcaactgcaacagaggagaaaatgactgccgctttgcccaccctgctgacagcaccatgattgacaccaatgacaacacagtgacagtgtgcatggactacatcaagggccgctgcagccgggagaagtgcaagtacttccaccccccagcccacctgcaggccaagatcaaggccgcccagtaccaggtgaaccaggccgctgctgcccaggccgccgccacagctgctgccatgggcatcccccaggccgtgctgccccccctgcccaagaggcctgccctggagaagaccaatggagccacagctgtgttcaacacaggcatcttccagtaccagcaggccctggccaacatgcagctgcagcagcacacagccttcctgcccccaggcagcatcctgtgcatgaccccagccacctctgtggtgcccatggtgcatggagccaccccagccaccgtgtctgctgccaccaccagcgccacctctgtgccctttgctgccacagccacagccaaccagatccccatcatctctgctgagcacctgaccagccacaagtatgtgacccagatgtag

SEQ ID NO: 207268 - DNA, 5465 bp, Artificial Sequence
  derived and/or modified sequence
ccacaatgctcccatgacaaggagctgacaagttccattttccgtcgcgggcatcttggaatcatgactcccacaatgccttgggcacttggtcgacagtggggccgcctctgaaaaaaaaatgtgagaggttggtactaagaagtgcctttcctgacgtctctgctgcttggaaccgcttctagagcagtctctgcttttgccttgcttgctgccagctagactgtgacgacagcacatccaccctccacctctagcccagacacccccatttctacttataatcaagagaaaagctctaagtatctggcattgccctaggctgctttagtgttaaaagaaaagtttgctgaaaaagtaagatatcttctgccaggaaatcaaggaggaaaaaaaaaatcattttctcgattttgctctaaactgctgcatctgtctatgccaaactaatcaataccgattgcaccaccaaactccattgcaaattcagctgtgaggagattccctttcagacaactttgctgaaagcagcttggaaattcggtgtcgaagggtctgccacgttttcatgcttgcattttgggctccaaattggcactgggaaggggttactgagagcacaaggctgataccaggccctacttttaaacgttcatctacttacaatcctagtatttctctaaaaaccaaaacctctttgaattaacagtttcatgctgtgaatttctagtgggagatcttttccttgatattgacgacacaattttccatgtacttttaaagcagggagtggggaaaagtattttgaggggacattttcatcatcagttcagctttttttttttggttgttgctcttttttgggggggttgggtttgttggtttcactgaaacatttaactacctgtaaaatctaaacatggctgttagtgtcacaccaattcgggacacaaaatggctaacactggaagtatgtagagagttccagagggggacttgctcacggccagacacggaatgtaaatttgcacatccttcgaaaagctgccaagttgaaaatggacgagtaatcgcctgctttgattcattgaaaggccgttgctccagggagaactgcaaatatcttcatccacccccacatttaaaaacgcagttggagataaatggacgcaataacttgattcagcagaagaacatggccatgttggcccagcaaatgcaactagccaatgccatgatgcctggtgccccattacaacccgtgccaatgttttcagttgcaccaagcttagccaccaatgcatcagcagccgcctttaatccctatctgggacctgtttctccaagcctggtcccggcagagatcttgccgactgcaccaatgttggttacagggaatccgggtgtccctgtacctgcagctgctgcagctgctgcacagaaattaatgcgaacagacagacttgaggtatgtcgagagtaccaacgtggcaattgcaaccgaggagaaaatgattgtcggtttgctcatcctgctgacagcacaatgattgacaccaatgacaacacagtcactgtgtgtatggattacatcaaagggagatgctctcgggaaaagtgcaaatactttcatccccctgcacatttgcaagccaagatcaaggctgcccaataccaggtcaaccaggctgcagctgcacaggctgcagccaccgcagctgccatgggaattcctcaagctgtacttcccccattaccaaagaggcctgctcttgaaaaaaccaacggtgccaccgcagtctttaacactggtattttccaataccaacaggctctagccaacatgcagttacaacagcatacagcatttctcccaccaggctcaatattgtgcatgacacccgctacaagtgttgttcccatggtgcacggtgctacgccagccactgtgtccgcagcaacaacatctgccacaagtgttcccttcgctgcaacagccacagccaaccagatacccataatatctgccgaacatctgactagccacaagtatgttacccagatgtagaattttcatcactaaacaatcatgctaaagaggaaaggacagtgtgcttggttagagtaaaggacgaggtcattagccatattgtatatatcgtcaagcaacacacacaaaagttcctcagccacaagacatccacatattgcatgttaaccagaagaaaagacaacattttccggaaatccactgcacactgttgcctatacactttgtacatttaattgatatttgtgctgaggtgatattcctgtctaaaagaacaacattgtctttcttttctagcacagagttatgcattcaaagatgcatacctagttagtttcctatatattcatgccatcttgaaaagacagactatggtgtaaccatgattctattatgtattggtacgtctgtagaccaagatataattttttaaaaataagtttatttctttcaaggtttacaaataacaaaggtgcaccttgtatttaaaattgccattatagatgagagcgtgcatgcacagtcatttttgtttaagagtaatatttttaatgtaatagattgtaagacgtggtgagggagggatctgacagagatgaatgtgccaagcaaaaccacaactgtgtatattttaaagcacatcatggctttaagtaccatgttgttaaggattctcatgaagtgccatagactgtacatcaaattagagtattatttcttcagtgttattgttttcagagccacattttgttgcatatttgctagtactaatcagtcaaagggcaccattctttttttttttttttgaaaccaaagctgtctcagaaatggccaatttaactttacagtaacaatagacagcacaacacaaactctctcaatacagataaactcacacatactggagatatatatataatagatatatataaaattattttaatgcattgtagtgtaatatttatgcatactatactgtataacatgttattcaaaagggattgccatttctgagacacagtaacaaaaaaatgaggaaattattttgcttctatttatagcctctgtcaaaagtcaaaagactataaatgctttgcaaaaatggtttcacgtttgcttaaatgcttcatcacagtcacattcaaaatagtgactctaaacaaagaagaaagcagcactgtcatcagatgcatgataaaccaaaatatgaaaatgggaaatgtttaattaacctagtaattgggtgggttaagtacatgggtgaattttatatgtgatttttgttttgttttgttttgttcagattaactgcttatagccttagaaagccttttacaaaattaaaaaaaaaatagatgtgcattcagtttttaagaatggaatcatccaaaggaattcctttttttgaggtttggatgttgcagctagtaaaggatatttttgctctgttcagcagttctaaaaattgctgaagtaggggccaggtcactggtagttatagtatggaatgggagaagtgaaagttcagttatagaactttccatacttccaagtttactgcaagtttttatgcttgagagagatgctttctaatataagactgatgtgttgattttactgattgtactgtacatctattaaagccttagattattacattacgggttggaacccataccaatgtaatttcaatcgtgttaagaaagtaatggtgacttcacatgttattgtagttagttacattatagaatattacttatttttcttgttaaaatgtagtttttcatttcctacatttattagattttcattttctattaacaattgaataccatttcagtttatagacttgttttattagattttaccaatgaatttttcaaaatacaaaaaaaagtagtttttccttcataacatactcagttttgaattacatgtagtgtcacatgaatattcgtattgttaactaaatgatttatattttactgatttaatattacagtgtaagaatgtcagtcattgttagttcttgtctagttttcattaaaagaacaaagatcttttatatggatatcttataaatatataatcattgctaagtaagaagttaagttgttgctatcgcaacaatcctggcagacaattgagtaatattttgatgatttattttgtttgtaattagttattataagaagatctagatcctagatattagaataaaatttattttctactgtatccatttcaaatgttaaaatattgtttaatatttttgaaatccctgagtatcaggccttgttataaataagctgcataatcaataaatagaacaagggactttttgttgataatccaaatactcaaagtttacgtaatgaaaattatagcgtgtgtgcaaactcttgagggttgattatgctgcaatttagcatgttggaacgtctagggagaaggttgactttttgcacttctgtatatagtcaaaagagagaaacctgtataatagtaagatcttattttgaataaaaacgtctataattacaaggagttttgttaaggctaatacaatgacagactgagcaaaattgcttgcaaaagtggcacagagttagcactccataccccttcaaacatgttgctttgctttcttgtggacagcttgtagtttgccaggattttttcagctggaaagatacgccatcctttcaaaccctcatgactgacaaaaactccatggggccaaatctgcctgaagatcattaccaaaaatagcaggtacttctaccattaaggtgaaatcatggatcagatattccttacatttttcaaaactactgcatgtttaaaacttcaacaaaaaaagagagaaagaactatactaagaacatatattattcagatcagtttctgccaatttcagtggtttattgttcacaaaaaaatcttcaaaacaagtattgactttcacaaaatttaaatcataaacaggcaaaccaaacagcacactgtagctatagttgttatgtgattgttttttaattgctgtaggatcctgttctttcagcaggtgaaaaataaaacgcagttcaaatttcatggttttaattttcaactcagaagcactcaaaaatgcaaaatgtgataatgggcacttgtttaaaagaattagtgtatccagccttcactccagctggttaaaaatgttgcacttatcagcaaccctaccactttcatctgctgaaaggacaaatgtgcttggttttactattatgtaatcacaacttactttctgcttgtagttgcttaaaattatgtattttgtcttgggctgcaatttgttttatgcttattttattattactgcagtagttgactttgctgtatggaaaaataaagtgaaattgccctaataaaa

SEQ ID NO: 207269 - DNA, 1149 bp, Artificial Sequence
  derived and/or modified sequence
atggccgtgagcgtgacccccatccgggacaccaagtggctgaccctggaagtctgccgtgagttccagcgcggcacctgcagccggcccgataccgagtgcaaattcgcccacccttctaaatcttgccaggtggagaacggtagagtgatagcctgcttcgattcgttgaaaggccggtgctctagggagaattgcaagtacctgcacccgcctccgcacctgaagactcagctggagatcaatggaaggaacaaccttattcagcagaaaaacatggctatgttggcgcagcagatgcagctggcaaatgcaatgatgccaggggccccgcttcagcctgtgccaatgttctctgtggccccatcattggctaccaatgcaagcgctgctgcctttaatccttacctgggccccgtatcaccaagccttgttccagccgagatcctcccaactgcgcctatgcttgtgaccggcaatcctggagtgccagttccggctgccgcagccgccgccgctcagaaactaatgagaacagaccgcctcgaggtctgtcgtgagtaccaacgagggaattgcaatcgaggtgagaatgactgccgcttcgcgcatccagccgacagtaccatgatagacacgaatgataatacagtgactgtatgcatggattatatcaagggcagatgttcgagagaaaagtgtaaatacttccatccaccagcacacttacaggccaagatcaaggcagcacagtatcaggtgaaccaagccgccgctgcccaggccgccgccactgccgctgctatggggattccccaagccgttctgccccctctccctaagagacctgcccttgaaaaaactaatggggccaccgcagtctttaacaccggcatttttcagtaccagcaggcgttggccaatatgcaactgcagcaacataccgcatttctgccccctggttctatcctttgtatgacccctgcgacgtccgtcgtccctatggtccacggcgccacaccggcaacggtgtccgcggcaactactagtgctacatccgttccctttgccgccacagccactgcaaatcagatcccaatcatctctgccgagcacctgacctcccacaagtacgtgacccagatgtag

SEQ ID NO: 207270 - DNA, 1149 bp, Artificial Sequence
  derived and/or modified sequence
atggctgtttcagtgacgcccattagagatacaaagtggctgacactcgaggtgtgcagggaatttcaaagggggacttgtagcagacctgataccgagtgcaaattcgctcatccctccaaatcttgccaagtcgaaaacggtagggtgatcgcttgcttcgactccctgaaagggaggtgctcaagagagaattgtaagtatctgcatccacctcctcacctcaagacacaactggaaatcaatggccgtaacaatctcatccagcagaaaaatatggccatgctggcacagcagatgcagctggccaacgcaatgatgcccggagcgccattgcagcccgtgcccatgttctccgtcgctccctcgctggccacaaacgcatctgcggctgcctttaacccttatttgggacccgtctccccatccctggtccccgctgagattctgccgactgcccctatgctggtaactggcaaccccggagtccccgtgcccgcagccgcagctgctgccgctcagaaactgatgaggacagacagacttgaggtttgtcgagaataccagcgtggcaattgcaatcgtggagaaaatgattgcagatttgcccacccagcagacagtactatgatcgataccaacgataatacagtgactgtgtgcatggattatatcaaaggaagatgctcccgggaaaaatgtaagtactttcatcccccagcacatctccaggccaagattaaagctgcccaatatcaggtgaaccaggcagctgctgctcaggccgcagcgacagcagccgctatgggtattccgcaagctgtcctaccccctctgcctaagaggcctgccctggaaaaaaccaatggcgcaacagcagtttttaatacagggatattccagtaccagcaagcactggctaacatgcagctacagcagcacacggccttccttcctccgggttcgattctgtgcatgactcctgctacctcagtggtacccatggttcacggggctacacccgcaacagtgagcgccgctaccaccagcgcgacttccgtgccctttgccgctacagccaccgccaatcagatcccaattatatccgctgagcacctaacgagtcataagtatgtcacccagatgtag

SEQ ID NO: 207271 - DNA, 1149 bp, Artificial Sequence
  derived and/or modified sequence
atggccgtgagcgtgacccccatcagagacaccaagtggctgaccctggaggtgtgcagagagttccagagaggcacctgcagcagacccgacaccgagtgcaagttcgcccaccccagcaagagctgccaggtggagaacggcagagtgatcgcctgcttcgacagcctgaagggcagatgcagcagagagaactgcaagtacctgcacccccccccccacctgaagacccagctggagatcaacggcagaaacaacctgatccagcagaagaacatggccatgctggcccagcagatgcagctggccaacgccatgatgcccggcgcccccctgcagcccgtgcccatgttcagcgtggcccccagcctggccaccaacgccagcgccgccgccttcaacccctacctgggccccgtgagccccagcctggtgcccgccgagatcctgcccaccgcccccatgctggtgaccggcaaccccggcgtgcccgtgcccgccgccgccgccgccgccgcccagaagctgatgagaaccgacagactggaggtgtgcagagagtaccagagaggcaactgcaacagaggcgagaacgactgcagattcgcccaccccgccgacagcaccatgatcgacaccaacgacaacaccgtgaccgtgtgcatggactacatcaagggcagatgcagcagagagaagtgcaagtacttccacccccccgcccacctgcaggccaagatcaaggccgcccagtaccaggtgaaccaggccgccgccgcccaggccgccgccaccgccgccgccatgggcatcccccaggccgtgctgccccccctgcccaagagacccgccctggagaagaccaacggcgccaccgccgtgttcaacaccggcatcttccagtaccagcaggccctggccaacatgcagctgcagcagcacaccgccttcctgccccccggcagcatcctgtgcatgacccccgccaccagcgtggtgcccatggtgcacggcgccacccccgccaccgtgagcgccgccaccaccagcgccaccagcgtgcccttcgccgccaccgccaccgccaaccagatccccatcatcagcgccgagcacctgaccagccacaagtacgtgacccagatgtag

SEQ ID NO: 207272 - protein, 396 aa, Artificial Sequence
  derived and/or modified sequence
MALLTNLLPLCCLALLALPAQSCGPGRGPVGRRRYARKQLVPLLYKQFVPGVPERTLGASGPAEGRVARGSERFRDLVPNYNPDIIFKDEENSGADRLMTERCKERVNALAIAVMNMWPGVRLRVTEGWDEDGHHAQDSLHYEGRALDITTSDRDRNKYGLLARLAVEAGFDWVYYESRNHVHVSVKADNSLAVRAGGCFPGNATVRLWSGERKGLRELHRGDWVLAADASGRVVPTPVLLFLDRDLQRRASFVAVETEWPPRKLLLTPWHLVFAARGPAPAPGDFAPVFARRLRAGDSVLAPGGDALRPARVARVAREEAVGVFAPLTAHGTLLVNDVLASCYAVLESHQWAHRAFAPLRLLHALGALLPGGAVQPTGMHWYSRLLYRLAEELLG

SEQ ID NO: 207273 - DNA, 1191 bp, Artificial Sequence
  derived and/or modified sequence
atggctctccttacaaatctgctgcccttgtgttgtctagcgctactggcactacccgctcagagctgcgggcctgggcgcggtcccgtcggtcggaggaggtacgccagaaaacaacttgttcccctcctgtataagcagttcgtgcccggcgtgcccgagagaaccctaggagcaagcggaccagctgagggccgggtggcccgtggttcagaacggtttagggatctggttccaaattataatccagacattatctttaaggatgaggaaaactctggggcagatcgcttgatgacagagaggtgtaaagagagggttaatgccctggctatcgccgtgatgaacatgtggcctggcgttcgcctgcgcgtaacagaagggtgggacgaggatggacatcacgcacaggattctcttcattacgaggggagagctttggacattactacaagtgacagagatcgtaataagtacggcctgcttgcacggttggccgttgaggctggctttgactgggtctactacgaatcacgtaaccatgtgcatgtaagtgtcaaagccgacaacagcctggccgtgcgtgctggaggatgttttccagggaatgccaccgtgcgcctgtggagcggcgagcgtaaaggactgcgcgagctgcataggggggactgggtgcttgccgctgacgcttcaggccgcgttgttccgacacctgtgttgctgtttctcgatagggacctacagagacgggcctcctttgttgccgtggagacagagtggccgccgagaaagttgcttctgactccatggcacctggtcttcgccgctcggggccctgcccccgcaccgggcgacttcgcccccgtattcgccagacggctaagggcgggtgactccgtgctggcccccgggggcgacgcgctgaggcctgcacgggtggcacgggtcgcaagggaagaagccgtgggggtctttgccccactgacagctcatggtactctgctcgtcaatgacgtgctcgccagctgttatgccgtgttagagtcccaccagtgggctcacagagcatttgctccacttcgtctcctgcacgcgctcggggctcttctgccaggaggagctgtgcagcctacggggatgcactggtattccagactgttgtacaggctggcggaggagctgctcggctag

SEQ ID NO: 207274 - DNA, 1191 bp, Artificial Sequence
  derived and/or modified sequence
atggccctgctgaccaacctgctgcccctgtgctgcctggccctgctggccctgcctgcccagagctgtggccctggccggggccctgtgggcagaagaagatatgccaggaagcagctggtgcccctgctgtacaagcagtttgtgcctggggtgcctgagaggaccctgggcgccagcggccctgctgagggccgggtggcccggggcagcgagcgcttccgggacctggtgcccaactacaacccagacatcatcttcaaggatgaagaaaattctggagctgaccggctgatgacagagcgctgcaaggagcgggtgaatgccctggccatcgctgtgatgaacatgtggccaggagtgcggctgcgggtgacagagggctgggatgaagatggccaccacgcccaggacagcctgcactatgagggccgggccctggacatcaccaccagtgaccgggacaggaacaagtatggcctgctggcccggctggccgtggaggccggctttgactgggtgtactatgagagcagaaatcatgtgcacgtgtctgtgaaggctgacaacagcctggccgtgcgggccggcggctgcttccctggaaatgccaccgtgcggctgtggagcggggagaggaagggcctgcgggagctgcacagaggagactgggtgctggccgcagatgccagcggccgggtggtgcccacccctgtgctgctcttcctggaccgggacctgcagaggcgggccagctttgtggccgtggagacagagtggccacccaggaagctgctgctgaccccctggcacctggtgtttgctgcccggggccctgccccagcccctggggactttgcccctgtgtttgcccggcggctgcgggccggggacagcgtgctggcccctggaggagatgccctgcggcctgcccgggtggcccgggtggcccgggaggaggccgtgggcgtgtttgcccccctgacagcccacggcaccctgctggtgaatgatgtgctggccagctgctatgctgtgctggagagccaccagtgggcccaccgggcctttgcccccctgcggctgctgcacgccctgggcgccctgctgcctggaggagctgtgcagcccaccggcatgcactggtacagccggctgctgtaccgcctggccgaggagctgctgggctag

SEQ ID NO: 207275 - DNA, 1191 bp, Artificial Sequence
  derived and/or modified sequence
atggccctgctgaccaacctgctgcccctgtgctgcctggccctgctggctctgcctgctcagagttgtggccctggacggggaccggtcggtcggcgccggtacgctagaaaacagttggtgcctctcctatacaagcagtttgtgcctggcgtgccagaaaggacactgggcgcctcaggtccagccgaggggcgcgtggcacgcggaagtgagcgttttcgcgatcttgtgccgaattataacccagatataatattcaaggacgaggaaaattccggtgctgacagactcatgacagaaagatgtaaggagcgggtcaacgccttggcgatcgcagtcatgaatatgtggccaggtgtgcgcctgcgtgttaccgaaggatgggacgaggatggccaccacgcccaggactctttgcattacgaaggccgtgcattagatatcactacgagtgatcgggacagaaataagtacggactgctggcgaggttggccgtcgaggccggattcgactgggtgtactacgaatcgcgcaatcacgtgcatgtgtccgtcaaggccgacaacagtctcgctgtgagggctgggggttgttttcctgggaacgcgactgtcaggctgtggagcggagagcggaaagggctcagagagctgcacaggggcgactgggtgctggctgctgacgcaagtggtagagtggtgcccacccctgtgttactgtttctggatcgagatctgcaaaggcgggcttcatttgtcgccgtcgaaacagaatggcccccaaggaagctgctgctgaccccttggcatctggtttttgccgccagaggtccagcccctgccccgggggacttcgctccagttttcgcacgacggcttcgcgcgggagattcagtgcttgctccaggaggagatgcactgcgccccgctagggtggctcgggtagcccgagaagaagccgttggtgtcttcgcccctctgaccgcacacgggactctgctcgtgaatgacgtccttgcttcctgctacgctgtccttgagagtcatcagtgggctcatcgagccttcgcccctcttcggcttctgcatgcacttggtgccctgctgcctgggggggctgtacagccgaccggtatgcactggtactcccgcctgctgtataggttagcagaggaactgctgggatag

SEQ ID NO: 207276 - DNA, 1191 bp, Artificial Sequence
  derived and/or modified sequence
atggcactgctaacaaacttacttccactatgttgcctggcgctgttggcactaccagcccagtcgtgcggtcctgggagaggacctgtgggccgaaggcgctacgctcgcaaacagctagtcccactgctttataaacagttcgtgccgggtgttccagagcgcactcttggggcttctggccctgctgaaggtagggtggcccgtggatccgaacggttccgggatttggttccgaactacaatcctgacatcatcttcaaggatgaggagaattccggagccgaccgcctgatgacagaacggtgcaaggagcgcgtgaatgcactggccattgccgtgatgaacatgtggcctggcgttcggctgcgggtaaccgaggggtgggatgaggatgggcaccacgcccaagattctttacactacgagggaagggcactggatatcactacatcagaccgcgatcgaaacaagtacggcctactggcgaggcttgccgtcgaggccggattcgactgggtttactacgagtctcgaaatcacgtgcatgtctccgtcaaggccgacaatagtctggctgtgagagcgggtggctgttttccagggaacgctaccgtccgtctgtggtctggcgagcggaagggcctccgagaacttcaccgtggcgactgggtgctcgcagctgacgcaagcgggagagtagtgcccacaccagttctgctgttcctggacagagaccttcagaggcgcgcatcgttcgtagctgtagaaacggaatggccaccgcgaaagttgctgctgaccccctggcacctggtctttgctgccagggggccagcgccagctccgggagattttgcgccagtttttgctaggcggcttcgcgctggcgattccgtactggcacctggcggtgatgccctgcggcctgcacgggtcgctcgggtggcccgagaagaggccgtcggggtttttgccccactgactgcacacggaacactcttggtaaatgatgtgctcgcttcttgttacgccgtgctggaatctcatcagtgggcccaccgggcatttgctcccctgaggctgctccacgctctgggggctctgttaccgggaggcgcagtgcagccgaccggaatgcattggtactcccgtcttctgtatcgactcgcagaggagctcctgggatag

SEQ ID NO: 207277 - DNA, 1191 bp, Artificial Sequence
  derived and/or modified sequence
atggccctgctgaccaacctgctgcccctgtgctgcctggccctgctggccctgcccgcccagagctgcggccccggcagaggccccgtgggcagaagaagatacgccagaaagcagctggtgcccctgctgtacaagcagttcgtgcccggcgtgcccgagagaaccctgggcgccagcggccccgccgagggcagagtggccagaggcagcgagagattcagagacctggtgcccaactacaaccccgacatcatcttcaaggacgaggagaacagcggcgccgacagactgatgaccgagagatgcaaggagagagtgaacgccctggccatcgccgtgatgaacatgtggcccggcgtgagactgagagtgaccgagggctgggacgaggacggccaccacgcccaggacagcctgcactacgagggcagagccctggacatcaccaccagcgacagagacagaaacaagtacggcctgctggccagactggccgtggaggccggcttcgactgggtgtactacgagagcagaaaccacgtgcacgtgagcgtgaaggccgacaacagcctggccgtgagagccggcggctgcttccccggcaacgccaccgtgagactgtggagcggcgagagaaagggcctgagagagctgcacagaggcgactgggtgctggccgccgacgccagcggcagagtggtgcccacccccgtgctgctgttcctggacagagacctgcagagaagagccagcttcgtggccgtggagaccgagtggccccccagaaagctgctgctgaccccctggcacctggtgttcgccgccagaggccccgcccccgcccccggcgacttcgcccccgtgttcgccagaagactgagagccggcgacagcgtgctggcccccggcggcgacgccctgagacccgccagagtggccagagtggccagagaggaggccgtgggcgtgttcgcccccctgaccgcccacggcaccctgctggtgaacgacgtgctggccagctgctacgccgtgctggagagccaccagtgggcccacagagccttcgcccccctgagactgctgcacgccctgggcgccctgctgcccggcggcgccgtgcagcccaccggcatgcactggtacagcagactgctgtacagactggccgaggagctgctgggctag

SEQ ID NO: 207278 - DNA, 1936 bp, Artificial Sequence
  derived and/or modified sequence
gtccggagtccgggcgttctggcagcaccagagtcctgcagcagagacgggctgggctggcactcacccacgaccccccttccctgctatgatggtttgtcagtagcaggtcctagacaccccccgcccgctcccggggcacgtgggcagagctagcagcagccaggtgcacggagccacaagagctctagggcactctgggggcagctgtgcctgctgccctctctggtgcctgtggagatgcctaactgacaggagagttagtgaggacaagaacgctcccttttggccgaggtccgctgtatccatggctctcctgaccaatctactgcccctgtgctgcttggcacttctggcgctgccagcccagagctgcgggccgggccgggggccggttggccggcgccgctatgcgcgcaagcagctcgtgccgctactctacaagcaatttgtgcccggcgtgccagagcggaccctgggcgccagtgggccagcggaggggagggtggcaaggggctccgagcgcttccgggacctcgtgcccaactacaaccccgacatcatcttcaaggatgaggagaacagtggagccgaccgcctgatgaccgagcgttgtaaggagcgggtgaacgctttggccattgccgtgatgaacatgtggcccggagtgcgcctacgagtgactgagggctgggacgaggacggccaccacgctcaggattcactccactacgaaggccgtgctttggacatcactacgtctgaccgcgaccgcaacaagtatgggttgctggcgcgcctcgcagtggaagccggcttcgactgggtctactacgagtcccgcaaccacgtccacgtgtcggtcaaagctgataactcactggcggtccgggcgggcggctgctttccgggaaatgcaactgtgcgcctgtggagcggcgagcggaaagggctgcgggaactgcaccgcggagactgggttttggcggccgatgcgtcaggccgggtggtgcccacgccggtgctgctcttcctggaccgggacttgcagcgccgggcttcatttgtggctgtggagaccgagtggcctccacgcaaactgttgctcacgccctggcacctggtgtttgccgctcgagggccggcgcccgcgccaggcgactttgcaccggtgttcgcgcgccggctacgcgctggggactcggtgctggcgcccggcggggatgcgcttcggccagcgcgcgtggcccgtgtggcgcgggaggaagccgtgggcgtgttcgcgccgctcaccgcgcacgggacgctgctggtgaacgatgtcctggcctcttgctacgcggttctggagagtcaccagtgggcgcaccgcgcttttgcccccttgagactgctgcacgcgctaggggcgctgctccccggcggggccgtccagccgactggcatgcattggtactctcggctcctctaccgcttagcggaggagctactgggctgagcgtcccaggcatagaaacctcgaagcgcccgaggaaacgagggcctgctggctgagatatggggctgtgggcagcagacgatgccgactggaagggagggagagggagggggagggagaaaatggggctatgcctggcttaggggcaacctcgtactgagaggaggtgataccgggtcctaggtaggtagggctgatggtgcgcactccttaaagaggactatttagcctctcccccagtgcttcagccccacccgataattttattttatttcttatttataaattgtaatataatgattcccttgcccagcttgccaaggtgaggggctggggcatggcattaacactgtctgacacagccagccagtctgacatctgacgttttcctgcaaggtgggctaataaagggaaggctttcaggagcttactggaaaa

SEQ ID NO: 207279 - protein, 499 aa, Artificial Sequence
  derived and/or modified sequence
MGPLQFRDVAIEFSLEEWHCLDTAQRNLYRDVMLENYRNLVFLGIVVSKPDLVTCLEQGKKPLTMERHEMIAKPPVMSSHFAQDLWPENIQNSFQIGMLRRYEECRHDNLQLKKGCKSVGEHKVHKGGYNGLNQCLTTTQKEIFQCDKYGKVFHKFSNSNTYKTRHTGINLFKCIICGKAFKRSSTLTTHKKIHTGEKPYRCEECGKAFNQSANLTTHKRIHTGEKPYRCEECGKAFKQSSNLTTHKKIHTGEKPYKCEECGKAFNRSTDLTTHKIVHTGEKPYKCEECGKAFKHPSHVTTHKKIHTRGKPYNCEECGKSFKHCSNLTIHKRIHTGEKPYKCEECGKAFHLSSHLTTHKILHTGEKPYRCRECGKAFNHSTTLFSHEKIHTGEKPYKCDECGKTFTWPSILSKHKRTHTGEKPYKCEECGKSFTASSTLTTHKRIHTGEKPYKCEECGKAFNWSSDLNKHKKIHIERKPYIVKNVTDLLNVPPLLISIR

SEQ ID NO: 207280 - DNA, 2351 bp, Artificial Sequence
  derived and/or modified sequence
ctgtgcttatagaggcccgtcctctgtggccgtgtgacctgcaagtattgggagagccacagctaaaccccgggacccctggaagcctagaaatgggaccattgcaatttagagatgtggccatagaattctctctggaggagtggcattgcctggacactgcacagcggaatttatatagggatgtgatgttagagaactacagaaacttggtcttccttggtattgttgtctctaagccagacctggttacctgtctggagcaaggaaaaaaacctttaactatggaaagacatgagatgattgccaaacccccagttatgagttctcattttgcccaagacctttggccagagaacatacaaaattctttccaaatagggatgctgagaagatatgaagaatgcagacatgacaatttacagttaaaaaaaggctgtaaaagcgtgggtgagcataaggtgcacaaaggaggttataatggacttaaccaatgtttgacaactacccagaaagaaatatttcaatgtgataaatatggaaaagtctttcataagttttcaaattcaaacacatataagacaagacatactggaataaatcttttcaaatgtataatatgtggcaaagcttttaaacggtcctcaacccttactacacataagaaaattcatactggagagaaaccttacagatgtgaagaatgtggcaaagcttttaaccaatctgcaaaccttactacacataagagaattcataccggagagaaaccctacagatgtgaagaatgtggcaaagcctttaagcagtcctcaaaccttactacacataagaaaattcatactggagagaaaccctacaaatgtgaagaatgtggcaaagccttcaaccgatccacagaccttactacacataagatagttcatactggagagaaaccctacaaatgtgaagaatgtggcaaagcctttaagcacccctcacacgttaccacacataagaaaattcatactagagggaaaccctacaactgtgaagaatgtggcaaatcctttaagcactgctctaaccttactatacataagagaattcatacaggagagaaaccctacaaatgtgaagaatgtggcaaagcctttcacctatcctcacaccttactacacataagatacttcatactggagagaaaccctacagatgtagagaatgtggcaaagcttttaaccattccacaacccttttttcacatgagaaaattcatactggagagaaaccctacaaatgtgatgaatgtggcaaaacctttacctggccctcaatcctctccaaacataaaagaactcatactggagagaaaccctacaaatgtgaagaatgtggcaaatcctttactgcatcctcaactctaactacacataagagaattcatactggagagaaaccttacaaatgtgaagaatgtggcaaagcttttaactggtcctcagaccttaataaacataagaaaattcatattgaacgaaaaccctacatagtgaagaatgtgacagatcttttaaatgttcctccacttttaattagcataagataattcatactggagagaaaccctatgaatgtgatgaatgtgggaaagcctttaaccagccctcgactcttagtaaatttgagagtttatatggaacacaaaccctacaaatataaagaatgtgacaaagctttttaaggaagttctcaacccttattacacataattcataccaaacagaagccctacaagtgtgaagaatgtggcaaaacctataaacctataacaagttctcaattcctttttttttgagatggagtttcactcttgtcaccgaggctggagtgcaatgacatgatctccgttcactgcaatctctgcctcctgggtttaagccattcttctgcctcagcctcccaagtagctgggattacaggtgcccaacaccacgcctggctaatttttggatttttagtagagatggggtttcacaatgttggccaggctggtctcgaactcctgacctcaggtgatccacctgccttggccttccaaagtgctggggttacaggcgtgagccaccatgcctggctacaagttcttaattcttaagagacaccatgcctggctacaagttcttaattcttaagagacatggcgataattcatgctgaagaggaaatctggaaacctgaaagatgcgacattgcttttaccaacacctccacatttcctatacataaaaataaattatactagtgtaataccctagaaatgtataaaatgtgacaaagcctttaaaaaaaaaaaaaaaaaaaaaaa

SEQ ID NO: 207281 - DNA, 1500 bp, Artificial Sequence
  derived and/or modified sequence
atgggccccctgcagttcagagacgtggccatcgagttcagcctggaggagtggcactgcctggacaccgcccagagaaacctgtacagagacgtgatgctggagaactacagaaacctggtgttcctgggcatcgtggtgagcaagcccgacctggtgacctgcctggagcagggcaagaagcccctgaccatggagagacacgagatgatcgccaagccccccgtgatgagcagccacttcgcccaggacctgtggcccgagaacatccagaacagcttccagatcggcatgctgagaagatacgaggagtgcagacacgacaacctgcagctgaagaagggctgcaagagcgtgggcgagcacaaggtgcacaagggcggctacaacggcctgaaccagtgcctgaccaccacccagaaggagatcttccagtgcgacaagtacggcaaggtgttccacaagttcagcaacagcaacacctacaagaccagacacaccggcatcaacctgttcaagtgcatcatctgcggcaaggccttcaagagaagcagcaccctgaccacccacaagaagatccacaccggcgagaagccctacagatgcgaggagtgcggcaaggccttcaaccagagcgccaacctgaccacccacaagagaatccacaccggcgagaagccctacagatgcgaggagtgcggcaaggccttcaagcagagcagcaacctgaccacccacaagaagatccacaccggcgagaagccctacaagtgcgaggagtgcggcaaggccttcaacagaagcaccgacctgaccacccacaagatcgtgcacaccggcgagaagccctacaagtgcgaggagtgcggcaaggccttcaagcaccccagccacgtgaccacccacaagaagatccacaccagaggcaagccctacaactgcgaggagtgcggcaagagcttcaagcactgcagcaacctgaccatccacaagagaatccacaccggcgagaagccctacaagtgcgaggagtgcggcaaggccttccacctgagcagccacctgaccacccacaagatcctgcacaccggcgagaagccctacagatgcagagagtgcggcaaggccttcaaccacagcaccaccctgttcagccacgagaagatccacaccggcgagaagccctacaagtgcgacgagtgcggcaagaccttcacctggcccagcatcctgagcaagcacaagagaacccacaccggcgagaagccctacaagtgcgaggagtgcggcaagagcttcaccgccagcagcaccctgaccacccacaagagaatccacaccggcgagaagccctacaagtgcgaggagtgcggcaaggccttcaactggagcagcgacctgaacaagcacaagaagatccacatcgagagaaagccctacatcgtgaagaacgtgaccgacctgctgaacgtgccccccctgctgatcagcatcagatag

SEQ ID NO: 207282 - DNA, 1500 bp, Artificial Sequence
  derived and/or modified sequence
atggggcctcttcaattcagagacgtcgctattgaattctcactggaagagtggcattgtctggacactgcacagcgcaacctgtaccgcgacgtgatgctggagaactatagaaacctggtcttccttggaatcgttgtaagcaaacccgatctggtgacatgtttggagcaggggaagaaacccctcaccatggagcgtcacgagatgatcgccaagccaccggtcatgtccagccacttcgcccaagatttgtggccggaaaacatacagaacagctttcagattggcatgctgcggcggtatgaggagtgccgccatgataaccttcagctgaagaagggctgtaagtctgtaggagagcacaaagtgcacaagggaggttacaatggtcttaaccaatgcttgactaccacccagaaagagatcttccaatgcgacaagtacggcaaggtgtttcacaagtttagcaattcaaacacctataagacaaggcatacaggtattaacttgtttaaatgcatcatatgtggaaaggcgttcaagagaagttccaccttgactacccataaaaagatccacaccggcgagaagccctacaggtgcgaggaatgtggaaaagccttcaaccagtccgctaatctgactactcacaagcgaattcacactggagaaaagccgtatagatgtgaggagtgtgggaaggccttcaaacaaagttctaacctgactacgcacaagaagatccacactggagagaaaccctacaaatgtgaggaatgtggaaaagctttcaatagatcaaccgacctcacaacacataaaatagtgcacaccggcgaaaaaccttataagtgtgaggagtgcggcaaggctttcaagcatccaagtcacgtgaccacccacaaaaaaatccacacaagggggaagccttacaattgtgaagaatgcggtaaatccttcaaacactgctcaaaccttaccatccataaacgaatccacacgggagaaaaaccttacaagtgcgaggaatgcgggaaagccttccatctgtcctcacatctgaccactcataaaatcctccacacaggggaaaaaccctatcgctgcagggaatgtgggaaggccttcaatcatagcaccactctgttctcccacgaaaaaatccacacaggcgagaagccgtataagtgcgacgagtgtggcaagacttttacatggccaagtattctgagcaagcataaaagaactcatacaggcgaaaaaccctacaagtgtgaagagtgcggaaagtcttttaccgccagtagcacactaacgacacacaagcgcatacacactggagagaagccttataaatgtgaagagtgcggaaaagcattcaattggtcctcagacctaaataaacataaaaagattcacatcgagcggaagccttacattgtaaaaaacgttacagacctactgaatgtcccaccactgcttatctcaatccgctag

SEQ ID NO: 207283 - DNA, 1500 bp, Artificial Sequence
  derived and/or modified sequence
atgggtccgttgcagttccgggacgtagccatagagttttctctggaagaatggcattgtctggacacggctcagaggaacctgtacagagacgtgatgctggaaaattaccgaaatctcgtcttcctcggaatcgtggtcagcaagcctgatttagttacttgcctagaacaaggcaagaagcctctaaccatggagaggcacgagatgattgccaaaccacctgttatgtcaagccacttcgcacaggatctctggcctgaaaacattcagaacagcttccagatcgggatgttgagacggtacgaggagtgtcgtcacgacaacctgcagctcaagaagggatgtaagtccgtcggtgagcacaaggtgcacaagggcgggtacaatggcctcaatcagtgtctgaccaccacccagaaggaaattttccagtgtgacaagtacggcaaggtgtttcacaaattctcaaatagtaatacctataagacaagacacacagggataaacctgttcaagtgcattatatgtggtaaggcctttaaaagatcaagtaccctgacaacgcacaaaaagattcatacaggagagaaaccctaccggtgtgaggaatgtggcaaagccttcaaccagtccgccaacctcacaacccacaaaaggattcatactggagagaagccatataggtgtgaggagtgcggcaaggccttcaaacagagctccaacctgactacccacaagaagattcatactggtgagaaaccgtacaaatgcgaggaatgcggtaaggccttcaacaggtccactgacctgacaacccacaagatcgtgcacacgggggagaagccatacaaatgcgaagaatgtggcaaggccttcaagcatccttcccatgttactacccacaaaaaaatccatactagggggaagccctataactgcgaggagtgcgggaagagctttaaacattgtagcaacctcactatccataaacggatccataccggcgagaagccatacaagtgcgaggagtgcgggaaggcctttcatctctcgtctcatctgaccactcataagatattgcataccggggagaagccttatagatgtcgggaatgcggtaaggccttcaaccattcgaccaccctgttttctcacgagaagatacacacgggagaaaagccatataagtgcgatgagtgcggtaagacctttacgtggccaagtatcctgtccaaacacaagaggacacacacaggcgagaaaccgtataagtgtgaggagtgtggaaaatccttcactgctagctctaccctcaccacacacaagcgaatccacactggagagaagccttataagtgtgaagaatgtgggaaggcctttaattggtcctccgacttaaataagcataaaaaaatccacattgaacgcaaaccatacattgtgaagaacgtcacagatctactgaatgtgcctcctctactgatctcaattcgctag

SEQ ID NO: 207284 - DNA, 1500 bp, Artificial Sequence
  derived and/or modified sequence
atgggccccctgcagttcagagatgtggccatcgagttcagcctggaggagtggcactgcctggacacagcccagaggaacctgtacagagatgtgatgctggagaactacagaaacctggtgttcctgggcatcgtggtgtccaagccagacctggtgacctgcctggagcagggcaagaagcccctgaccatggagagacatgagatgattgccaagccccctgtgatgagcagccactttgcccaggacctgtggccagagaacatccagaacagcttccagatcggcatgctgcggcgctatgaggagtgcagacatgacaacctgcagctgaagaagggctgcaagtctgtgggggagcacaaggtgcacaagggcggctacaacggcctgaaccagtgcctgaccaccacccagaaggagatcttccagtgtgacaagtatggcaaggtgttccacaagttcagcaacagcaacacctacaagaccaggcacacaggcatcaacctcttcaagtgcatcatctgtgggaaggccttcaagaggagcagcaccctgaccacccacaagaagatccacactggagagaagccctaccgctgtgaggagtgtgggaaggccttcaaccagagcgccaacctgaccacccacaagaggatccacactggagagaagccctaccgctgtgaggagtgtgggaaggccttcaagcagagcagcaacctgaccacccacaagaagatccacactggagagaagccctacaagtgtgaggagtgtgggaaggccttcaacagaagcacagacctgaccacccacaagatcgtgcacactggagagaagccctacaagtgtgaggagtgtgggaaggccttcaagcaccccagccacgtgaccacccacaagaagatccacacccggggcaagccctacaactgtgaggagtgtgggaagagcttcaagcactgcagcaacctgaccatccacaagaggatccacactggagagaagccctacaagtgtgaggagtgtgggaaggccttccacctgagcagccacctgaccacccacaagatcctgcacactggagagaagccctaccgctgccgggagtgtgggaaggccttcaaccacagcaccaccctcttcagccatgagaagatccacactggagagaagccctacaagtgtgatgaatgtgggaagaccttcacctggcccagcatcctgagcaagcacaagaggacccacactggagagaagccctacaagtgtgaggagtgtgggaagagcttcaccgccagcagcaccctgaccacccacaagaggatccacactggagagaagccctacaagtgtgaggagtgtgggaaggccttcaactggagcagtgacctgaacaagcacaagaagatccacattgaaaggaagccctacatcgtgaagaatgtgacagacctgctgaatgtgccccccctgctgatcagcatcagatag

SEQ ID NO: 207285 - DNA, 1500 bp, Artificial Sequence
  derived and/or modified sequence
atgggccccctgcagttccgggacgtggccatcgagttcagcctggaagaatggcactgtctcgatactgcacagagaaatctgtacagggatgtgatgctggagaattatcggaatctcgtctttctcggcattgtggtgagcaagccagaccttgtcacatgcctggagcaaggaaagaaaccgctcacaatggagaggcacgaaatgatcgccaagccacctgtgatgagcagtcacttcgcccaggatctctggcctgagaacatacagaacagtttccagatcggaatgctgaggcgctacgaggaatgtcgtcacgacaacctccaacttaaaaagggatgtaaaagcgtgggagagcataaagtgcataaaggcggctacaatggcttaaaccagtgtctgacaaccacacagaaagagattttccaatgcgacaagtatgggaaagtctttcataaattttctaactccaacacctataaaacgagacatacagggatcaatttattcaagtgcattatttgcgggaaggccttcaagagatcatctactctgacaactcacaagaagatacacaccggtgagaagccatacagatgcgaagagtgtggcaaagcctttaaccaaagtgcaaatctgaccacccacaaacggatccacaccggcgaaaagccctacaggtgcgaggaatgtggtaaggctttcaagcaatctagtaacctgacaacgcataaaaagatccataccggcgagaagccttacaagtgcgaggaatgcggaaaagccttcaataggagcacagatttaacaacgcacaaaatagtccatactggggagaaaccctataagtgtgaggaatgcgggaaggccttcaagcacccatctcatgtgaccactcacaaaaaaattcacacccgcggtaagccgtataattgtgaagagtgcggcaaatcttttaagcactgctcaaatctgacaatccataaacgaattcatactggagaaaagccatacaaatgtgaagagtgcggaaaagcattccatctctcttcccacttaaccacacataagatcctccatactggggaaaaaccctatcgctgtagggagtgcggcaaggcttttaatcatagcaccactctgttcagccatgagaaaatccacaccggggagaagccatacaaatgcgacgaatgcgggaaaacctttacctggccttctatcttatctaagcacaaacgaacgcacacgggggagaaaccctataaatgtgaggagtgtgggaaatctttcactgcctccagtacccttactacccataagagaatacatacaggggagaaaccttataaatgcgaagagtgcgggaaggctttcaattggagttcagatctgaataagcacaagaagattcatatagagcggaaaccctatattgtcaaaaatgtaaccgatctcctgaatgtacctcctctactgattagcattcgttag

SEQ ID NO: 207286 - DNA, 1500 bp, Artificial Sequence
  derived and/or modified sequence
atgggccccctgcagttccgggacgtggccatcgagttcagcctggaagagtggcactgtctcgatacggcacagcggaatctttaccgcgacgtaatgctggaaaattataggaatctcgtgttcttgggcatcgtagtgagtaaaccagacctcgtcacatgccttgaacaagggaaaaagccgctgacaatggagcgccacgaaatgattgctaaaccccctgtgatgagctctcattttgcgcaggacctgtggcccgaaaacatacagaattcttttcagatagggatgctgcgaaggtacgaggagtgccgccacgacaatctccagttgaagaagggttgtaagagcgtcggcgaacacaaagtgcataaggggggatacaatgggctgaatcagtgcttgactacaacgcaaaaagagatcttccagtgcgataaatatggtaaagtattccacaagtttagcaattctaacacctacaaaacccgtcataccggcataaacttgtttaaatgtattatttgtgggaaggcattcaagcggtcttccactctgacaacgcataaaaagatccacacaggagaaaaaccttatcgctgtgaagagtgtgggaaagcctttaaccagtcagccaatttaactactcacaaacggattcacaccggagaaaagccatacagatgcgaggagtgcgggaaagcttttaagcagagctctaatctcacaacccacaaaaagattcacactggggaaaaaccgtacaaatgcgaggaatgcggcaaagctttcaaccggtccaccgacctgaccacgcacaagattgtgcacaccggagagaaaccttacaaatgtgaggagtgtggtaaggcatttaaacatccgagtcacgttaccacacacaaaaagatccacacccgcgggaaaccatacaactgcgaagagtgcggcaagtcctttaagcattgttcgaatttaactattcacaagcgaatacataccggagagaagccttataagtgcgaggagtgcggtaaagcctttcatctgagcagccacctgacaacacacaagattctacacaccggtgaaaagccgtatcgatgtagagagtgtgggaaagctttcaaccacagcacaacactattttcgcacgagaaaatccacactggagaaaaaccgtataagtgtgacgaatgcggcaagaccttcacctggccttcgattttgtccaagcacaaacgcacccatacaggcgaaaagccctacaaatgcgaggagtgcggcaagtcttttacagcctcgagtaccttaaccacacacaagcgcatccacaccggagaaaagccatacaagtgtgaggagtgcggcaaggccttcaattggtcatctgacctgaacaagcacaaaaaaatacatattgaaaggaaaccctatattgtgaagaatgtgaccgatttgctgaacgtgccccccttgctgatctcaatccggtag

SEQ ID NO: 207287 - DNA, 1500 bp, Artificial Sequence
  derived and/or modified sequence
atgggacctttgcagtttcgtgacgtggctatcgaattctccctggaggaatggcactgcctggacaccgcccagaggaatctttatagagatgtgatgctagaaaattacagaaatctggtcttcttgggcatcgttgtgtcaaagcccgacctcgttacttgtctcgaacagggcaagaaaccgttgactatggagaggcacgaaatgatcgccaaaccgccagttatgagctcccactttgcccaggacctgtggccggaaaacatacaaaactccttccagatcgggatgctgcgcaggtacgaggaatgtaggcatgataaccttcagctgaaaaaaggatgtaagtccgtgggtgagcataaggtccataaaggtggatataacgggctgaaccagtgtctgacgaccacgcagaaggaaattttccaatgcgataagtacggtaaggtcttccataaattctctaattcaaatacgtacaagacacggcataccggtattaatctgtttaagtgcatcatttgcgggaaggctttcaagcgaagcagtacacttactacacacaaaaagattcataccggcgaaaagccgtacaggtgcgaggaatgtggcaaggcattcaaccagtcagccaacttgaccactcacaaacgcatccatacgggggagaaaccctacaggtgcgaggagtgtggcaaagccttcaaacagagctctaacttgaccacccataagaaaattcataccggcgagaaaccatataagtgtgaagagtgcggaaaagccttcaaccgaagtaccgaccttactacccacaagattgtgcatacaggtgaaaagccctacaagtgcgaggaatgcggaaaagcgttcaagcacccctcccatgtgaccacgcataaaaaaatacacactaggggcaaaccctacaactgtgaagagtgtggcaaaagctttaagcactgtagtaatttaacaatccacaagaggattcacaccggcgaaaagccgtacaaatgtgaggagtgcgggaaggcctttcatctcagcagccatctgaccacacacaaaattctgcacaccggggaaaaaccgtatcgttgtagggaatgcgggaaagctttcaaccactctacgaccctctttagccatgagaagatccacactggcgagaagccttataagtgcgatgaatgcggcaaaacgtttacctggccctcaatcctctccaaacacaaacgtactcacaccggagaaaaaccttacaagtgcgaagagtgcggcaaatcgtttactgctagcagtacactgacgactcataagcgtattcacaccggagaaaagccttacaaatgcgaagaatgcggcaaagcctttaattggagttcagatctcaataaacataaaaaaatccacatagaacggaaaccatacatagtcaaaaatgttactgacctcctgaacgtccccccactgctgatctctatacgctag

SEQ ID NO: 207288 - DNA, 1500 bp, Artificial Sequence
  derived and/or modified sequence
atgggtcctctacagttccgagacgtcgctattgaattctcactggaggagtggcactgtctcgacacggcccagaggaatctgtaccgagatgtcatgttagagaactacagaaatcttgtgtttttggggattgtcgtttcaaaacccgacctggtgacctgcctggagcaggggaagaaacccctgacaatggagcgtcacgagatgatcgccaaacctcccgtcatgtcttcacacttcgcacaggatctgtggcccgagaacatccagaactcctttcaaattgggatgttgcggagatacgaagaatgccggcacgacaacctgcagctaaaaaagggctgtaagagcgtaggggaacataaggtgcacaaggggggatacaatggcctcaaccagtgtttgacaacaactcagaaggaaatcttccagtgtgataagtatggtaaggtctttcataagttcagcaattcaaacacttacaagacccgccacacaggcattaacctctttaagtgcattatttgcgggaaggctttcaaaagaagctccacactcacgactcacaaaaagatccacacgggtgagaagccatacagatgtgaggaatgtggaaaggcttttaaccagagcgccaatctgacaacgcacaagcgaatccacaccggagagaaaccatatcggtgtgaggagtgcggaaaggcatttaaacagtcctctaacttaactacgcacaagaaaatccatactggcgagaagccctataaatgtgaagagtgcgggaaagcctttaaccgctctacagacctcaccacacacaaaattgtgcacacgggagaaaagccctataagtgcgaagagtgcgggaaggctttcaaacaccccagtcatgtcacaactcataagaagattcatacaaggggtaagccgtacaattgcgaagagtgcggaaaaagctttaagcactgttctaatctgactatacacaaacgtatccacactggcgagaagccctataaatgcgaggagtgcggcaaggctttccacctgagctcccatcttaccactcataagatactgcataccggcgagaagccctacaggtgcagagaatgtggtaaggccttcaatcatagtaccacactttttagtcacgaaaaaatccatactggagagaaaccttacaaatgtgatgagtgcgggaaaacctttacgtggccatccatattgtcaaagcacaagagaactcacacgggggagaagccttataaatgtgaggaatgtggcaagagctttacagccagctcaacacttacaactcacaagcgaatccacacaggagaaaagccctacaaatgtgaagagtgtggaaaggcgttcaattggtcttctgatctgaataagcataaaaagatacatatcgaaaggaagccctacatcgttaagaatgtgactgatctcttgaacgttccacctctgctgatcagtatccgttag

SEQ ID NO: 207289 - DNA, 2328 bp, Artificial Sequence
  derived and/or modified sequence
ctgtgcttatagaggcccgtcctctgtggccgtgtgacctgcaagtattgggagagccacagctaaaccccgggacccctggaagcctagaaatgggaccattgcaatttagagatgtggccatagaattctctctggaggagtggcattgcctggacactgcacagcggaatttatatagggatgtgatgttagagaactacagaaacttggtcttccttggtattgttgtctctaagccagacctggttacctgtctggagcaaggaaaaaaacctttaactatggaaagacatgagatgattgccaaacccccagttatgagttctcattttgcccaagacctttggccagagaacatacaaaattctttccaaatagggatgctgagaagatatgaagaatgcagacatgacaatttacagttaaaaaaaggctgtaaaagcgtgggtgagcataaggtgcacaaaggaggttataatggacttaaccaatgtttgacaactacccagaaagaaatatttcaatgtgataaatatggaaaagtctttcataagttttcaaattcaaacacatataagacaagacatactggaataaatcttttcaaatgtataatatgtggcaaagcttttaaacggtcctcaacccttactacacataagaaaattcatactggagagaaaccttacagatgtgaagaatgtggcaaagcttttaaccaatctgcaaaccttactacacataagagaattcataccggagagaaaccctacagatgtgaagaatgtggcaaagcctttaagcagtcctcaaaccttactacacataagaaaattcatactggagagaaaccctacaaatgtgaagaatgtggcaaagccttcaaccgatccacagaccttactacacataagatagttcatactggagagaaaccctacaaatgtgaagaatgtggcaaagcctttaagcacccctcacacgttaccacacataagaaaattcatactagagggaaaccctacaactgtgaagaatgtggcaaatcctttaagcactgctctaaccttactatacataagagaattcatacaggagagaaaccctacaaatgtgaagaatgtggcaaagcctttcacctatcctcacaccttactacacataagatacttcatactggagagaaaccctacagatgtagagaatgtggcaaagcttttaaccattccacaacccttttttcacatgagaaaattcatactggagagaaaccctacaaatgtgatgaatgtggcaaaacctttacctggccctcaatcctctccaaacataaaagaactcatactggagagaaaccctacaaatgtgaagaatgtggcaaatcctttactgcatcctcaactctaactacacataagagaattcatactggagagaaaccttacaaatgtgaagaatgtggcaaagcttttaactggtcctcagaccttaataaacataagaaaattcatattgaacgaaaaccctacatagtgaagaatgtgacagatcttttaaatgttcctccacttttaattagcataagataattcatactggagagaaaccctatgaatgtgatgaatgtgggaaagcctttaaccagccctcgactcttagtaaatttgagagtttatatggaacacaaaccctacaaatataaagaatgtgacaaagctttttaaggaagttctcaacccttattacacataattcataccaaacagaagccctacaagtgtgaagaatgtggcaaaacctataaacctataacaagttctcaattcctttttttttgagatggagtttcactcttgtcaccgaggctggagtgcaatgacatgatctccgttcactgcaatctctgcctcctgggtttaagccattcttctgcctcagcctcccaagtagctgggattacaggtgcccaacaccacgcctggctaatttttggatttttagtagagatggggtttcacaatgttggccaggctggtctcgaactcctgacctcaggtgatccacctgccttggccttccaaagtgctggggttacaggcgtgagccaccatgcctggctacaagttcttaattcttaagagacaccatgcctggctacaagttcttaattcttaagagacatggcgataattcatgctgaagaggaaatctggaaacctgaaagatgcgacattgcttttaccaacacctccacatttcctatacataaaaataaattatactagtgtaataccctagaaatgtataaaatgtgacaaagccttt

SEQ ID NO: 207290 - DNA, 3519 bp, Artificial Sequence
  derived and/or modified sequence
ctgtgcttatagaggcccgtcctctgtggccgtgtgacctgcaagtattgggagagccacagctaaaccccgggacccctggaagcctagaaatgggaccattgcaatttagagatgtggccatagaattctctctggaggagtggcattgcctggacactgcacagcggaatttatatagggatgtgatgttagagaactacagaaacttggtcttccttggtattgttgtctctaagccagacctggttacctgtctggagcaaggaaaaaaacctttaactatggaaagacatgagatgattgccaaacccccagttatgagttctcattttgcccaagacctttggccagagaacatacaaaattctttccaaatagggatgctgagaagatatgaagaatgcagacatgacaatttacagttaaaaaaaggctgtaaaagcgtgggtgagcataaggtgcacaaaggaggttataatggacttaaccaatgtttgacaactacccagaaagaaatatttcaatgtgataaatatggaaaagtctttcataagttttcaaattcaaacacatataagacaagacatactggaataaatcttttcaaatgtataatatgtggcaaagcttttaaacggtcctcaacccttactacacataagaaaattcatactggagagaaaccttacagatgtgaagaatgtggcaaagcttttaaccaatctgcaaaccttactacacataagagaattcataccggagagaaaccctacagatgtgaagaatgtggcaaagcctttaagcagtcctcaaaccttactacacataagaaaattcatactggagagaaaccctacaaatgtgaagaatgtggcaaagccttcaaccgatccacagaccttactacacataagatagttcatactggagagaaaccctacaaatgtgaagaatgtggcaaagcctttaagcacccctcacacgttaccacacataagaaaattcatactagagggaaaccctacaactgtgaagaatgtggcaaatcctttaagcactgctctaaccttactatacataagagaattcatacaggagagaaaccctacaaatgtgaagaatgtggcaaagcctttcacctatcctcacaccttactacacataagatacttcatactggagagaaaccctacagatgtagagaatgtggcaaagcttttaaccattccacaacccttttttcacatgagaaaattcatactggagagaaaccctacaaatgtgatgaatgtggcaaaacctttacctggccctcaatcctctccaaacataaaagaactcatactggagagaaaccctacaaatgtgaagaatgtggcaaatcctttactgcatcctcaactctaactacacataagagaattcatactggagagaaaccttacaaatgtgaagaatgtggcaaagcttttaactggtcctcagaccttaataaacataagaaaattcatattgaacgaaaaccctacatagtgaagaatgtgacagatcttttaaatgttcctccacttttaattagcataagataattcatactggagagaaaccctatgaatgtgatgaatgtgggaaagcctttaaccagccctcgactcttagtaaatttgagagtttatatggaacacaaaccctacaaatataaagaatgtgacaaagctttttaaggaagttctcaacccttattacacataattcataccaaacagaagccctacaagtgtgaagaatgtggcaaaacctataaacctataacaagttctcaattcctttttttttgagatggagtttcactcttgtcaccgaggctggagtgcaatgacatgatctccgttcactgcaatctctgcctcctgggtttaagccattcttctgcctcagcctcccaagtagctgggattacaggtgcccaacaccacgcctggctaatttttggatttttagtagagatggggtttcacaatgttggccaggctggtctcgaactcctgacctcaggtgatccacctgccttggccttccaaagtgctggggttacaggcgtgagccaccatgcctggctacaagttcttaattcttaagagacaccatgcctggctacaagttcttaattcttaagagacatggcgataattcatgctgaagaggaaatctggaaacctgaaagatgcgacattgcttttaccaacacctccacatttcctatacataaaaataaattatactagtgtaataccctagaaatgtataaaatgtgacaaagcctttatatgattgtcatacatgattgtaggtgatagaagtcatactgccaaaactcctgtaagtgtgaagaatgtggcaaaatattttattagtgcttataccttatttcacaggaaagctcttatccttgagaaaaattgtgcaaatacaaagaatatggaaaaaccattaatgcctactcacatcttactgaacagaagaaggttcatagttaataaagcattaaaagtgcaattactgtcaaaaaatctttcagaaaatagaagtctttaaagtgaagaatatttattctgaagacagccattacaaatataaagggggttgtagtgcctttacttgtgtcacagatcttagtgcacacatgtagtactagaggaaaaccctgaagcagttgctcaagctttgtttcagggaatcaagggaatttatattgagaatagtactgcaaatgtaatgaatggaaagacttttcttttccaaaaatgacagcttagaaaacaccagagggtttataccaaaatatatttttgcagatgcagtaaatatcaaaaaatatttaattcaaaattgattctatgtaaatatcagagaattttccatagaataattaaggcactgacacttcagacattacactaaatcagaatgttcagtataaaaactaatccacagctacagctgttagataaattatttctatataattttttaaaaagtggatttttgaagcactgtaattacattgaaagtatacttgttttcttgaaaaaatttttttgaaaagtgaataatgatataatacagctttcacattgctttatgctattttattcctattatattcacatgtgaaagcatgtgatcaattgttgctgcattagagatattagagattgttttttattagttgggcattatgtatgaccttttctataaaagagtaaggacattaaaatgtaagatgcatgatgaaaatataagtggagaggctctttgtagttaactgatattaagtaatgtgtaaggtgggggttcatgttctcatttctataatcctagccaatgacttaatgttgatgctttgaatgtcttttggatggtctaacctacattaacatgtatgcggaacatcttaaaactttttttcaaaaatcataatgaattattttattaataagcaaagataaaaaataa

SEQ ID NO: 207291 - protein, 130 aa, Artificial Sequence
  derived and/or modified sequence
MSGRGKQGGKARAKAKTRSSRAGLQFPVGRVHRLLRKGNYSERVGAGAPVYLAAVLEYLTAEILELAGNAARDNKKTRIIPRHLQLAIRNDEELNKLLGRVTIAQGGVLPNIQAVLLPKKTESHHKAKGK

SEQ ID NO: 207292 - DNA, 393 bp, Artificial Sequence
  derived and/or modified sequence
atgtctgggcggggaaaacagggtggcaaggccagagccaaggcaaagagtagaagctctcgagccggtctgcagtttcccgtcgggagagtccacagactcctgcggaaaggtaattacagtgagcgcgtgggggctggcgcccctgtttacttagcagccgtcctagagtatctgaccgctgaaattttggaactggccggcaatgccgccagggataataagaaaacaaggatcatcccaagacatttgcagctggccatccggaacgacgaggagcttaacaaacttctgggtcgcgttacgatcgctcaaggcggcgttctgcccaacatccaggccgttcttctgcctaaaaagactgaaagtcatcacaaggcgaagggaaaatag

SEQ ID NO: 207293 - DNA, 393 bp, Artificial Sequence
  derived and/or modified sequence
atgagcggccggggcaagcagggcggcaaggcccgggccaaggccaagagccgcagcagccgggccggcctgcagtttcctgtgggccgggtgcaccggctgctgaggaaaggaaactacagcgagcgggtgggcgctggggcccctgtgtacctggccgctgtgctggagtacctgacagctgagatcctggagctggccggaaatgctgcccgggacaacaagaagacccgcatcatccccaggcacctgcagctggccatcagaaatgatgaggagctgaacaagctgctgggccgggtgaccatcgcccagggcggcgtgctgcccaacatccaggccgtgctgctgcccaagaagacagagagccaccacaaggccaagggcaagtag

SEQ ID NO: 207294 - DNA, 393 bp, Artificial Sequence
  derived and/or modified sequence
atgagcggccggggcaagcagggcggcaaggcccgggccaaggccaaatctagatccagcagagctgggctgcagttccctgtcgggcgggtgcatagactgctgaggaaagggaactactccgagcgggtcggtgccggagcgcctgtgtacctggccgctgtgctcgagtacctgaccgcagaaattcttgaactcgcaggcaacgcagcaagagataacaagaaaacgcggattattcctcgccaccttcagctagcaatccggaacgatgaggagctgaacaaacttttggggagagttacgattgcccaagggggagtccttcctaatatccaagccgtgctgctgcccaaaaagacggagtcacatcacaaagccaagggtaaatag

SEQ ID NO: 207295 - DNA, 393 bp, Artificial Sequence
  derived and/or modified sequence
atgagtggcaggggtaagcagggagggaaagcgcgagccaaggcaaagagtaggtcttcccgcgctgggttacagtttcctgtcgggagagttcacaggctgctgcggaaaggcaactactctgagagggttggcgctggggcacccgtttatttggcggctgtgcttgaatatctcacagccgagatcctggaactggctgggaatgcagctcgggataataaaaagacccggattattccaagacacctgcagctggccatccggaacgacgaggagctgaataagcttctgggcagggtgacaattgcacagggtggagtattgcctaacattcaggctgtccttctgccgaaaaaaacagaatctcaccacaaggcaaaggggaaatag

SEQ ID NO: 207296 - DNA, 393 bp, Artificial Sequence
  derived and/or modified sequence
atgagcggcagaggcaagcagggcggcaaggccagagccaaggccaagagcagaagcagcagagccggcctgcagttccccgtgggcagagtgcacagactgctgagaaagggcaactacagcgagagagtgggcgccggcgcccccgtgtacctggccgccgtgctggagtacctgaccgccgagatcctggagctggccggcaacgccgccagagacaacaagaagaccagaatcatccccagacacctgcagctggccatcagaaacgacgaggagctgaacaagctgctgggcagagtgaccatcgcccagggcggcgtgctgcccaacatccaggccgtgctgctgcccaagaagaccgagagccaccacaaggccaagggcaagtag

SEQ ID NO: 207297 - DNA, 496 bp, Artificial Sequence
  derived and/or modified sequence
ctcgcttttcggttgccgttgtcttttttccttgactcggaaatgtccggtcgtggtaagcagggtggcaaggcgcgcgccaaggctaagtcgcgctcgtcgcgcgcggggctgcagttccccgtgggccgcgtgcaccggttgctccgcaagggcaactattcggagcgcgtgggcgccggcgccccggtctatctggccgcggtgctcgagtacttgactgccgagatcctggagcttgccggcaacgcggcgcgcgacaacaagaagacgcgcatcatcccgcgccacctgcagctggccatccgcaacgacgaggagctcaacaagctgctgggccgcgtgaccatcgcgcagggtggcgtcctgcccaacatccaggccgtactgctgcccaagaagacggagagccaccacaaggccaagggcaagtgaggccgcccgccgcccccggggcccctttgatggacataaaggctcttttcagagccaccta

SEQ ID NO: 207298 - DNA, 393 bp, Artificial Sequence
  derived and/or modified sequence
atgtcaggccggggaaagcagggtggaaaggccagagccaaagctaaaacaaggtcttctagagctggactgcagttccctgtcggacgagttcacagactgttgcgtaaaggcaactatagtgagcgagtgggcgccggggccccagtgtatctggctgctgttctggagtatctcacagccgaaatattagaactcgcaggaaatgccgccagagataacaagaagacaaggattatcccgaggcacttacaactggccatccggaacgatgaggaactgaataaattactgggacgcgttactatagcccagggcggagttctgcctaacattcaggcagtactgctccccaagaagaccgagtcacatcacaaggcaaagggtaaatag

SEQ ID NO: 207299 - DNA, 393 bp, Artificial Sequence
  derived and/or modified sequence
atgagtggacgggggaaacaaggggggaaggctcgcgcaaaggcaaaaaccaggagctcacgggccggcttgcaattccccgtgggacgcgttcataggctcctgagaaagggcaactatagcgagagagttggcgccggcgcccccgtgtatctagcagccgtactggagtacctgaccgccgaaattctggaactggctggaaatgccgccagggataataagaaaactagaatcatcccaagacatttgcaactcgctatcaggaacgatgaggaactgaacaagcttttgggacgggtgacaatcgcacaaggcggggtattgcctaacatccaggccgtgctgctcccaaaaaagacagaatcgcaccataaggcaaaaggtaaatag

SEQ ID NO: 207300 - DNA, 477 bp, Artificial Sequence
  derived and/or modified sequence
atgtctggtcgcggcaaacaaggcggtaaagctcgcgccaaggctaagactcggtcttctcgtgcaggtttgcagtttcctgtgggccgagtgcaccgcctgctccgcaaaggcaactactccgagcgcgtcggggctggcgcgccggtgtatctcgcggcggtgcttgagtacctgaccgccgagatcctggagctggcgggcaatgcggcccgcgacaacaagaagacccgcatcatcccgcgccacctgcaattggccatccgcaatgacgaggagcttaataaactcttggggcgtgtgaccatcgcgcagggtggcgttttgcctaatattcaggcggtgctgctgcctaagaaaactgagagccatcataaggccaagggaaagtgaagagttaacgcttcatgcactgctgtttttctgtcagcagacaaaatcagcctaacagcaaaggctcttttcagagccacctac

SEQ ID NO: 207301 - DNA, 547 bp, Artificial Sequence
  derived and/or modified sequence
cagtggattgttagttcttctgctgttaggaagccactatgtctggacgtggaaagcaaggcggcaaagctcgggcaaaagctaaaacgcgttcttccagggccggtcttcagtttccagttggccgtgtgcaccgcctcctccgcaaaggcaactactccgaacgagtcggggccggcgctccagtgtacctggcagcggtgctggaatatctgacggccgagatcttagagctagctggcaacgcggctcgcgacaataagaagacccgcatcatcccgcgccacctgcagctagccatccgcaacgacgaggagctaaataagcttctaggtcgcgtgaccatcgcgcagggcggtgtcctgcccaacatccaggccgtattgctgcctaagaagacggagagccaccataaggccaagggcaagtgaaatgattactagtcaaatccgtcagtgatcccgagtcccagaaaccaaaggctcttttcagagccacccaccttttctgtaaagtgctggaatacacatacgatgcctgaaatctc

SEQ ID NO: 207302 - DNA, 393 bp, Artificial Sequence
  derived and/or modified sequence
atgagcggccggggcaagcagggcggcaaggcccgggccaaggccaagaccaggagcagccgggccggcctgcagtttcctgtgggccgggtgcaccggctgctgaggaaaggaaactacagcgagcgggtgggcgctggggcccctgtgtacctggccgctgtgctggagtacctgacagctgagatcctggagctggccggaaatgctgcccgggacaacaagaagacccgcatcatccccaggcacctgcagctggccatcagaaatgatgaggagctgaacaagctgctgggccgggtgaccatcgcccagggcggcgtgctgcccaacatccaggccgtgctgctgcccaagaagacagagagccaccacaaggccaagggcaagtag

SEQ ID NO: 207303 - DNA, 393 bp, Artificial Sequence
  derived and/or modified sequence
atgagcggccggggcaagcagggcggcaaggcccgggccaaggccaagacaagatcatcaagagccggattgcagtttccagtggggagggtgcacagactacttaggaagggaaactatagcgagcgggtaggagccggagctcccgtatatttggcggccgtcttggagtacctgaccgcagaaattctcgaactggccgggaatgccgcaagagataataaaaaaactcgcatcataccgagacatttgcaactagccatcaggaacgatgaagagctgaataagcttctgggtcgcgtgaccattgctcaaggaggcgttctccctaatatacaagcggttctactgcctaagaagaccgaatcccaccacaaagcaaaaggtaagtag

SEQ ID NO: 207304 - DNA, 393 bp, Artificial Sequence
  derived and/or modified sequence
atgagcggccggggcaagcagggcggcaaggcccgggccaaggccaagaccaggagctctcgtgctggactacagttccccgtgggtagggtgcaccgtttactccgaaagggaaactattctgaaagggtgggggccggagcgccagtgtatctcgccgcagtcctggagtacctgacagcggagattctcgaattggcaggaaatgcggcaagagacaacaaaaaaactaggattattccccgacatctgcaactcgccattcggaacgacgaggagctgaacaagctgctggggagagtgactattgctcaaggcggcgtgttgcccaatatacaggctgtgctcttacccaaaaagacggagtcacaccacaaagccaaggggaaatag

SEQ ID NO: 207305 - DNA, 393 bp, Artificial Sequence
  derived and/or modified sequence
atgtctggcagaggtaagcaggggggaaaagcacgcgctaaagcaaaaacccggtcgagccgtgctggcttgcagttcccggttggacgcgtgcaccgcctgcttcggaagggcaactattcagaaagggtgggggcaggggcaccagtttacttagccgctgtgctagaatatctgaccgcagagatcctggagctcgcaggcaatgcagctcgggacaacaagaagaccagaataattccacggcacctgcagctcgccatccggaacgacgaggagttgaataagttgcttggtcgtgtgacaattgctcagggcggtgtgctgccaaacatccaggctgtcttactacctaaaaaaaccgagtctcatcacaaagccaagggcaagtag

SEQ ID NO: 207306 - DNA, 393 bp, Artificial Sequence
  derived and/or modified sequence
atgagcggcagggggaagcaggggggaaaagccagagctaaggcgaaaacacgcagttcccgagcaggcctgcagttcccggttgggagggtgcaccgactgctgaggaaggggaactattccgaaagagttggcgcaggagcccctgtgtatctagccgctgtacttgagtacctgaccgctgaaattttggaactggccggaaacgcagctagggataataaaaagacaagaataatccccaggcatctgcagttggcgattagaaacgatgaagaactaaataagctgctgggtcgtgtcacgatcgcacaaggtggtgtactgccaaacatccaggcagtgctacttcctaaaaagaccgagagccaccacaaggctaagggaaagtag

SEQ ID NO: 207307 - DNA, 393 bp, Artificial Sequence
  derived and/or modified sequence
atgagcggcagaggcaagcagggcggcaaggccagagccaaggccaagaccagaagcagcagagccggcctgcagttccccgtgggcagagtgcacagactgctgagaaagggcaactacagcgagagagtgggcgccggcgcccccgtgtacctggccgccgtgctggagtacctgaccgccgagatcctggagctggccggcaacgccgccagagacaacaagaagaccagaatcatccccagacacctgcagctggccatcagaaacgacgaggagctgaacaagctgctgggcagagtgaccatcgcccagggcggcgtgctgcccaacatccaggccgtgctgctgcccaagaagaccgagagccaccacaaggccaagggcaagtag

SEQ ID NO: 207308 - protein, 189 aa, Artificial Sequence
  derived and/or modified sequence
MARSFSLLMVVLVLSYKSICSLGCDLPQTHSLRNRRALILLAQMGRISPFSCLKDRHEFRFPEEEFDGHQFQKTQAISVLHEMIQQTFNLFSTEDSSAAWEQSLLEKFSTELYQQLNDLEACVIQEVGVEETPLMNEDFILAVRKYFQRITLYLMEKKYSPCAWEVVRAEIMRSFSFSTNLKKGLRRKD

SEQ ID NO: 207309 - DNA, 570 bp, Artificial Sequence
  derived and/or modified sequence
atggccagaagcttcagcctgctgatggtggtgctggtgctgagctacaagagcatctgcagcctgggctgcgacctgccccagacccacagcctgagaaacagaagagccctgatcctgctggcccagatgggcagaatcagccccttcagctgcctgaaggacagacacgagttcagattccccgaggaggagttcgacggccaccagttccagaagacccaggccatcagcgtgctgcacgagatgatccagcagaccttcaacctgttcagcaccgaggacagcagcgccgcctgggagcagagcctgctggagaagttcagcaccgagctgtaccagcagctgaacgacctggaggcctgcgtgatccaggaggtgggcgtggaggagacccccctgatgaacgaggacttcatcctggccgtgagaaagtacttccagagaatcaccctgtacctgatggagaagaagtacagcccctgcgcctgggaggtggtgagagccgagatcatgagaagcttcagcttcagcaccaacctgaagaagggcctgagaagaaaggactag

SEQ ID NO: 207310 - DNA, 570 bp, Artificial Sequence
  derived and/or modified sequence
atggcacggagcttcagcctattaatggtggttctcgttctctcctacaagagtatctgcagcttagggtgcgatctgcctcaaacacattctcttaggaatagacgcgccctgattctcttggcacagatggggcggataagtcctttcagttgccttaaggatcgccatgagttcagattccctgaggaagagttcgacggacatcagtttcaaaagacccaggctatctccgtgttacacgagatgatccagcaaacttttaacttgttttcaactgaagactcgtctgctgcctgggagcaaagcctgctcgaaaagttttccaccgagctgtatcagcaattgaacgacctggaagcatgcgtgatccaggaagtcggcgttgaggagacacccctcatgaatgaggattttatcttggctgttaggaagtatttccaacggataacgttatatctgatggagaagaagtacagcccctgtgcctgggaagtggtgagagcagagatcatgaggtccttttctttttcaaccaacctgaagaaagggctgcgccgaaaagattag

SEQ ID NO: 207311 - DNA, 570 bp, Artificial Sequence
  derived and/or modified sequence
atggcccggagcttcagcctgctgatggtggtgctggtgctgagctacaagagcatctgcagcctgggctgtgacctgccccagacccacagcctgaggaacagaagagccctgatcctgctggcccagatgggccgcatcagccccttcagctgcctgaaggacagacatgagttccgcttccctgaggaggagtttgatggccaccagttccagaagacccaggccatctctgtgctgcacgagatgatccagcagaccttcaacctcttcagcacagaggacagcagcgctgcctgggagcagagcctgctggagaagttcagcacagagctgtaccagcagctgaatgacctggaggcctgcgtcatccaggaggtgggcgtggaggagacccccctgatgaatgaagacttcatcctggccgtgaggaagtacttccagaggatcaccctgtacctgatggagaagaagtacagcccctgtgcctgggaggtggtgcgggcagagatcatgaggagcttctccttcagcaccaacctgaagaagggcctgcggaggaaggactag

SEQ ID NO: 207312 - DNA, 570 bp, Artificial Sequence
  derived and/or modified sequence
atggcccggagcttcagcctgctgatggtggtgctggtgctgagctataagtccatttgtagcctcggatgtgacttgccacagacacattccctgagaaacagacgagccctgatcctcttagctcagatgggtcgaatttcccccttcagctgccttaaggatagacacgaatttcgcttcccagaggaggaattcgacggccaccagtttcagaaaactcaggctatttccgtgttgcatgagatgatccaacagacattcaatttattctccacagaggactcctccgccgcctgggagcagagcctgctcgagaagttctctaccgagctataccagcagctgaacgatctggaggcttgcgtgatccaggaggtcggggttgaagagacaccactcatgaacgaggacttcatacttgccgtcagaaaatattttcagaggataactctatatcttatggagaagaagtacagcccatgcgcttgggaagtggtgagagcagagattatgagatctttctccttcagcacaaacctcaaaaagggtctgagacgaaaggactag

SEQ ID NO: 207313 - DNA, 570 bp, Artificial Sequence
  derived and/or modified sequence
atggctcggtctttttcgttgctgatggtggtactcgttctaagttacaagagcatttgctcactcgggtgtgatcttccacagacccattctttgagaaatagaagggcactcattctcctcgcccagatgggcagaatttcccctttttcctgcctgaaggataggcatgaatttaggtttccagaggaggaatttgatggtcatcaatttcaaaaaactcaagccatttctgtgctgcacgaaatgattcagcagactttcaatctgttttccacagaagactcgtcagctgcctgggaacagtccctcttagagaagtttagtactgaactgtatcagcagcttaatgacctcgaggcctgtgtgatccaagaggttggcgtagaggagactccgctgatgaatgaggacttcatactggccgtgcgaaagtacttccagcgcataacactatatttgatggagaagaagtattccccatgcgcatgggaggtggttcgggcagagattatgcggtcctttagtttctcaaccaacttgaagaaggggctgcgcaggaaggattag

SEQ ID NO: 207314 - DNA, 737 bp, Artificial Sequence
  derived and/or modified sequence
tacccacctcaggtagcctagtgatatttgcaaaatcccaatggcccggtccttttctttactgatggtcgtgctggtactcagctacaaatccatctgctctctgggctgtgatctgcctcagacccacagcctgcgtaataggagggccttgatactcctggcacaaatgggaagaatctctcctttctcctgcttgaaggacagacatgaattcagattcccagaggaggagtttgatggccaccagttccagaagactcaagccatctctgtcctccatgagatgatccagcagaccttcaatctcttcagcacagaggactcatctgctgcttgggaacagagcctcctagaaaaattttccactgaactttaccagcaactgaatgacctggaagcatgtgtgatacaggaggttggggtggaagagactcccctgatgaatgaggacttcatcctggctgtgaggaaatacttccaaagaatcactctttatctaatggagaagaaatacagcccttgtgcctgggaggttgtcagagcagaaatcatgagatccttctctttttcaacaaacttgaaaaaaggattaaggaggaaggattgaaaactggttcatcatggaaatgattctcattgactaatgcatcatctcacactttcatgagttcttccatttcaaagactcacttctataaccaccacaagttgaatcaaaatttccaaatgttttc

SEQ ID NO: 207315 - DNA, 570 bp, Artificial Sequence
  derived and/or modified sequence
atggcgcgcagtttctctctgctgatggtggtgctcgttctcagctacaaaagtatctgttctcttgggtgcgatcttccgcagactcactctttgagaaataggagagccctgatcctgctggcccaaatgggaagaattagccccttcagctgtttgaaagatagacatgagttccgattccctgaggaagagttcgacggtcaccagttccagaaaactcaggcaattagcgtcctccatgaaatgatacaacagactttcaatctcttttcgactgaggactccagcgcagcttgggagcaatcactcctagaaaaattttcaaccgaattgtatcagcaactgaacgaccttgaggcctgcgttatccaagaggtgggtgttgaagagactcctttaatgaacgaagattttatccttgcagttcgcaagtactttcagcggatcactttgtatttgatggagaaaaagtacagtccgtgcgcttgggaagtcgtcagggcagagatcatgagatccttctccttttccacgaatctgaagaagggccttcgacggaaggactag

SEQ ID NO: 207316 - DNA, 570 bp, Artificial Sequence
  derived and/or modified sequence
atggcgcggtcgttttccctgctgatggtggtgttagtcctgtcctacaaatctatttgttctctcggatgtgatttgcctcagacccactctctgcgcaacaggcgggctcttatattactggcacagatgggtagaatttctccttttagctgtctaaaagacaggcatgagttcagattccctgaagaagagtttgatggacaccagtttcaaaagacgcaggctatttcagtgctgcacgagatgattcagcagacatttaatctcttctctactgaggattcatctgctgcttgggagcaatcactcctagaaaaattttcaaccgaattgtatcagcaactgaacgaccttgaggcctgcgttatccaagaggtgggtgttgaagagactcctttaatgaacgaagattttatccttgcagttcgcaagtactttcagcggatcactttgtatttgatggagaaaaagtacagtccgtgcgcttgggaagtcgtcagggcagagatcatgagatccttctccttttccacgaatctgaagaagggccttcgacggaaggactag

SEQ ID NO: 207317 - RNA, 570 nt, Artificial Sequence
  derived and/or modified sequence
auggcgcgcaguuucucucugcugaugguggugcucguucucagcuacaaaaguaucuguucucuugggugcgaucuuccgcagacucacucuuugagaaauaggagagcccugauccugcuggcccaaaugggaagaauuagccccuucagcuguuugaaagauagacaugaguuccgauucccugaggaagaguucgacggucaccaguuccagaaaacucaggcaauuagcguccuccaugaaaugauacaacagacuuucaaucucuuuucgacugaggacuccagcgcagcuugggagcaaucacuccuagaaaaauuuucaaccgaauuguaucagcaacugaacgaccuugaggccugcguuauccaagagguggguguugaagagacuccuuuaaugaacgaagauuuuauccuugcaguucgcaaguacuuucagcggaucacuuuguauuugauggagaaaaaguacaguccgugcgcuugggaagucgucagggcagagaucaugagauccuucuccuuuuccacgaaucugaagaagggccuucgacggaaggacuag

SEQ ID NO: 207318 - RNA, 570 nt, Artificial Sequence
  derived and/or modified sequence
auggcgcggucguuuucccugcugauggugguguuaguccuguccuacaaaucuauuuguucucucggaugugauuugccucagacccacucucugcgcaacaggcgggcucuuauauuacuggcacagauggguagaauuucuccuuuuagcugucuaaaagacaggcaugaguucagauucccugaagaagaguuugauggacaccaguuucaaaagacgcaggcuauuucagugcugcacgagaugauucagcagacauuuaaucucuucucuacugaggauucaucugcugcuugggagcaaucacuccuagaaaaauuuucaaccgaauuguaucagcaacugaacgaccuugaggccugcguuauccaagagguggguguugaagagacuccuuuaaugaacgaagauuuuauccuugcaguucgcaaguacuuucagcggaucacuuuguauuugauggagaaaaaguacaguccgugcgcuugggaagucgucagggcagagaucaugagauccuucuccuuuuccacgaaucugaagaagggccuucgacggaaggacuag

SEQ ID NO: 207319 - protein, 196 aa, Artificial Sequence
  derived and/or modified sequence
MFCEKAMELIRELHRAPEGQLPAFNEDGLRQVLEEMKALYEQNQSDVNEAKSGGRSDLIPTIKFRHCSLLRNRRCTVAYLYDRLLRIRALRWEYGSVLPNALRFHMAAEEMEWFNNYKRSLATYMRSLGGDEGLDITQDMKPPKSLYIEVRCLKDYGEFEVDDGTSVLLKKNSQHFLPRWKCEQLIRQGVLEHILS

SEQ ID NO: 207320 - protein, 165 aa, Artificial Sequence
  derived and/or modified sequence
MFCEKAMELIRELHRAPEGQLPAFNEDGLRQVLEEMKALYEQNQSDVNEAKSGGRSDLIPTIKFRHCSLLRNRRCTVAYLYDRLLRIRALRWEYGSVLPNALRFHMAAEEMESRSVAQAGVQWCILCSLQLPPPGFKQFSCLSLPSSCDYRWSGLIIIKDLLLLI

SEQ ID NO: 207321 - DNA, 591 bp, Artificial Sequence
  derived and/or modified sequence
atgttctgcgaaaaggctatggaactaattcgtgaactgcaccgtgcacccgagggccagctcccagcgttcaacgaggatggcttgcggcaagtgcttgaagaaatgaaggctctctatgaacagaaccagtctgatgtgaatgaggcaaaaagcgggggtcggtctgacctaattcccacaatcaagttccgtcactgttccctgctcaggaaccgacgatgtactgtggcatacctttacgacagactcttaagaatacgcgccctgcgttgggagtatggctctgtgctgccaaacgctctgcggttccatatggccgccgaggaaatggaatggtttaataactataagcggagcctggccacatacatgagatccctaggcggggatgaaggtctggacatcactcaagatatgaaacctcctaagtctctgtacatagaggttcggtgcttgaaagactatggggagtttgaagttgatgatggaacctctgtgcttttgaagaagaacagccagcacttcctgccgcgatggaagtgtgagcagctgataagacaaggcgttctggaacatatactttcctag

SEQ ID NO: 207322 - DNA, 498 bp, Artificial Sequence
  derived and/or modified sequence
atgttttgtgagaaagcaatggagctcatcagagaactgcatagggcccccgagggccagctgccagcttttaacgaagacgggctgaggcaggtgctggaagagatgaaggccctgtatgagcagaatcagagtgatgtaaacgaggctaagtctggaggtcgatccgacctgattcccacaatcaagttcagacattgttccctgctgcgcaaccggaggtgtaccgtggcatatctgtacgaccgtctgctgcgaattagggctctgcggtgggaatatggcagtgtgctgccgaatgcgttgagattccacatggcagccgaagagatggagtctagatctgttgcacaggcgggcgttcagtggtgtattttatgttccctccaacttcctcctcctggattcaagcagttttcctgtctgagcctcccatccagctgcgattatagatggagcgggttgattatcattaaggacttgctgctgctgatttag

SEQ ID NO: 207323 - DNA, 3249 bp, Artificial Sequence
  derived and/or modified sequence
ctagaacgaaaggagtgaggcgccgagagcccagataccattttggcgtgagagctggtggttggcaaggccgcgggagtgggaagcgtccgccatgttctgcgaaaaagccatggaactgatccgcgagctgcatcgcgcgcccgaagggcaactgcctgccttcaacgaggatggactcagacaagttctggaggagatgaaagctttgtatgaacaaaaccagtctgatgtgaatgaagcaaagtcaggtggacgaagtgatttgataccaactatcaaatttcgacactgttctctgttaagaaatcgacgctgcactgtagcatacctgtatgaccgcttgcttcggatcagagcactcagatgggaatatggtagcgtcttgccaaatgcattacgatttcacatggctgctgaagaaatggagtggtttaataattataaaagatctcttgctacttatatgaggtcactgggaggagatgaaggtttggacattacacaggatatgaaaccaccaaaaagcctatatattgaagtccggtgtctaaaagactatggagaatttgaagttgatgatggcacttcagtcctattaaaaaaaaatagccagcactttttacctcgatggaaatgtgagcagctgatcagacaaggagtcctggagcacatcctgtcatgaccatgcgccgaggcacttccaggcttcactcaactcatggactcctctgtactcactctctccaccactcccttcacctccctctttgattttagaagctatagacattgtttaagataactaagaatacttggctaagaagtataatttgctaactattaaggactttctttttttaatgttgtacactattcttcctactcttttttggttttggttttgttttgtagagactgtctcactatgttgcccaagctggtctcaaactcctggcctcaagcagtcctcccaccttagcttctcaaagtgttgagatcacaggcgtgagccactgcacccggcccctactcctttttctaataagctgtatctgtaatcacagcattcctacagttgttacagtgtgttttttaaatgaaagtaaacatggttacatttgaatctcttaaataagcagtcacttggctggacaggaagaaggtagatcctgtgtgtcttgttttctggtcatgtgtattgtacaagctagagagctgaatttctgagatacacattttcaaatcacatgcaagtgaagatgatggtctgtagaaattttcagtatatataatgtttaatgacatactaatttatcatctggctatttgggaaggaaggacacacatggattttgcacatttccaccatggtggctggtgtggcttgtggctatggggtgatcaccagtatcaccactttggaaggggacagtgaaattggggctagagaaggaactttgtacagttttccctgagattcagattgactgaaaagtcacatgaagagttgattgtcttttaatggtatgttttaaacagctgacattttaaattttgatgaaatccagtttattcgtttgttcttttatgctttgggtgttgcatccgagaaatcttttcccatcccaagatcacaattttttttcctttttacttctagaagtgttataattttaagctttatactttggtctatgacccgtttttttttttgttttgttttgttttttcgtttgtttctttgttttgagatggagtcttgttctgtcacccaggctggggtgcagtggcgtgatcttggctcactgcaatctctatcccctgggttcaagtgattctcttgtctcagcctcccaagtagctgggattacaggcacaggccgccacgcctggctaatttttgtatttttagtagagacagagttttaccatgttggccaggctggtttcaaactcctgacctcaagtgacccaccttggcctcccaaagttttgggattacaagtgtgggccaccgcggccagcctatgatccattttgaatgaattttttatatggtgcaaggtgtcaatccaccttcactttttcttgggaatatagatatccagctgtttcactaccattttttgaaaggactgccctttgctctatcacctttgcatttttgttaaaaagtagttgtcaatgtatatgtgggtttatttcaggactctgttttgttccattgacctgtttttctctcctgaatgccaataccatatttgtatgtagtgtatgtaattttctaataattcttgaaacagatagtattaatgtgtcatatttttgctgttgtttgtattttttgtagagatggggtttcaccgtgttggccaggctgtgttgaactcctgagctaaagcaatacacttgcctcgtcctccccatgtgctgggattacaggcgtgagccttggtgctggcccagtgtaccacatttctttttgagatttgttttggctatgttaagtcctttgcttttgatgtgaaatttgggaacaggcagggtgtggtggcttatgcctgtaatcctagaactttgggaggcctagatgggtggatcacttgagctcaggagttccagaccagcccgggcctatggcaaaactccgtctctacaaaaaatagaaaaaattagccaggtgtggtggtgcatgcctgtagtcacagttacacggcaggctgaggtgggaggatcacttgaaccccagaggtcaagactgcagtgagctgagatcacaccactgtactccagcctgggtgacaaagtgagactctatctcaaaaagaaattaggatcaatttgtcaatttctacaacaacaacaacaaaaacccctgttgggcaccttgattgagattgcattgaatttatataaaactgttgggagaattgacatcttaataatattgagtcttctggcctataaacaaggtctgtcttcctaggtattaatgttttgtcttctatttctcttaataatcttttgtagttttcagtgtacaggtctaccatgtcagcatttcatagttttgatgctaaatggtattttaaaatttcaaattctaaccacttgttgctagtaaatagaaatacaattgatgttgaacttgtatccttcagccttgctaaactgtgagttctcatggtgtttttgtaaattacatcaacagtcatgtgttctatgaataaagagttttactccttc

SEQ ID NO: 207324 - DNA, 1156 bp, Artificial Sequence
  derived and/or modified sequence
agaacgaaaggagtgaggcgccgagagcccagataccattttggcgtgagagctggtggttggcaaggccgcgggagtgggaagcgtccgccatgttctgcgaaaaagccatggaactgatccgcgagctgcatcgcgcgcccgaagggcaactgcctgccttcaacgaggatggactcagacaagttctggaggagatgaaagctttgtatgaacaaaaccagtctgatgtgaatgaagcaaagtcaggtggacgaagtgatttgataccaactatcaaatttcgacactgttctctgttaagaaatcgacgctgcactgtagcatacctgtatgaccgcttgcttcggatcagagcactcagatgggaatatggtagcgtcttgccaaatgcattacgatttcacatggctgctgaagaaatggaatctcgctctgttgcccaggctggagtacagtggtgcattctctgctcactgcaacttccgcctcctggcttcaagcaattctcctgcctcagcctgccaagtagctgtgattacagatggagtggtttaataattataaaagatctcttgctacttatatgaggtcactgggaggagatgaaggtttggacattacacaggatatgaaaccaccaaaaagcctatatattgaagtccggtgtctaaaagactatggagaatttgaagttgatgatggcacttcagtcctattaaaaaaaaatagccagcactttttacctcgatggaaatgtgagcagctgatcagacaaggagtcctggagcacatcctgtcatgaccatgcgccgaggcacttccaggcttcactcaactcatggactcctctgtactcactctctccaccactcccttcacctccctctttgattttagaagctatagacattgtttaagataactaagaatacttggctaagaagtataatttgctaactattaaggactttctttttttaatgttgtacactattcttcctactcttttttggttttggttttgttttgtagagactgtctcactatgttgcccaagctggtctcaaactcctggcctcaagcagtcctcccaccttagcttctcaaagtgttgagatcacaggcgtgagccactgcacccggcccctactcc

SEQ ID NO: 207325 - DNA, 591 bp, Artificial Sequence
  derived and/or modified sequence
atgttctgtgagaaggccatggagctgatccgggagctgcaccgggcccctgagggccagctgcctgccttcaatgaagatggcctgcggcaggtgctggaggagatgaaggccctgtatgagcagaaccagagtgatgtgaatgaggccaagagcggcggccgcagtgacctgatccccaccatcaagttccgccactgcagcctgctgaggaacagacgctgcaccgtggcctacctgtatgaccggctgctgcgcatccgggccctgcgctgggagtatggctctgtgctgcccaatgccctgcgcttccacatggctgctgaggagatggagtggttcaacaactacaagaggagcctggccacctacatgaggagcctgggcggagatgagggcctggacatcacccaggacatgaagccacccaagagcctgtacatcgaggtgcgctgcctgaaggactatggagaatttgaggtggatgatggcacctctgtgctgctgaagaagaacagccagcacttcctgccccgctggaagtgtgagcagctgatccggcagggcgtgctggagcacatcctgtcctag

SEQ ID NO: 207326 - DNA, 498 bp, Artificial Sequence
  derived and/or modified sequence
atgttctgtgagaaggccatggagctgatccgggagctgcaccgggcccctgagggccagctgcctgccttcaatgaagatggcctgcggcaggtgctggaggagatgaaggccctgtatgagcagaaccagagtgatgtgaatgaggccaagagcggcggccgcagtgacctgatccccaccatcaagttccgccactgcagcctgctgaggaacagacgctgcaccgtggcctacctgtatgaccggctgctgcgcatccgggccctgcgctgggagtatggctctgtgctgcccaatgccctgcgcttccacatggctgctgaggagatggagagccgctctgtggcccaggccggcgtgcagtggtgcatcctgtgcagcctgcagctgcccccacctggcttcaagcagttcagctgcctgagcctgcccagcagctgtgactaccgctggagcggcctcatcatcatcaaggacctgctgctgctgatctag

SEQ ID NO: 207327 - DNA, 591 bp, Artificial Sequence
  derived and/or modified sequence
atgttctgcgagaaggccatggagctgatccgggagctgcaccgggctcccgagggtcagcttcccgctttcaacgaagatggactgaggcaagtgctggaggagatgaaagcactctatgagcagaaccaatccgatgtcaacgaagctaagtctggcggcaggtcggacttgatccccactattaaattccgccattgcagtctgctcaggaatagaaggtgcacagtggcatatctgtacgacaggctgctgcgcatccgggctctccggtgggagtacggctccgtcctgcccaacgctctaagatttcacatggcagccgaagaaatggaatggtttaataactataagcgatcactcgccacctatatgcgatcactcggtggggacgagggcctggacatcacacaggatatgaagccgcccaagtctctgtacatcgaggtcagatgtctcaaggactacggggaatttgaggtggatgatggtacgagtgtgctgttgaagaagaactcgcagcacttcttacctagatggaaatgcgaacagctgatccggcagggcgtgcttgagcacatcctgtcctag

SEQ ID NO: 207328 - DNA, 498 bp, Artificial Sequence
  derived and/or modified sequence
atgttctgcgagaaggccatggagctgatccgggagctgcaccgggcccccgaaggccagctgcccgcttttaatgaggatgggcttaggcaggtactcgaggaaatgaaagccctgtacgaacagaatcaatcagatgtgaatgaggccaaatccgggggaagatcagatctcatccccacaatcaagttccgacattgtagtttgctgcggaatcgacggtgcacggtagcatacttgtatgaccgtctccttcgaattcgggcattacggtgggagtacggttctgtgttgcctaatgccctgaggtttcacatggccgcggaggagatggagtcccgctccgttgctcaagcaggtgtccagtggtgtattttgtgttctctgcagttacccccccccggctttaagcaattctcctgcctgtcccttccatcctcttgcgattacagatggtcaggactgatcataatcaaagacctgcttctcctgatctag

SEQ ID NO: 207329 - DNA, 591 bp, Artificial Sequence
  derived and/or modified sequence
atgttctgcgagaaggcaatggagctcatcagagagctgcacagggctccagaaggacaactgcccgcatttaatgaggacggcctgagacaggtgctggaggagatgaaggccctttacgagcagaaccaaagcgacgtaaacgaggctaaatctgggggtcgaagcgatttaatccctaccatcaaatttcgccactgctctctactcagaaacagacgatgtactgttgcatatctctatgacagactgttaaggatccgggctctcagatgggaatatggatctgtgttacccaacgctctgaggtttcatatggcagcggaggagatggagtggttcaataactacaaacggagcctggcgacctacatgagaagcctcggaggagatgagggtttggacattactcaggatatgaaacctcctaagagtctttatatcgaagttcgttgtctgaaagattatggtgaattcgaagtggacgatggcacctctgtgctgctgaaaaagaacagtcagcactttttgccacggtggaaatgcgaacagctgatacgacaaggggtccttgagcatattctcagttag

SEQ ID NO: 207330 - DNA, 498 bp, Artificial Sequence
  derived and/or modified sequence
atgttctgtgagaaagccatggagcttatccgggaacttcaccgggcaccggaaggccagttgcctgcctttaatgaggacgggctacggcaggtcctcgaagagatgaaagccttatacgagcagaatcagtccgatgtgaacgaggcaaagtcaggcggacgcagtgaccttattccgaccattaaattccgtcactgctctctcctgcgcaatcgcagatgtactgtagcctacctctatgatcggctgctgaggatacgggcacttaggtgggaatacggatccgtgctgccgaacgcacttcgtttccacatggctgcagaggagatggagtccagatctgttgcccaagctggcgtgcagtggtgcattctgtgttctctccaattacctccaccaggtttcaaacagttctcctgtctgagtctgccatcttcgtgcgactatagatggagtggactgatcatcattaaagacctgttgctcctcatttag

SEQ ID NO: 207331 - DNA, 591 bp, Artificial Sequence
  derived and/or modified sequence
atgttctgcgagaaggccatggagctgatcagagagctgcacagagcccccgagggccagctgcccgccttcaacgaggacggcctgagacaggtgctggaggagatgaaggccctgtacgagcagaaccagagcgacgtgaacgaggccaagagcggcggcagaagcgacctgatccccaccatcaagttcagacactgcagcctgctgagaaacagaagatgcaccgtggcctacctgtacgacagactgctgagaatcagagccctgagatgggagtacggcagcgtgctgcccaacgccctgagattccacatggccgccgaggagatggagtggttcaacaactacaagagaagcctggccacctacatgagaagcctgggcggcgacgagggcctggacatcacccaggacatgaagccccccaagagcctgtacatcgaggtgagatgcctgaaggactacggcgagttcgaggtggacgacggcaccagcgtgctgctgaagaagaacagccagcacttcctgcccagatggaagtgcgagcagctgatcagacagggcgtgctggagcacatcctgagctag

SEQ ID NO: 207332 - DNA, 498 bp, Artificial Sequence
  derived and/or modified sequence
atgttctgcgagaaggccatggagctgatcagagagctgcacagagcccccgagggccagctgcccgccttcaacgaggacggcctgagacaggtgctggaggagatgaaggccctgtacgagcagaaccagagcgacgtgaacgaggccaagagcggcggcagaagcgacctgatccccaccatcaagttcagacactgcagcctgctgagaaacagaagatgcaccgtggcctacctgtacgacagactgctgagaatcagagccctgagatgggagtacggcagcgtgctgcccaacgccctgagattccacatggccgccgaggagatggagagcagaagcgtggcccaggccggcgtgcagtggtgcatcctgtgcagcctgcagctgcccccccccggcttcaagcagttcagctgcctgagcctgcccagcagctgcgactacagatggagcggcctgatcatcatcaaggacctgctgctgctgatctag

SEQ ID NO: 207333 - protein, 189 aa, Artificial Sequence
  derived and/or modified sequence
MALSFSLLMAVLVLSYKSICSLGCDLPQTHSLGNRRALILLAQMGRISHFSCLKDRHDFGFPEEEFDGHQFQKAQAISVLHEMIQQTFNLFSTEDSSAAWEQSLLEKFSTELYQQLNDLEACVIQEVGVEETPLMNEDSILAVRKYFQRITLYLTEKKYSPCAWEVVRAEIMRSLSFSTNLQKRLRRKD

SEQ ID NO: 207334 - DNA, 570 bp, Artificial Sequence
  derived and/or modified sequence
atggccctgagcttcagcctgctgatggccgtgctggtgctgagctacaagagcatctgcagcctgggctgcgacctgccccagacccacagcctgggcaacagaagagccctgatcctgctggcccagatgggcagaatcagccacttcagctgcctgaaggacagacacgacttcggcttccccgaggaggagttcgacggccaccagttccagaaggcccaggccatcagcgtgctgcacgagatgatccagcagaccttcaacctgttcagcaccgaggacagcagcgccgcctgggagcagagcctgctggagaagttcagcaccgagctgtaccagcagctgaacgacctggaggcctgcgtgatccaggaggtgggcgtggaggagacccccctgatgaacgaggacagcatcctggccgtgagaaagtacttccagagaatcaccctgtacctgaccgagaagaagtacagcccctgcgcctgggaggtggtgagagccgagatcatgagaagcctgagcttcagcaccaacctgcagaagagactgagaagaaaggactag

SEQ ID NO: 207335 - DNA, 570 bp, Artificial Sequence
  derived and/or modified sequence
atggccctaagcttctcgctcctcatggccgtgctggttctatcttacaagagtatttgttctctggggtgtgacctgccccagacacatagcttaggcaacaggcgagctttgatcctcctagcacagatggggcggatctctcatttcagctgtctgaaggacagacacgacttcggatttccagaggaagagtttgatggtcatcagtttcaaaaagcacaggcgataagtgtactccacgaaatgatccagcaaaccttcaatttattttcaaccgaggattcgagcgctgcctgggaacagagcttgctggagaaattctccacagagctttatcagcagttgaacgacctcgaggcctgcgtgatccaggaagtgggcgtggaagaaacgcctcttatgaacgaggattctatccttgccgttcgcaagtattttcagcgcatcaccttatacttgacggaaaagaagtatagcccttgcgcctgggaggtcgtgagggccgagattatgagatcgcttagctttagcaccaacctacagaaaaggctgcgacggaaggactag

SEQ ID NO: 207336 - DNA, 570 bp, Artificial Sequence
  derived and/or modified sequence
atggccctgtccttcagcctgctgatggctgtgctggtgctgagctacaagagcatctgcagcctgggctgtgacctgccccagacccacagcctgggcaacagaagagccctgatcctgctggcccagatgggccgcatcagccacttcagctgcctgaaggacagacatgactttggcttccctgaggaggagtttgatggccaccagttccagaaggcccaggccatctctgtgctgcacgagatgatccagcagaccttcaacctcttcagcacagaggacagcagcgctgcctgggagcagagcctgctggagaagttcagcacagagctgtaccagcagctgaatgacctggaggcctgcgtcatccaggaggtgggcgtggaggagacccccctgatgaatgaagattccatcctggccgtgaggaagtacttccagaggatcaccctgtacctgacagagaagaagtacagcccctgtgcctgggaggtggtgcgggcagagatcatgaggagcctgtccttcagcaccaacctgcagaagaggctgcggaggaaggactag

SEQ ID NO: 207337 - DNA, 570 bp, Artificial Sequence
  derived and/or modified sequence
atggccctgagcttcagcctgctgatggccgtgctggtgctgagctataaatctatctgtagtctgggatgtgacctaccccagactcattctcttgggaaccggcgagctcttatcctgttagcccaaatggggcggatcagccacttttcctgcttgaaggacagacatgatttcgggttccccgaagaagaattcgatggccaccagtttcaaaaggcacaggctataagtgtcctgcatgagatgatccaacagacgtttaacttgttttctactgaggatagctcggcggcctgggaacaatcactgctggagaagttcagcactgaactgtatcagcagcttaatgacctagaggcgtgcgtcattcaggaagtcggagtggaggagacacctctaatgaacgaagactccatactggcggttagaaaatactttcaaagaatcaccctgtacttgaccgagaaaaaatacagcccgtgtgcatgggaagtggtccgtgccgagatcatgcgttctctctcctttagcaccaatctgcaaaagcgactgcggcgtaaagactag

SEQ ID NO: 207338 - DNA, 570 bp, Artificial Sequence
  derived and/or modified sequence
atggctctgagcttcagccttcttatggcggtgctggtgctgtcctataaatccatttgcagcctcgggtgcgatctgccacagacacactctctgggcaatcgtcgcgcactgattctgctagcgcagatgggccgtattagtcactttagctgcttaaaagatcgacatgacttcggcttccccgaggaggagtttgatggtcaccagttccaaaaagcccaggcgattagtgtgttgcacgagatgatccagcagactttcaatctcttttccaccgaagacagcagcgcagcatgggagcaaagtcttctggagaagttttcaaccgaactgtaccaacagttaaatgaccttgaagcttgtgtgatccaggaagtaggggtggaggaaacccccctgatgaacgaagattcaatccttgcggtgcggaaatacttccaaagaattaccctgtacctcacagaaaagaaatactctccatgcgcctgggaagtggtgagggcagaaatcatgcgatcattaagcttcagtacaaacctccaaaagcgcctacgcaggaaagattag

SEQ ID NO: 207339 - DNA, 982 bp, Artificial Sequence
  derived and/or modified sequence
agaaaacctagaggccgaagttcaaggttatccatctcaagtagcctagcaatatttgcaacatcccaatggccctgtccttttctttactgatggccgtgctggtgctcagctacaaatccatctgttctctgggctgtgatctgcctcagacccacagcctgggtaataggagggccttgatactcctggcacaaatgggaagaatctctcatttctcctgcctgaaggacagacatgatttcggattccccgaggaggagtttgatggccaccagttccagaaggctcaagccatctctgtcctccatgagatgatccagcagaccttcaatctcttcagcacagaggactcatctgctgcttgggaacagagcctcctagaaaaattttccactgaactttaccagcaactgaatgacctggaagcatgtgtgatacaggaggttggggtggaagagactcccctgatgaatgaggactccatcctggctgtgaggaaatacttccaaagaatcactctttatctaacagagaagaaatacagcccttgtgcctgggaggttgtcagagcagaaatcatgagatccctctcgttttcaacaaacttgcaaaaaagattaaggaggaaggattgaaacctggttcaacatggaaatgatcctgattgactaatacattatctcacactttcatgagttcttccatttcaaagactcacttctataaccaccacgagttgaatcaaaattttcaaatgttttcagcagtgtgaagaagcttggtgtatacctgtgcaggcactagtcctttacagatgacaatgctgatgtctctgttcatctatttatttaaatatttatttatttttaaaatttaaattattttttatgtgatatcatgagtacctttacattgtggtgaatgtaacaatatatgttcttcatatttagccaatatattaatttcctttttcattaaa

SEQ ID NO: 207340 - DNA, 570 bp, Artificial Sequence
  derived and/or modified sequence
atggcactctctttctcactgttgatggcagtcctggttttgtcctataagtcaatctgcagcctgggctgcgatctgccccagactcattctctcggcaacagaagagccctgatcctcctggcacagatggggcgcatctcacacttttcatgcttgaaagataggcatgacttcggattcccagaggaggagttcgatggacaccagtttcaaaaggcacaggctattagcgtactccatgaaatgatccagcagacctttaatctcttcagtaccgaagattcgtccgccgcatgggaacaaagcctgctggaaaagttctcaacagaactgtatcaacagctgaatgatctcgaggcttgcgtcatacaggaggttggcgtcgaggagactccactaatgaatgaggatagcatcctggccgttcgcaaatacttccagcggattaccctttacctgactgaaaaaaagtacagcccttgtgcttgggaggttgttcgggctgaaatcatgcgctcgcttagtttctccacaaacttacagaaaagattaagaaggaaggattag

SEQ ID NO: 207341 - DNA, 570 bp, Artificial Sequence
  derived and/or modified sequence
atggccctaagtttttcgcttctaatggcagtgctagttttgtcttacaagtcaatatgtagtttggggtgcgacctgccacagactcatagtctcggaaacagaagggccctgattcttctcgcccagatgggacggataagtcacttctcttgtcttaaagacagacatgactttggatttcctgaggaagagttcgatggacaccagtttcagaaggcccaagcaatttccgttctacatgagatgattcagcagacttttaatctttttagtaccgaggattcttcagccgcctgggagcagtctctgcttgaaaaattcagtaccgaactctaccaacagcttaatgatctggaagcttgtgttatacaggaagtcggtgtcgaagaaacaccgttgatgaatgaggactctatcctggccgtgaggaagtactttcaaagaatcaccttgtacctcactgagaaaaaatactctccttgtgcctgggaggtcgtgcgagcagaaattatgaggtctctgagtttctctaccaacctacagaagagactgagaagaaaagattag

SEQ ID NO: 207342 - RNA, 570 nt, Artificial Sequence
  derived and/or modified sequence
auggcacucucuuucucacuguugauggcaguccugguuuuguccuauaagucaaucugcagccugggcugcgaucugccccagacucauucucucggcaacagaagagcccugauccuccuggcacagauggggcgcaucucacacuuuucaugcuugaaagauaggcaugacuucggauucccagaggaggaguucgauggacaccaguuucaaaaggcacaggcuauuagcguacuccaugaaaugauccagcagaccuuuaaucucuucaguaccgaagauucguccgccgcaugggaacaaagccugcuggaaaaguucucaacagaacuguaucaacagcugaaugaucucgaggcuugcgucauacaggagguuggcgucgaggagacuccacuaaugaaugaggauagcauccuggccguucgcaaauacuuccagcggauuacccuuuaccugacugaaaaaaaguacagcccuugugcuugggagguuguucgggcugaaaucaugcgcucgcuuaguuucuccacaaacuuacagaaaagauuaagaaggaaggauuag

SEQ ID NO: 207343 - RNA, 570 nt, Artificial Sequence
  derived and/or modified sequence
auggcccuaaguuuuucgcuucuaauggcagugcuaguuuugucuuacaagucaauauguaguuuggggugcgaccugccacagacucauagucucggaaacagaagggcccugauucuucucgcccagaugggacggauaagucacuucucuugucuuaaagacagacaugacuuuggauuuccugaggaagaguucgauggacaccaguuucagaaggcccaagcaauuuccguucuacaugagaugauucagcagacuuuuaaucuuuuuaguaccgaggauucuucagccgccugggagcagucucugcuugaaaaauucaguaccgaacucuaccaacagcuuaaugaucuggaagcuuguguuauacaggaagucggugucgaagaaacaccguugaugaaugaggacucuauccuggccgugaggaaguacuuucaaagaaucaccuuguaccucacugagaaaaaauacucuccuugugccugggaggucgugcgagcagaaauuaugaggucucugaguuucucuaccaaccuacagaagagacugagaagaaaagauuag

SEQ ID NO: 207344 - protein, 1256 aa, Artificial Sequence
  derived and/or modified sequence
MPGPRGAAGGLAPEMRGAGAAGLLALLLLLLLLLLGLGGRVEGGPAGERGAGGGGALARERFKVVFAPVICKRTCLKGQCRDSCQQGSNMTLIGENGHSTDTLTGSGFRVVVCPLPCMNGGQCSSRNQCLCPPDFTGRFCQVPAGGAGGGTGGSGPGLSRTGALSTGALPPLAPEGDSVASKHAIYAVQVIADPPGPGEGPPAQHAAFLVPLGPGQISAEVQAPPPVVNVRVHHPPEASVQVHRIESSNAESAAPSQHLLPHPKPSHPRPPTQKPLGRCFQDTLPKQPCGSNPLPGLTKQEDCCGSIGTAWGQSKCHKCPQLQYTGVQKPGPVRGEVGADCPQGYKRLNSTHCQDINECAMPGVCRHGDCLNNPGSYRCVCPPGHSLGPSRTQCIADKPEEKSLCFRLVSPEHQCQHPLTTRLTRQLCCCSVGKAWGARCQRCPTDGTAAFKEICPAGKGYHILTSHQTLTIQGESDFSLFLHPDGPPKPQQLPESPSQAPPPEDTEEERGVTTDSPVSEERSVQQSHPTATTTPARPYPELISRPSPPTMRWFLPDLPPSRSAVEIAPTQVTETDECRLNQNICGHGECVPGPPDYSCHCNPGYRSHPQHRYCVDVNECEAEPCGPGRGICMNTGGSYNCHCNRGYRLHVGAGGRSCVDLNECAKPHLCGDGGFCINFPGHYKCNCYPGYRLKASRPPVCEDIDECRDPSSCPDGKCENKPGSFKCIACQPGYRSQGGGACRDVNECAEGSPCSPGWCENLPGSFRCTCAQGYAPAPDGRSCLDVDECEAGDVCDNGICSNTPGSFQCQCLSGYHLSRDRSHCEDIDECDFPAACIGGDCINTNGSYRCLCPQGHRLVGGRKCQDIDECSQDPSLCLPHGACKNLQGSYVCVCDEGFTPTQDQHGCEEVEQPHHKKECYLNFDDTVFCDSVLATNVTQQECCCSLGAGWGDHCEIYPCPVYSSAEFHSLCPDGKGYTQDNNIVNYGIPAHRDIDECMLFGSEICKEGKCVNTQPGYECYCKQGFYYDGNLLECVDVDECLDESNCRNGVCENTRGGYRCACTPPAEYSPAQRQCLSPEEMERAPERRDVCWSQRGEDGMCAGPLAGPALTFDDCCCRQGRGWGAQCRPCPPRGAGSHCPTSQSESNSFWDTSPLLLGKPPRDEDSSEEDSDECRCVSGRCVPRPGGAVCECPGGFQLDASRARCVDIDECRELNQRGLLCKSERCVNTSGSFRCVCKAGFARSRPHGACVPQRRR

SEQ ID NO: 207345 - DNA, 3771 bp, Artificial Sequence
  derived and/or modified sequence
atgcctggcccaaggggcgctgcaggcggacttgcccctgagatgcgcggggcaggcgctgccgggctgctcgcattattgctcttgctgctgctattgttattgggactgggcggacgagtggagggtgggccggcaggcgagaggggtgccggtggggggggggcgctcgccagagaaaggttcaaagtcgtttttgcacctgtgatctgtaagcgcacctgtctcaaaggacagtgcagagattcatgtcaacagggaagcaacatgacgctgatcggcgaaaacggccacagcaccgacactctgaccggcagtggattccgcgttgtagtgtgtcccctcccctgtatgaacggtggccagtgcagctcgcgtaaccagtgcctctgtccccccgattttacaggaaggttctgccaggtgcccgccgggggcgctggcggggggaccggcggctccgggcctggactttctcgaactggcgctctgagtacaggggctctgcctcctctcgctcctgaaggagactccgtggcttccaaacacgcgatttatgctgtgcaggtcattgccgaccctcctggccccggagaaggcccacctgcacagcacgctgccttcctcgtccctttgggtcccggccagatatctgcggaggtgcaagccccaccccccgttgtgaacgtgcgcgtgcatcatcccccagaggcttccgtgcaagttcataggattgagtcttcaaacgcagagagcgccgcccctagccaacacttgctaccccaccccaaaccaagccaccctagaccaccaacccagaagcctctcggccgctgctttcaagatacactcccaaagcagccatgtggcagtaatcctctgcctggactgaccaagcaggaggactgctgcggatccattggcactgcgtgggggcagagtaaatgccataaatgtccgcagttgcagtacactggagtgcagaaacccggccccgtgaggggtgaggtgggagccgattgccctcagggttataagagattaaactccacccattgccaggatattaacgaatgtgctatgcctggcgtgtgccgtcacggagattgtctgaataacccgggctcctaccgctgcgtttgcccacctggccacagcctagggccatctcgaacacaatgcattgccgataagcctgaggaaaaatctctgtgtttcagattggtgtcacctgagcatcagtgtcagcatcccctcacaacccgcttgacccgccagctctgctgctgcagcgttggcaaggcatggggggcacgatgtcagcgatgccccaccgacgggacagctgccttcaaggaaatatgccctgccgggaagggatatcacattctgacaagccatcagaccctcactattcagggcgagtccgacttctccctcttcctgcacccggatggaccacccaagccacagcagcttcccgaaagtcctagccaggcacctccgcccgaagataccgaggaagagcgcggcgtcactaccgacagccccgtgtccgaagagcgtagcgtgcagcagtcccaccccacagcaaccacaacacctgcccgtccatatccagaattgatatcaagacctagtccccccacaatgaggtggttcctgcctgacctccccccctcccggtctgctgtcgagatagcacctacgcaagtgaccgaaaccgacgagtgcagacttaatcaaaatatctgtgggcacggggagtgtgtgcccggccctccagactactcatgtcactgcaacccaggctatcgctctcaccctcaacataggtactgtgtggacgtaaatgagtgtgaagcggagccctgcggaccaggccgaggtatttgcatgaacactgggggctcatacaattgccattgtaacagggggtataggctgcacgttggcgccggcggcagatcctgtgttgacctgaatgagtgcgccaaaccacacctctgcggggatggcggattttgtattaacttcccagggcattacaaatgcaactgctacccggggtataggctcaaggcctcccggccgcccgtttgtgaagatatcgatgagtgcagggacccttcgagttgccctgatggtaagtgtgagaacaaaccaggttcattcaagtgcatagcatgccagcccggttaccgttcacaaggaggcggtgcctgtcgcgacgtgaatgagtgcgccgaaggaagtccatgtagccccggctggtgcgagaatctgccaggcagctttcggtgcacatgtgctcaggggtacgcacctgccccagacgggcggtcgtgtctggacgtggacgagtgtgaggcaggtgatgtttgtgataacggcatatgtagtaacacccctggcagcttccaatgtcagtgcctcagcggctatcacctcagccgcgaccgttctcactgcgaagacattgatgagtgtgacttcccggccgcttgtattggaggcgattgtatcaatactaacggaagctaccgctgcctttgcccccagggacacagacttgtggggggccgtaagtgccaagacatcgacgaatgcagccaggatccatcactctgccttccacacggcgcttgtaagaatctgcagggatcttatgtctgtgtctgcgacgaaggtttcacaccaacacaggatcagcacggatgtgaagaagttgaacagccacatcataaaaaggagtgttatcttaattttgacgatacagttttctgtgacagcgtcttggccactaacgttacacagcaggaatgctgttgttcgctgggcgccggctggggcgatcattgtgagatctacccctgcccagtatattcttccgcggaattccattcattgtgccctgatgggaaaggatatacacaggataacaatatagtaaactatggcatccccgctcatcgggatatcgatgagtgcatgctctttgggtcagagatttgtaaagaaggcaagtgtgttaatacccagcccgggtacgagtgttactgtaaacaggggttttattatgacggtaatttgcttgagtgcgtcgatgtcgatgagtgtctcgacgaaagtaattgtcggaacggcgtgtgtgagaatactagaggcgggtaccggtgtgcttgcaccccacccgccgaatatagtcccgcccagagacagtgtctgtcccccgaggagatggaaagagcccccgagcggcgcgatgtgtgctggagccaacggggggaagatggaatgtgcgcaggaccacttgctggccccgctttgacgttcgacgattgttgttgtcgtcaaggcaggggatggggagcccagtgcagaccctgtcctcccagaggggcggggtcccattgccccactagtcagagtgaaagcaactctttctgggacacctcaccccttctgctgggtaagccccctagggatgaggacagttcggaggaggatagcgatgaatgcaggtgcgtgagtgggcggtgcgttcctagacccgggggggcagtgtgtgaatgcccaggaggattccaactcgatgcatcccgggccaggtgtgtcgatatcgatgaatgtagggaactgaaccagagaggcttgttatgcaagtctgaacgttgcgtgaatacatcggggtctttccgatgcgtctgtaaagccgggttcgcaaggagccgccctcacggggcatgcgtgcctcagagacgtagatag

SEQ ID NO: 207346 - DNA, 4046 bp, Artificial Sequence
  derived and/or modified sequence
atgcccgggccccgaggggctgctggcggcctggcccctgagatgcgcggggcgggggcggcggggctgctggcgctgctgctgctgctgctgctgctgctgctgggcctgggcggcagggtcgagggggggccggccggcgagcggggcgcaggcgggggcggggcgctggcccgcgagcgcttcaaggtggtctttgcgccggtgatctgcaagcggacctgtctcaagggccagtgtcgggacagttgtcagcagggctccaacatgacgctcatcggagagaacggccacagcacagacacgctcacgggctccggcttccgcgtggtggtgtgccctctcccctgcatgaatggcggccagtgctcctcgcgaaaccagtgcctgtgtcccccggacttcactgggcgcttctgccaggtgcccgcaggaggagccggtgggggtaccggcggctcaggccccggcctgagcaggacaggggccctgtccacaggggcgctgccgcccctggctccggagggcgactctgtggccagcaagcacgccatctacgccgtccaggtgatcgctgaccctcctgggcccggggaggggcctcctgcccagcacgcagccttcctggtgcccctaggcccgggacagatctcagcagaagtgcaggccccgccccccgtggtgaatgtgcgcgtccatcacccgcccgaggcctcagtccaggtgcaccgcattgagagctcgaacgccgagagcgcagccccctcccagcacctgctgccgcaccccaagccctcgcacccccggccgcccacccagaagcccctgggccgctgctttcaggacactctgcccaagcagccgtgtggcagcaaccccctccccggcctcaccaagcaggaagactgctgcggtagcatcggcactgcctggggccagagcaagtgccacaagtgtccccagctgcagtacacaggagtgcagaagccagggcctgtacgtggggaagtgggcgctgactgtccccagggctacaagaggcttaacagcacccactgccaggacatcaacgagtgcgcaatgccgggcgtgtgtcgccatggtgactgcctcaacaaccctggctcctatcgctgtgtctgcccacctggccatagtttaggcccctcccgtacacagtgcattgcagacaaaccggaggagaagagcctgtgtttccgcctggtgagccctgagcaccagtgccagcacccactgaccacccgcctgacccgccagctctgctgctgcagtgtcggcaaggcctggggcgcgcggtgtcagcgctgcccaacagatggcaccgctgcgttcaaggagatctgcccagctgggaagggataccacattctcacctcccaccagacgctcaccattcagggcgagagtgacttttcccttttcctgcaccctgacgggccacccaagccccagcagcttccggagagccctagccaggctccaccacctgaggacacagaggaagagagaggggtgaccacggactcaccggtgagtgaggagaggtcagtgcagcagagccacccaactgccaccacgactcctgcccggccctaccccgagctgatctcccgtccctcgcccccgaccatgcgctggttcctgccggacttgcctccttcccgcagcgccgtagagatcgctcccactcaggtcacagagactgatgagtgccgactgaaccagaacatctgtggccacggagagtgcgtgccgggcccccctgactactcctgccactgcaaccccggctaccggtcacatccccagcaccgctactgcgtggatgtgaacgagtgcgaggcagagccctgtggcccggggaggggcatctgcatgaacaccggcggctcctacaattgccactgcaaccgcggctaccgcctgcacgtgggcgccggggggcgctcgtgcgtggacctgaacgaatgcgccaagccccacctgtgcggcgacggcggcttctgcatcaactttcccggtcactacaagtgcaactgctaccccggctaccggctcaaagcctcccggcctcctgtgtgcgaagacatcgacgagtgccgggacccaagctcttgcccggatggcaaatgcgagaacaagcccgggagcttcaagtgcatcgcctgtcagcctggctaccgcagccaggggggcggggcctgtcgcgacgtgaacgagtgcgccgagggcagcccctgctcgcctggctggtgcgagaacctcccgggctccttccgctgcacctgtgcccagggctacgcgcccgcgcccgacggccgcagttgcttggatgtggacgagtgtgaggctggggacgtgtgtgacaatggcatctgcagcaacacgccaggatctttccagtgtcagtgcctctctggctaccatctgtccagggaccggagccactgcgaggacattgatgagtgtgacttccctgcagcctgcattgggggtgactgcatcaataccaatggctcctacagatgtctttgcccccaggggcatcggctggtgggtggcaggaaatgccaagacatagatgagtgcagccaggacccgagcctgtgccttccccatggggcctgcaagaaccttcagggctcctatgtgtgtgtctgcgatgagggcttcactcccacccaggaccagcacggttgtgaggaggtggagcagccccaccacaagaaggagtgctacctgaacttcgatgacacagtgttctgcgacagcgtattggccaccaacgtgacccagcaggagtgctgctgctctctgggggccggctggggcgaccactgcgaaatctacccctgcccagtctacagctcagccgagttccacagcctctgcccagacggaaagggctacacccaggacaacaacatcgtcaactacggcatcccagcccaccgtgacatcgacgagtgcatgttgttcgggtcggagatttgcaaggagggcaagtgcgtgaacacgcagcctggctacgagtgctactgcaagcagggcttctactacgacgggaacctgctggaatgcgtggacgtggacgagtgcctggacgagtccaactgccggaacggagtgtgtgagaacacgcgcggcggctaccgctgtgcctgcacgccccctgccgagtacagtcccgcgcagcgccagtgcctgagcccggaagagatggagcgtgccccggagcggcgcgacgtgtgctggagccagcgcggagaggacggcatgtgcgctggccccctggccgggcctgccctcaccttcgacgactgctgctgccgccagggccgcggctggggcgcccaatgccgaccgtgcccgccgcgcggcgcggggtcccattgcccgacatcgcagagcgagagcaattccttctgggacacaagccccctgctgttggggaagcccccaagagatgaggacagttcagaggaggattcagacgagtgtcgctgcgtgagtggccgctgcgtgccgcggccgggcggcgccgtgtgcgagtgtcccggcggcttccagctcgacgcctcccgcgcccgctgcgtggatatcgacgagtgccgagagctgaaccagcgcgggctgctgtgcaagagcgagcgctgcgtgaacaccagcggctccttccgctgcgtctgcaaagccggcttcgcgcgcagccgcccgcacggggcctgcgttccccagcgccgccgctgacgccgccgacgccgccctcggcccagacctcggtgatcactgagggatttccgcgagctcggcctcacttctgccccgacttgtggctcggacccagggaccttcagggcccgcagaccctcccggcgccttgagacccgaggcgcccctaccggcccccctccccggttagcgggcggttgtaaggtctccggcgggcgctgcctgccttcctcccagagggtgtttcctagaaactgataaatcagatcgtgcctctttacccttggctttcg

SEQ ID NO: 207347 - DNA, 3771 bp, Artificial Sequence
  derived and/or modified sequence
atgcctggccccagaggagctgctgggggcctggcccctgagatgagaggagctggagctgctggcctgctggccctgctgctgctgctgctgctgctgctgctgggcctgggcggccgggtggagggcggccctgctggggagagaggagctgggggcggcggggccctggcccgggagcgcttcaaggtggtgtttgcccctgtgatctgcaagaggacctgcctgaagggccagtgccgggacagctgccagcagggcagcaacatgaccctgattggagaaaatggccacagcacagacaccctgaccggcagcggcttccgggtggtggtgtgccccctgccctgcatgaatggaggccagtgcagcagcaggaaccagtgcctgtgccccccagacttcaccggccgcttctgccaggtgcctgctgggggcgccggcggcggcactggaggcagcggccctggcctgagcaggactggagccctgagcactggagccctgccccccctggcccctgagggggacagcgtggccagcaagcacgccatctatgctgtgcaggtgattgctgaccccccaggccctggagagggccccccagcccagcacgccgccttcctggtgcccctgggccctggccagatctctgctgaggtgcaggcccctcctcctgtggtgaatgtgcgggtgcaccaccccccagaggcctctgtgcaggtgcacagaattgagagcagcaatgctgagagcgctgcccccagccagcacctgctgccccaccccaagcccagccacccccggccccccacccagaagcccctgggccgctgcttccaggacaccctgcccaagcagccctgtggcagcaaccccctgcccggcctgaccaagcaggaggactgctgcggcagcattggaacagcctggggccagagcaagtgccacaagtgcccccagctgcagtacacaggagtgcagaagccaggccctgtgcggggggaggtgggcgctgactgcccccagggctacaagaggctgaacagcacccactgccaggacatcaatgaatgtgccatgcctggggtgtgcagacatggagactgcctgaacaaccctggcagctaccgctgtgtgtgccccccaggccacagcctgggccccagcaggacccagtgcatcgctgacaagccagaggagaagagcctgtgcttccggctggtgtccccagagcaccagtgccagcaccccctgaccacccggctgacccggcagctgtgctgctgcagcgtgggcaaggcctggggcgcccgctgccagcgctgccccacagatggaacagctgccttcaaggagatctgcccagctgggaagggctaccacatcctgaccagccaccagaccctgaccatccagggcgagagtgacttcagcctcttcctgcacccagatggcccccccaagccccagcagctgcctgagagccccagccaggcccctcctcctgaggacacagaggaggagcggggcgtgaccacagacagccctgtgtctgaggagaggtctgtgcagcagagccaccccacagccaccaccaccccagcccggccctacccagagctgatcagccggcccagcccccccaccatgcgctggttcctgcctgacctgccccccagccgctctgctgtggagatcgcccccacccaggtgacagaaacagatgaatgtcggctgaaccagaacatctgtggccatggagaatgtgtgcccggccccccagactacagctgccactgcaaccctggctaccgcagccacccccagcaccgctactgtgtggatgtgaatgaatgtgaggccgagccctgtggccctggccggggcatctgcatgaacacaggaggcagctacaactgccactgcaacagaggctaccgcctgcacgtgggcgccggcggccgcagctgtgtggacctgaatgaatgtgccaagccccacctgtgtggagatggcggcttctgcatcaacttccctggccactacaagtgcaactgctacccaggctaccgcctgaaggccagccggccccctgtgtgtgaggacattgatgagtgccgggaccccagcagctgcccagatggaaaatgtgagaacaagccaggcagcttcaagtgcatcgcctgccagcccggctaccgcagccagggcggcggggcctgcagagatgtgaatgaatgtgccgagggcagcccctgcagccctggctggtgtgagaacctgcccggcagcttccgctgcacctgtgcccagggctacgccccagccccagatggccgcagctgcctggatgtggatgaatgtgaggccggagatgtgtgtgacaatggcatctgcagcaacaccccaggcagcttccagtgccagtgcctgagcggctaccacctgagccgggacaggagccactgtgaagatattgatgaatgtgacttccctgctgcctgcattggaggagactgcatcaacaccaacggcagctaccgctgcctgtgcccccagggccaccggctggtgggcggcaggaagtgccaggacattgatgaatgttcccaggaccccagcctgtgcctgccccacggggcctgcaagaacctgcagggcagctatgtgtgtgtgtgtgatgagggcttcacccccacccaggaccagcacggctgtgaggaggtggagcagccccaccacaagaaggagtgctacctgaactttgatgacaccgtcttctgtgacagcgtgctggccaccaacgtgacccagcaggagtgctgctgcagcctgggcgccggctggggagaccactgtgagatctacccctgccctgtgtacagcagcgctgagttccacagcctgtgcccagatggcaagggctacacccaggacaacaacatcgtgaactacggcatcccagcccaccgggacattgatgagtgcatgctgtttggcagcgagatctgcaaggagggcaaatgtgtgaacacccagcccggctatgagtgctactgcaagcagggcttctactatgatggcaacctgctggagtgtgtggatgtggatgaatgtctggatgagagcaactgcagaaatggagtgtgtgagaacacccggggcggctaccgctgtgcctgcaccccacctgctgagtacagccctgcccagaggcagtgcctgagccctgaggagatggagcgggcccctgagaggagagatgtgtgctggagccagagaggagaagatggcatgtgtgccggccccctggccggccctgccctgacctttgatgactgctgctgccggcagggccggggctggggcgcccagtgccggccctgccccccaagaggagctggcagccactgccccaccagccagagcgagagcaacagcttctgggacaccagccccctgctgctgggcaagcccccaagagatgaggacagcagtgaagaagattctgatgaatgtcgctgtgtgtctggccgctgtgtgcccaggcctggaggagctgtgtgtgaatgtcctgggggcttccagctggatgccagccgggcccgctgtgtggacattgatgagtgccgggagctgaaccagaggggcctgctgtgcaagtctgagcgctgtgtgaacaccagcggcagcttccgctgtgtgtgcaaggccggctttgcccggagccggccccatggagcctgtgtgccccagaggagaagatag

SEQ ID NO: 207348 - DNA, 3771 bp, Artificial Sequence
  derived and/or modified sequence
atgcccggcccccggggcgccgccggcggcctggcccccgagatgaggggtgcaggcgccgccggtctcctggctttgttattactgctgctcctgctgctacttggattagggggaagggttgagggcggaccggccggcgagcgtggcgcaggcggggggggcgccctggcaagggaacgctttaaagtggtattcgctcctgtaatctgtaagcgcacttgcctaaaggggcaatgccgcgactcgtgtcagcagggctccaacatgacattaatcggagaaaatggtcacagcacagatacactgacaggttcagggtttcgcgtggtggtgtgccccctgccgtgcatgaatggtggccagtgttcttctaggaaccaatgtctctgcccacccgatttcaccggccggttctgccaggtccctgctggaggagccggtggcggcacgggcgggtcagggcccgggttgtccaggacaggtgctctctctacgggcgctctaccgcccttagcccccgagggtgattcggtggcgtcaaagcacgccatctatgctgtgcaggttatcgccgaccctccgggtcccggagagggacccccagcccaacacgccgcctttctggtgccactgggtcctggacagatttccgctgaagtgcaagcaccaccgccagtggttaatgtgagagttcatcaccccccggaggcctctgtgcaagtgcatcgtatcgagtcctccaatgcagagtcggctgcaccaagccagcacctcctaccccacccgaaaccttcccatccacggcctcctacccagaagcccttagggcgctgcttccaagacaccctgcccaagcagccctgcggaagtaatccactgccaggactgaccaagcaggaggattgctgcggcagcattgggacagcttgggggcagtcaaagtgccataagtgcccacaactccagtatacaggcgtgcagaaacccggacccgtacgaggcgaagtcggtgcggattgtccacaaggctacaagcgcctgaatagcacacactgtcaggatattaacgaatgtgcaatgcccggtgtgtgccgccatggagactgccttaataatccaggaagttatcggtgtgtgtgtccgcccggacacagtttgggaccgtctcggacccagtgtatcgcggataaacctgaagaaaaaagcctctgctttagactggtgtcccctgagcatcagtgccagcacccattgaccacacgacttacccgacagctatgttgctgtagtgttggcaaagcatggggagccagatgtcagagatgcccaacagacggcacggccgcattcaaagagatttgtcctgccggtaagggctatcacattcttactagccaccagactttaaccatacagggcgagagcgacttcagtctgttcctgcacccagatggtcctcctaaaccccaacagttgcctgaaagcccctcgcaggcgccccctcctgaggacaccgaggaggagcgtggcgtgacgaccgactcaccggtgagcgaagagaggagcgtccagcagtcacaccccaccgccaccaccacaccagcccgaccctacccagagctaatctctcggccttccccgccaactatgcgctggttcttgccagacctgcctccaagccggagcgccgtggaaattgcccccacacaagtcacagaaacggacgagtgccgattgaatcagaatatctgcggccatggagaatgtgtacctgggcctccagattacagctgtcactgtaaccctggctataggagtcatccgcagcaccggtattgcgtggatgtgaatgagtgtgaagccgagccatgcggccctggcagggggatctgtatgaacaccggcggcagctacaactgccactgtaaccgcggatataggctgcacgtgggcgctggcggcagaagctgtgtggatctcaacgagtgcgccaaaccccacctctgtggagacggtggcttctgcatcaacttcccaggtcactacaagtgcaattgctatccaggttatcgcctaaaggcaagcaggccacctgtgtgtgaggatatagacgaatgccgagatccttccagctgcccagatggaaagtgcgaaaacaaaccaggcagtttcaagtgcatcgcttgtcagccagggtatcgttctcagggcgggggagcctgtcgagacgtgaacgagtgcgcagagggttctccatgcagccccgggtggtgtgagaatctgcccggcagttttcgctgcacctgcgcccagggatacgcgccggcccccgacggtaggtcgtgcctcgatgtggacgaatgtgaggccggcgatgtttgcgacaacggtatttgctctaatacccctggctcattccagtgccagtgcctctccggttaccacttgagcagggatcgatcccactgcgaagacatcgacgaatgtgacttcccagcagcctgtatcgggggagactgcattaacaccaatggctcatatcgatgtctttgcccacagggccacaggctggttgggggaaggaagtgtcaggatattgacgagtgcagtcaggacccatcactctgcttaccgcacggagcttgtaagaacctgcagggctcttacgtctgcgtgtgcgacgaaggattcaccccaacacaggaccagcatggttgcgaggaagtggagcagcctcaccataagaaagaatgttatctgaacttcgatgacaccgtattctgcgactctgtgcttgctaccaacgtgactcagcaggaatgttgctgcagtttgggagccggatggggcgaccattgcgaaatatacccttgcccagtttactccagtgccgaatttcattctctgtgtccagacggaaagggatacacacaggataataatatagtgaattacggcatacctgctcaccgggacattgacgagtgtatgctgtttggcagtgagatctgcaaggaggggaagtgcgtgaacacgcagcctggctatgagtgttactgcaagcaaggcttctactacgacggcaatctgctggagtgcgtggacgtcgatgagtgccttgacgagagcaattgtaggaacggagtctgcgaaaatactagaggaggatatcggtgtgcctgcactcctcctgccgagtactcacccgcgcagaggcagtgtctctctccagaagagatggagcgggcccctgagcgccgggatgtttgctggagccagcgcggggaggatggtatgtgtgccggccccctcgcaggacccgcgctgacctttgatgactgctgctgcaggcagggaagagggtggggtgcccaatgcagaccttgtccacctcgcggggcaggatcccactgtcctacatcgcagagtgagagcaatagtttctgggacacttcacccctcttactgggcaagccgcctcgggatgaggactctagcgaggaagactcagacgagtgccggtgtgtaagcggtagatgcgttcctaggccaggcggcgctgtgtgcgagtgtcccgggggtttccagttggacgcttcccgcgcacggtgcgtggatatcgacgagtgtagggaactgaatcaacggggcctgctgtgcaagtcagaaaggtgtgtcaacacgagcgggtccttccgttgtgtctgtaaggcagggtttgcccgttcgagaccccacggcgcttgcgtcccccagagaagacgttag

SEQ ID NO: 207349 - DNA, 3771 bp, Artificial Sequence
  derived and/or modified sequence
atgccaggacccaggggcgcagcaggcggtttggcccctgaaatgcggggagctggcgctgctggcctcctggccctgttgttgcttctgctgctgctcctgctcggccttggtgggcgtgtcgagggcggaccagccggtgagcgaggagcaggaggaggcggtgccttggccagggaacgattcaaggtagtcttcgcacccgtgatttgcaagagaacctgcctcaaaggccagtgtagagactcatgtcaacagggctctaacatgactctcatcggggaaaatggccactccacagacactcttaccggttccgggttcagagtggtcgtttgccctctcccctgtatgaatgggggacagtgtagttcccgcaatcagtgcctgtgccccccagatttcactggacgtttctgccaggttccagcaggaggagcaggagggggtacaggcggtagtggtcccggactgtcccggaccggcgcattatccaccggagccctccctcccctggctcctgagggcgacagtgttgcctccaagcacgcaatttacgccgtccaggtgatcgccgacccgcctgggcctggagaggggccacccgcacaacatgcggctttcctagtgccactgggaccaggtcagatttcagcagaggttcaggcccctccacccgtggtgaacgtgagggtccatcacccaccagaagcctctgtccaagttcatcgcattgagtcttcgaatgccgagagtgccgctccctcccagcatttgctgccgcaccccaaaccatctcatcctcgccctccaacgcagaagccacttggcagatgttttcaggacactctgccaaagcagccctgtggcagcaatcccctgccaggcctgactaaacaggaggactgctgcggttctatcgggactgcctgggggcagtctaagtgccacaagtgcccgcagctgcagtacactggtgtgcagaaacccggaccagtgcgtggtgaagtgggcgctgactgcccccaagggtataaacgacttaacagcactcactgtcaggacatcaatgagtgcgctatgcccggagtgtgcagacacggagactgtcttaacaatcccggatcgtacaggtgtgtttgcccccctggacactccttgggacccagccggacccagtgcattgcagacaagccagaggagaagtcgctttgtttcagactggtctctcccgagcaccagtgccaacacccccttaccacacggctcactcgccagctgtgttgctgttctgtgggtaaagcttggggcgctcgatgccagagatgcccgaccgacggtaccgccgcatttaaagagatatgtcccgcaggtaaaggctaccatattttgacatcacatcagacactcacaatccagggtgagtccgatttcagtcttttccttcatcctgatgggcctcccaaaccacagcagctacccgagagcccctcacaggcgccaccccctgaagacacagaagaggaaaggggagtgacaacggacagccctgtgagcgaagagaggtccgtgcagcagtcacaccctaccgcgactaccacccccgcaagaccctatcccgaactgatatcgagacctagccccccaaccatgcgttggttcctgccagatctgccaccaagcagatctgctgtggagatagccccaacgcaggtgaccgaaaccgacgagtgccgacttaaccaaaacatctgcggacatggcgagtgtgtcccaggacctccagactatagttgtcactgcaatcctgggtacagatcacaccctcagcacaggtactgcgtagatgttaacgaatgtgaggccgaaccttgcggcccaggaagagggatctgcatgaacacgggcggatcatacaattgccattgtaacagagggtacaggctgcatgtaggggctgggggtaggtcatgcgttgacctgaatgagtgcgctaaaccccacctctgtggagacggcggattttgcatcaattttcccggtcattataagtgtaattgctatccaggctaccgcctgaaggcgtccagacctcccgtgtgcgaagatatagatgagtgtcgtgatccatcaagctgcccagacggcaagtgcgaaaacaaaccagggagttttaagtgtatcgcctgtcagccagggtacagatcccagggaggcggagcatgcagggatgtcaatgagtgcgcagagggcagtccctgttcccctggttggtgcgagaacctgccaggcagtttcaggtgtacttgtgcccaaggctacgctccagctcccgatggtcgatcctgcttggacgtagatgagtgcgaagcgggtgacgtgtgcgacaatggcatctgttcaaatacaccgggttccttccaatgtcaatgtttatccgggtaccacttaagcagggacaggtcacattgcgaggacatcgacgagtgcgactttccagccgcatgcatcggcggagactgcatcaacaccaatgggtcctaccgctgtctgtgcccacaaggacaccggctggtgggcggacgtaaatgtcaggacattgacgaatgcagccaggatccatctctctgtctccctcatggagcatgcaaaaacctgcaggggagttacgtttgtgtttgtgatgagggatttacccccacacaggatcaacacggctgtgaagaggtagagcagccacaccataaaaaagaatgttatctaaattttgatgacacggtcttctgcgattctgtgctggcaacgaatgtgactcagcaagaatgctgctgttccctgggagccggatggggggaccattgcgaaatctatccatgtcccgtctattcatcagccgagttccattcactgtgccctgatggaaagggctacacacaagataataatattgtaaattacggtattccagcgcatcgggacattgatgaatgtatgctctttgggagtgagatttgcaaagagggaaagtgtgtcaacactcagccaggatacgagtgctattgcaaacagggcttttattacgacggcaatcttttagagtgcgtggacgtggacgagtgccttgatgaatcgaattgtcggaatggagtctgtgagaatacccgagggggataccgttgtgcttgtacccctcccgctgagtattcacctgctcagcgccagtgcctctcacccgaggagatggagcgggcacctgaacggagggatgtgtgctggtctcagcgaggtgaagatggaatgtgcgccggtccacttgctgggcctgccctgacatttgacgactgctgctgtcggcagggtagggggtggggcgctcagtgcagaccctgtccccctcgcggtgcaggcagccactgccctacctcccagtctgaaagcaatagcttttgggataccagtccattgcttctcggaaaacccccaagggacgaggacagttcagaagaggactccgatgaatgccgttgtgtgagcggtcgctgtgtacccagacccggtggtgctgtttgtgagtgtcctggcggttttcagctcgatgcctcccgcgcacgctgcgtggatatagacgagtgcagagaacttaatcagcgcggactactctgcaagagtgaaagatgtgttaacacctccggcagctttcggtgtgtttgcaaagcgggtttcgcacggtcccggccacatggcgcatgcgtgccacagcgaaggagatag

SEQ ID NO: 207350 - DNA, 3771 bp, Artificial Sequence
  derived and/or modified sequence
atgccgggcccaaggggagctgccggaggtctcgcacctgagatgcggggagcaggagcggccggactcctcgcactcctgcttctgcttcttctcctacttttgggcttgggcggccgggttgaaggcgggcctgcaggtgaacggggcgccggcggcggcggcgcactcgctagagaaaggttcaaagttgtgttcgcaccagtcatatgcaagaggacttgtctcaagggtcagtgtcgtgactcttgccagcagggcagcaacatgacactgattggagagaatggacattcaacagataccctaacaggctcaggctttcgtgtcgtcgtgtgcccattaccatgcatgaatggtggtcaatgtagctctcggaatcagtgtttgtgcccaccagacttcacaggccgcttctgccaggtacctgccgggggtgcaggtggcggcacaggaggaagcggcccagggctcagccggaccggcgcactctccacaggggctctgccccctctggctcccgaaggggacagtgttgcctccaaacacgcaatctatgcagtgcaggtaattgccgatccccctggcccaggcgaaggacctcccgcacaacacgctgcatttctggtgcccctcggtcctggccagataagcgccgaggtccaagctccccccccagtggtgaacgttcgcgtacatcatccacccgaggcttcagttcaggtgcatagaattgagtcttcgaatgctgaaagcgcagccccaagccagcacctgctcccacacccaaagccctcccatcccaggccgcctacccaaaaaccgctcggacgctgttttcaggacacactcccaaagcagccttgtggttcaaaccccctccctggcctaactaaacaggaggactgttgtgggtctattgggacagcctggggccagagtaagtgtcataaatgtccccaattgcagtataccggtgtccagaaacccggccctgtgagaggagaggtaggggcggattgcccacaggggtataaaagactcaacagcacacactgtcaggacatcaatgagtgtgctatgcccggggtctgtaggcacggagactgtttgaataaccccgggtcatacaggtgcgtgtgccctcccggacattccctgggtccatctcggactcaatgtatagccgataagcccgaggagaagagcctgtgtttccgattggtcagtcctgagcatcaatgccagcatcccctgactactcggctaactcgtcagttatgctgctgttccgtggggaaggcctggggagctcgctgccagaggtgtcccacagatgggacagccgcattcaaagaaatttgtcctgcagggaaaggttaccatattctcacctcccatcaaactcttaccatccagggcgagtccgacttcagcttgttcttgcaccctgatggaccccctaagccccagcagctgcccgaatctccatcccaagcgcctccccccgaagacaccgaggaagagagaggagtcaccacagacagccctgtcagtgaagagagatctgtacagcagagtcatcctaccgcgacaaccacacctgccagaccgtaccctgagttaatcagcagaccctctccccctaccatgaggtggtttctaccagacctacccccttctcgctcagcagtggagatcgctcctacacaggttacagaaacggacgagtgcaggctgaatcagaatatctgcggccacggcgagtgtgttcccggccctccagactatagctgccactgcaacccaggctaccggtcgcacccacaacaccggtactgcgttgacgtgaacgagtgtgaggcagagccctgcgggcctgggagaggaatctgtatgaatacaggaggaagctataattgccattgtaaccggggataccggctgcacgtcggagctgggggacgatcctgtgtggacctgaacgaatgcgctaaacctcacctctgtggcgacggtggtttttgtataaacttccccggacattacaaatgcaactgttatcctggttaccgactaaaggcctcaagacctcctgtgtgcgaagatattgacgagtgcagagacccgagcagttgccccgacggtaagtgtgagaataaaccggggtcctttaagtgcatcgcgtgtcagccaggctaccgaagtcaaggggggggcgcctgccgtgacgtcaatgagtgtgcagagggcagtccttgcagtccgggatggtgtgagaacttaccgggctccttcagatgtacctgtgcccaaggctacgcgcccgctcctgacggaagatcatgcttagatgtcgatgaatgtgaggcaggcgacgtgtgcgacaacggtatctgctccaatacgcctgggtctttccaatgccagtgcttgagtggttaccacctgtcaagagatcggtcccattgcgaagacatcgacgaatgtgacttcccggcagcatgcatcggcggagactgtattaataccaatggcagctatcggtgcctctgcccccagggacaccggctagtggggggccggaagtgccaggatatagatgaatgttctcaggacccctcactttgcctcccgcacggggcatgtaagaacctgcagggcagctacgtttgcgtgtgcgacgaggggttcacccctacccaagatcagcatggctgcgaggaagttgagcagccacaccacaaaaaggagtgttacctgaactttgatgataccgtgttttgtgactctgtcctcgccacaaacgtgactcaacaggagtgttgttgctcattaggtgctggatggggcgaccactgtgagatatatccatgtcccgtctattcctctgccgaatttcactccctgtgtcccgatggcaaggggtacacacaggacaataacatcgtgaactacggaattcccgcccatcgcgacatcgatgaatgtatgctgtttgggagcgagatttgtaaggagggcaaatgtgtaaatactcagccaggttatgagtgctactgcaagcaagggttttattacgacggaaatctccttgaatgcgttgacgtcgacgagtgcctggacgagtccaactgccgaaatggggtttgtgaaaacactaggggaggctatagatgcgcatgcacaccacctgccgagtattcccccgcccaaaggcaatgtcttagcccagaggagatggaaagggcccccgaacgcagagacgtgtgttggagccagcgtggcgaggacggaatgtgtgcggggcccctggctggacctgcactgaccttcgacgactgctgctgccggcagggcaggggctggggggctcagtgtagaccatgcccacccaggggtgccggttcccactgtccaacaagtcagtctgaatccaactcgttctgggacactagccctcttcttctgggtaaacctccgcgtgacgaggactcatctgaagaagatagcgatgaatgccgctgtgtgagtggccggtgtgtccccagacccggtggtgccgtatgcgaatgtcccggcgggttccagttggatgcctcacgagcaaggtgtgtggacatcgacgaatgcagagagctaaaccagagggggcttctctgtaaaagtgagagatgcgtcaacacttccggctccttcaggtgtgtctgtaaagccgggttcgccaggagtcggcctcatggagcttgcgtcccacagcggagacggtag

SEQ ID NO: 207351 - DNA, 3771 bp, Artificial Sequence
  derived and/or modified sequence
atgcctggcccgcggggagctgccggaggactggctccagagatgcgcggcgccggcgccgccggcctgcttgccttgctgctgctgctgcttctgcttctcctaggcctcggcggtagagtcgaaggcgggcccgctggtgagagaggcgcgggcggagggggagcactcgctcgggagaggtttaaggtcgtattcgcgcccgtcatatgcaagcgcacctgcctgaagggacagtgtagagatagttgccaacaaggatcaaacatgacgttgataggagaaaatggacacagtacagacaccctgacggggagtggctttagagtagtcgtttgcccccttccctgcatgaacggaggccagtgcagttctagaaaccagtgtctgtgtcccccagatttcactggaagattctgtcaggttccagccggcggtgccggaggcgggaccggcggctctggcccgggcctgtccaggaccggtgctttatctactggagctctccctcctctcgcccctgaaggtgactccgttgcgtccaagcacgctatttacgctgtccaggtcattgccgaccccccaggaccaggggaaggccccccggcccagcacgcggcttttctggtaccactgggccccggccagatctccgcagaggtccaagctcccccccccgttgtaaacgtccgtgtacatcatccccccgaggcaagcgttcaggtccatcgcattgaatccagcaacgccgagtcagcagccccctctcagcaccttctgccccaccccaagccctctcatccccgtccccctacacaaaaaccccttggccgctgcttccaagataccttaccaaagcagccgtgtggatccaaccctctgcccggcctaacgaagcaagaagactgttgtggtagtataggtacagcttggggccaaagcaaatgccacaagtgcccacagctgcagtacaccggcgtccagaagccaggcccagttcgaggagaagttggagcagattgcccccaaggatataaaagactcaactcgacacattgccaagatatcaatgagtgcgctatgcctggtgtgtgtaggcatggcgactgtctgaacaatcccggttcatataggtgtgtgtgcccaccaggccacagcttgggcccgtccagaacacaatgcatcgcggataagccagaggaaaagtcactttgcttccgtttggtttcccctgagcaccagtgccaacacccgctgacaacccgcctaacacgccaattatgttgctgctccgtggggaaggcgtggggcgcaaggtgccaaagatgtcccacagatggtacggccgctttcaaagaaatctgcccagcgggaaaggggtatcacatcctgacttcccaccagaccttgacgatccagggagaatctgattttagcttattcctgcatcctgacggcccccctaaaccgcaacagctgccagaatcaccgtctcaagctcccccacctgaagacactgaggaagaacggggcgtgacaaccgactctccagtgtcagaggagcgaagtgtccagcagtcgcaccctacagccactactactccagcacgtccataccctgaacttataagcagaccttccccaccgaccatgcggtggtttctccctgatctacctcctagccgcagcgcggtagaaattgccccaactcaagtcaccgagactgatgagtgccgacttaatcaaaacatttgtggtcacggcgaatgtgtacccggtccccctgactactcctgccattgcaaccctggataccgaagccatcctcaacaccggtactgtgtagatgtgaacgagtgcgaggcagaaccttgcggacctggcagaggtatatgcatgaatactggaggatcctataactgtcattgcaaccgaggataccgactgcacgtgggtgctggaggtcggagctgcgtggatctaaatgagtgcgcaaaaccgcacctgtgtggagacggggggttctgcataaatttccctggccattacaagtgcaattgctatcctggatatcgtctaaaggcatcacgacccccagtctgcgaggatattgatgagtgcagagatccctcgagttgcccagatggtaagtgtgagaataagcccggctcctttaaatgtattgcgtgccagccaggctatagatcccagggcggcggagcctgcagagacgtaaacgagtgcgcagaaggtagcccttgcagccctggatggtgcgaaaaccttcctggatcattccgctgtacgtgcgcccagggatacgcacctgctccagacgggaggagttgtttagacgtggacgaatgcgaggctggcgacgtgtgtgacaatggcatatgtagtaacacccccggctccttccagtgccaatgtttatctggttatcatctctcccgagacagatctcattgtgaggatatcgacgagtgtgatttccctgctgcctgtataggcggagactgcatcaatacaaacggctcctatcgctgcctatgtccccagggccaccgcctagtgggggggagaaagtgtcaagatattgatgaatgtagccaggacccttccctttgtctaccacacggcgcttgcaaaaatttgcagggatcttatgtttgcgtgtgtgatgagggattcactcccacccaggatcaacatggctgtgaggaagtggaacagcctcaccataagaaagaatgctatctcaatttcgatgacactgttttttgcgatagcgtgcttgctaccaatgttactcagcaagagtgttgctgcagcctaggagctggctggggagaccactgcgaaatctacccctgccctgtgtactcttctgccgaattccattctctctgcccagatggaaaaggatatactcaggataacaacatcgttaattatggaatcccggcccatcgcgatatagatgaatgcatgctgtttggatccgagatctgtaaggagggaaaatgcgtgaacactcagcccggatacgagtgttattgtaaacagggattctactacgatggcaatctgctagaatgtgttgacgtggatgaatgtctggatgagtcaaattgtaggaatggcgtttgtgagaatactagaggcggatataggtgtgcttgtacccccccagccgaatattcgcccgcgcagcggcagtgtctgagccctgaagaaatggaaagagcgcccgagcgacgtgacgtgtgttggtcccagagaggtgaggacggaatgtgtgccggccccttggctggacctgcgttaacgttcgatgattgctgttgccgccagggccgtgggtggggcgcccagtgcagaccatgtccaccacgcggcgccgggtcacactgtcctacaagccagtccgagtctaacagcttctgggatacttcccctctgctattaggaaagcctcccagagatgaggacagcagtgaggaggattcagatgagtgcagatgcgtgtccggccgctgtgtgcctagacccggcggagccgtgtgcgagtgcccagggggatttcaattagatgcctctcgggcacgttgcgtggacatagacgaatgcagagagctcaaccagcggggactattatgtaaatccgagagatgcgtaaacactagcggtagcttcagatgcgtatgtaaggcagggtttgcaaggagtagaccacatggcgcctgcgtcccccagcggcgaaggtag

SEQ ID NO: 207352 - DNA, 3771 bp, Artificial Sequence
  derived and/or modified sequence
atgcccggccccagaggcgccgccggcggcctggcccccgagatgagaggcgccggcgccgccggcctgctggccctgctgctgctgctgctgctgctgctgctgggcctgggcggcagagtggagggcggccccgccggcgagagaggcgccggcggcggcggcgccctggccagagagagattcaaggtggtgttcgcccccgtgatctgcaagagaacctgcctgaagggccagtgcagagacagctgccagcagggcagcaacatgaccctgatcggcgagaacggccacagcaccgacaccctgaccggcagcggcttcagagtggtggtgtgccccctgccctgcatgaacggcggccagtgcagcagcagaaaccagtgcctgtgcccccccgacttcaccggcagattctgccaggtgcccgccggcggcgccggcggcggcaccggcggcagcggccccggcctgagcagaaccggcgccctgagcaccggcgccctgccccccctggcccccgagggcgacagcgtggccagcaagcacgccatctacgccgtgcaggtgatcgccgacccccccggccccggcgagggcccccccgcccagcacgccgccttcctggtgcccctgggccccggccagatcagcgccgaggtgcaggcccccccccccgtggtgaacgtgagagtgcaccacccccccgaggccagcgtgcaggtgcacagaatcgagagcagcaacgccgagagcgccgcccccagccagcacctgctgccccaccccaagcccagccaccccagaccccccacccagaagcccctgggcagatgcttccaggacaccctgcccaagcagccctgcggcagcaaccccctgcccggcctgaccaagcaggaggactgctgcggcagcatcggcaccgcctggggccagagcaagtgccacaagtgcccccagctgcagtacaccggcgtgcagaagcccggccccgtgagaggcgaggtgggcgccgactgcccccagggctacaagagactgaacagcacccactgccaggacatcaacgagtgcgccatgcccggcgtgtgcagacacggcgactgcctgaacaaccccggcagctacagatgcgtgtgcccccccggccacagcctgggccccagcagaacccagtgcatcgccgacaagcccgaggagaagagcctgtgcttcagactggtgagccccgagcaccagtgccagcaccccctgaccaccagactgaccagacagctgtgctgctgcagcgtgggcaaggcctggggcgccagatgccagagatgccccaccgacggcaccgccgccttcaaggagatctgccccgccggcaagggctaccacatcctgaccagccaccagaccctgaccatccagggcgagagcgacttcagcctgttcctgcaccccgacggcccccccaagccccagcagctgcccgagagccccagccaggcccccccccccgaggacaccgaggaggagagaggcgtgaccaccgacagccccgtgagcgaggagagaagcgtgcagcagagccaccccaccgccaccaccacccccgccagaccctaccccgagctgatcagcagacccagcccccccaccatgagatggttcctgcccgacctgccccccagcagaagcgccgtggagatcgcccccacccaggtgaccgagaccgacgagtgcagactgaaccagaacatctgcggccacggcgagtgcgtgcccggcccccccgactacagctgccactgcaaccccggctacagaagccacccccagcacagatactgcgtggacgtgaacgagtgcgaggccgagccctgcggccccggcagaggcatctgcatgaacaccggcggcagctacaactgccactgcaacagaggctacagactgcacgtgggcgccggcggcagaagctgcgtggacctgaacgagtgcgccaagccccacctgtgcggcgacggcggcttctgcatcaacttccccggccactacaagtgcaactgctaccccggctacagactgaaggccagcagaccccccgtgtgcgaggacatcgacgagtgcagagaccccagcagctgccccgacggcaagtgcgagaacaagcccggcagcttcaagtgcatcgcctgccagcccggctacagaagccagggcggcggcgcctgcagagacgtgaacgagtgcgccgagggcagcccctgcagccccggctggtgcgagaacctgcccggcagcttcagatgcacctgcgcccagggctacgcccccgcccccgacggcagaagctgcctggacgtggacgagtgcgaggccggcgacgtgtgcgacaacggcatctgcagcaacacccccggcagcttccagtgccagtgcctgagcggctaccacctgagcagagacagaagccactgcgaggacatcgacgagtgcgacttccccgccgcctgcatcggcggcgactgcatcaacaccaacggcagctacagatgcctgtgcccccagggccacagactggtgggcggcagaaagtgccaggacatcgacgagtgcagccaggaccccagcctgtgcctgccccacggcgcctgcaagaacctgcagggcagctacgtgtgcgtgtgcgacgagggcttcacccccacccaggaccagcacggctgcgaggaggtggagcagccccaccacaagaaggagtgctacctgaacttcgacgacaccgtgttctgcgacagcgtgctggccaccaacgtgacccagcaggagtgctgctgcagcctgggcgccggctggggcgaccactgcgagatctacccctgccccgtgtacagcagcgccgagttccacagcctgtgccccgacggcaagggctacacccaggacaacaacatcgtgaactacggcatccccgcccacagagacatcgacgagtgcatgctgttcggcagcgagatctgcaaggagggcaagtgcgtgaacacccagcccggctacgagtgctactgcaagcagggcttctactacgacggcaacctgctggagtgcgtggacgtggacgagtgcctggacgagagcaactgcagaaacggcgtgtgcgagaacaccagaggcggctacagatgcgcctgcaccccccccgccgagtacagccccgcccagagacagtgcctgagccccgaggagatggagagagcccccgagagaagagacgtgtgctggagccagagaggcgaggacggcatgtgcgccggccccctggccggccccgccctgaccttcgacgactgctgctgcagacagggcagaggctggggcgcccagtgcagaccctgcccccccagaggcgccggcagccactgccccaccagccagagcgagagcaacagcttctgggacaccagccccctgctgctgggcaagccccccagagacgaggacagcagcgaggaggacagcgacgagtgcagatgcgtgagcggcagatgcgtgcccagacccggcggcgccgtgtgcgagtgccccggcggcttccagctggacgccagcagagccagatgcgtggacatcgacgagtgcagagagctgaaccagagaggcctgctgtgcaagagcgagagatgcgtgaacaccagcggcagcttcagatgcgtgtgcaaggccggcttcgccagaagcagaccccacggcgcctgcgtgccccagagaagaagatag

SEQ ID NO: 207353 - protein, 314 aa, Artificial Sequence
  derived and/or modified sequence
MGPLINRCKKILLPTTVPPATMRIWLLGGLLPFLLLLSGLQRPTEGSEVAIKIDFDFAPGSFDDQYQGCSKQVMEKLTQGDYFTKDIEAQKNYFRMWQKAHLAWLNQGKVLPQNMTTTHAVAILFYTLNSNVHSDFTRAMASVARTPQQYERSFHFKYLHYYLTSAIQLLRKDSIMENGTLCYEVHYRTKDVHFNAYTGATIRFGQFLSTSLLKEEAQEFGNQTLFTIFTCLGAPVQYFSLKKEVLIPPYELFKVINMSYHPRGDWLQLRSTGNLSTYNCQLLKASSKKCIPDPIAIASLSFLTSVIIFSKSRV

SEQ ID NO: 207354 - protein, 58 aa, Artificial Sequence
  derived and/or modified sequence
MGPLINRCKKILLPTTVPPATMRIWLLGGLLPFLLLLSGLQRPTEGSELPARNASLIL

SEQ ID NO: 207355 - DNA, 177 bp, Artificial Sequence
  derived and/or modified sequence
atgggccccttgataaaccggtgcaaaaaaatccttctaccaacgaccgtcccaccagctaccatgagaatatggcttctcggcggccttcttccattcctacttctgctttccggcctccagcgtcctactgagggtagcgaattgcctgcccgcaacgcaagcctgatcctgtag

SEQ ID NO: 207356 - DNA, 945 bp, Artificial Sequence
  derived and/or modified sequence
atgggcccacttatcaaccgatgtaaaaaaattctgctaccaaccaccgtgcctcccgctactatgcgcatttggcttttgggagggctgctcccattcctgttgttgctaagcggacttcaacggcccacggagggctccgaggttgctattaagatcgacttcgatttcgccccaggatcgttcgacgatcagtaccagggctgctcaaaacaggtgatggaaaaactgactcagggagattacttcaccaaagatattgaggcccagaaaaactattttcggatgtggcagaaggcgcacctcgcttggctgaaccagggtaaagtgcttccccagaatatgacaaccacgcatgccgtagccatcctcttctataccctgaattcaaatgtgcactcggattttactagggcgatggcgagtgtggccaggactccccagcagtatgaacgatccttccatttcaagtacctgcattactaccttacctctgccatccagctgttgcggaaagacagtattatggaaaatggaactttatgttatgaagttcattaccgcacaaaagacgtccattttaacgcttacaccggagctacgatccggttcggacagtttctctccacttctctgcttaaagaggaggcacaagagttcggtaatcaaacactgtttacaatatttacttgtctgggagcccccgtgcaatacttcagcctgaagaaggaagtgttgattcccccatacgaactgttcaaagtcatcaatatgtcctatcacccacgcggggactggctccagctgaggagtaccggaaatctctccacatacaattgccagctgcttaaagcttcaagcaaaaagtgcatccccgatcccattgccatcgcaagtctctcattcttgacgtcagtaattatcttttcaaaaagtcgcgtttag

SEQ ID NO: 207357 - DNA, 5129 bp, Artificial Sequence
  derived and/or modified sequence
gctttttcctgtttggctgggaaagggaaggctgaactgctgagtctgacacttaacaggacttcggcattcccctgaatacagactagatcagagattttatttttttaattgaaaagtaacttgggttctctttagaaacccttatttggtgtgcgcatctggctatttcacagagatttcagttttgcaaagaagtcggagttgatttcttccctcagacaagctattggttgttggtgggcaacagaagttgctcagcatagacaggggaaaaaacggttacggatgagactgaaagaaaacctcaaaggagaactctgagaattcatctcaggatgaagctgcaagggcaaaggagaagtacttgtgacacaagcaaatgggtccattgatcaacagatgcaagaagattcttctcccaactactgtacctcctgcaacgatgagaatctggctccttggaggcctgctgccattcctgctgctcctctctggcctgcagagacccacagagggttctgaggttgcaattaaaatcgacttcgacttcgcaccaggttcttttgatgatcagtaccaaggctgtagcaaacaggttatggagaaactaactcaaggggattatttcacaaaagacatagaagcccagaagaattattttaggatgtggcaaaaagcccacttagcctggcttaaccaaggaaaagttctaccccagaacatgactaccacacacgctgtggctattttgttttatacattgaacagcaatgttcattctgactttactagagccatggcctctgttgccaggactccacagcagtatgaacgttcattccacttcaaatatttacactactacctcacctcagcaatccagctgctgaggaaagacagcatcatggagaatggcactctgtgctatgaggtgcattataggacgaaggatgtccactttaatgcctacacaggggccaccattcgatttggccaattcctctccacatccctcctgaaagaagaggcacaggagtttgggaaccagacactatttaccatattcacctgcctgggtgcacctgtacagtacttctccctcaagaaggaagtcttgatccctccctatgagctgtttaaagttataaatatgagctaccacccaagaggagactggttgcagttgaggtcaactgggaacctgagcacatataactgtcagctgctaaaagcttccagcaagaaatgcatccctgatcctatagctattgcatctctctcctttttgaccagtgtcatcatcttttccaaaagcagagtataaagaaatcttgtggctccttttatttaaaaaaaatatttaaataaaatcttttttattggccttttggctagaaatggacatttattttccaggaaggatgatcccatcatacttctgctgaaaccagtgcatggcctcctctttgctaattctcttatgcctttccttgtacccctttgccttatttcaatctgggcaccctaagtactcttggggaaatcactctgcccagctagcaactgatgcagagctggctcagcccactgactgtgattggcctgtaactcaggccttagccaatcagtatatttcttcttcatggacacaaagattcatgctggaatagaaaatgatccaatcagagcctgtgagatacaatcagggtacttttgtggaattgcaattggaaatagaatgggagcttcttttctgaatggatattaatgaaagcagggtaggagcttatagctgccagcaaagatcccgccaccaggagaggagaccccatctccttgagaaaggatctaacacaacaaaggaagagctgataagtgaaaagaaactgagacctgatgagaatgtataagcctctggatccaactttgcctaaagctgaatactacaagatttttcattacataaatcaataatttatgtttttgcttgcataatttgaattagattttctatgtcaagcatcaagcagttgaagttccaacgaatacaagcactcttccttattttttttaatttagttattctaaataggaacaaatcaaagaagattaaattagaaagcaaaggacaaattcttcaccaaacagaaaagctttgaaccccagagattaaccaaggtgtgaattttcttcagagattttttatgagcattcaagattaagctagtatggcctcagatgagaagacacatggaaacttgagaaataaaagggaaagttaatgaaagatgttagtgaaatttcattcaccagcagtaatgggtgttcatgcatgttcctaagacattacaaaagttaaaatttaaactcatatgttaattcatagagaacttgatggcaaatttaagtcttcatagcaaatttaaatattaggaaaacatgagggtatgtgtgaaggttaacagagagtatgagagaaaaaaacactgattacaaacaaatatcagcaatatagcgaggtctcattacatgtaaactagtacatgcaaagaagtataaattgttgaattgtatagctggaaatgtcctctaacgcttccctcaggtagtaatttaggtagcgacataagggattatttaacccgatcacgatcactgaagaccctggtatcaggctaaatggagtaaagatgagggctagctctataattttggattttgaaagtccatgctccttatcccttttaagatttggataagaaacagcaaaactgaaaatcggtccatctatttactctccataggacttcctgaatggcctgtgtcatgatcaaagaaatggaatggggaataagctacataaaattacctggcagggagttcaggcatctctgtactatcattctttaaattgggatttgaaactaacagggccaaatcacctctgtcacctagttgcagtagcctctacagtcaataaaggaaagaatttctgccaggcatggtggctcacccctgtaatcccagcactttgggaggccgaggaggacggatcacgaggtcaggagttcaagaccagcctggccagcatggtgaaaccccgtctctactacaaatacaaaaattagccaggcatggtggcacgcacctgtaatcccagctacttgggaggctgaggcaggaaaattgcctaaacccaggaggcggaggtagtgcagtgagccaagttcacaccactgcactccagcctgggcaacagagtgagactcgatctcaaaaaaagaaaaaaagaaagaatttctacaaacagacaatttatgtgacttgcataggatagggtctttggcagtttggtggctacctagtagagagtcctggggacatggctctgggagcaagcttttccagtgagcatcgatgagtcagtaatgacatgctatgttggtaaaagccacccaacatcttaagtacatttttcctgtgccatataaatgcatgtattgagccatactgtgtacaaagcactttggggattaaaagttaagaacactaggccagatctctcatgagtttacaatctcttaggagaaattaagaacataaagcaagccacaagtgaaatgccaaaaaaaaaaaaggcaaaaatcaagttttctgttcataacaattcaaaagaaagatttcttccaactgaggcaagaagagacacccggaaggctttaagtaagaggctgcatttgaaccagccgttagggctctaggctgggagaaggggtgagcagaaggagaaaaaaacaagaaagagtatgtgccaagtgcgtagtgcccaaaacaaggccaaatattaaatgcttggagctgagagaaaaatgtgattcctctggcctatggttagataaagctttctatcagagatgatgttttacttagaggaaagcagaaaatagaagcgaatacggaatgatcgatgtatgtacagcataaggtcagggagcagataggtctggcagagagtgaggggtaatgtgggctggagaggaaattggaagccactcagtgaagctaaaaagtcagccaaaagcatttgatttccatgagaagtcataattttctgagtaagacaattctcctaaagcgttgactctctaggcacaagcagcaatagcatcctttaagaactcattagaaatgtgaattttagggcctgatcccagactacagactacagaaattgaacagtctgttttaataagtcctctagatgattctgctatacaccaacatttgagaacactgtgacttacacaattatgatccttaagggaatagccaagtttctaaaaaagataacttagttctaactcctgctgctgttttacagatcaaatctctggagacagaaactattctcttaaaattatgtagattcatgagtttggttaaggataaatgtacatagctcacatcccctcagtctctccctatagtccaaagttgttgagcaaggaatctgtagagtattgatttaaattgattaagttacatgtttatgaaactctaagagactagttttagaaatttcactgtaatttctgctgggataaatttgttagcctgggatatcttccaaagataaggcggatgctcaaatatgtgtaaattcatgcaactgttaacagagactgtgctgtaaggagtacttatgtcctatagtaattttattaaacaaatacatgtatgtctccttttgatgtgtacagaaatatactgtttaatctgaagaagctgattgaaacaggaaaaatttaaaaagtaaaaacactcaacccatgtaatactttatttttataacaaggtgttctctttaatacgcctattagattatcctgaagttctctatttactcttactttaaaaaaaatccaatgaaagaaaatttcagtaaagtttgttttgctagaagaatcaggattcttgtactgagttgtctaataatatgaatcaaattgatttacactgaatgaactagctcttgatttggtaaaattcaacaagcatttattaggtgctttcagaaataccaagatgcagcaaacactggcaactaataaaaaaaattacaagta

SEQ ID NO: 207358 - DNA, 393 bp, Artificial Sequence
  derived and/or modified sequence
tacggatgagactgaaagaaaacctcaaaggagaactctgagaattcatctcaggatgaagctgcaagggcaaaggagaagtacttgtgacacaagcaaatgggtccattgatcaacagatgcaagaagattcttctcccaactactgtacctcctgcaacgatgagaatctggctccttggaggcctgctgccattcctgctgctcctctctggcctgcagagacccacagagggttctgagcttccagcaagaaatgcatccctgatcctatagctattgcatctctctcctttttgaccagtgtcatcatcttttccaaaagcagagtataaagaaatcttgtggctccttttatttaaaaaaaatatttaaataaaatcttttttattg

SEQ ID NO: 207359 - DNA, 177 bp, Artificial Sequence
  derived and/or modified sequence
atgggccccctcatcaaccgctgcaagaagatcctgctgcccaccaccgtgcccccagccaccatgaggatctggctgctgggcggcctgctgcccttcctgctgctgctgagcggcctgcagaggcccacagagggcagcgagctgcctgccagaaatgccagcctcatcctgtag

SEQ ID NO: 207360 - DNA, 945 bp, Artificial Sequence
  derived and/or modified sequence
atgggccccctcatcaaccgctgcaagaagatcctgctgcccaccaccgtgcccccagccaccatgaggatctggctgctgggcggcctgctgcccttcctgctgctgctgagcggcctgcagaggcccacagagggcagcgaggtggccatcaagattgactttgattttgcccctggcagctttgatgaccagtaccagggctgcagcaagcaggtgatggagaagctgacccagggcgactacttcaccaaggacatcgaggcccagaagaactacttcaggatgtggcagaaggcccacctggcctggctgaaccagggcaaggtgctgccccagaacatgaccaccacccatgctgtggccatcctcttctacaccctgaacagcaatgtgcacagcgacttcacccgggccatggcctctgtggcccggaccccccagcagtatgaaagaagcttccacttcaagtacctgcactactacctgaccagcgccatccagctgctgaggaaggacagcatcatggagaatggcaccctgtgctatgaggtgcactaccgcaccaaggatgtgcacttcaatgcctacaccggggccaccatccgcttcggccagttcctgagcaccagcctgctgaaggaggaggcccaggagtttggaaaccagaccctcttcaccatcttcacctgcctgggcgcccctgtgcagtacttcagcctgaagaaggaggtgctgatccccccctatgagctgttcaaggtgatcaacatgagctaccaccccaggggggactggctgcagctgcggagcacaggcaacctgagcacctacaactgccagctgctgaaggccagcagcaagaagtgcatcccagaccccatcgccatcgccagcctgtccttcctgaccagcgtcatcatcttcagcaagagccgggtgtag

SEQ ID NO: 207361 - DNA, 177 bp, Artificial Sequence
  derived and/or modified sequence
atgggccccctgatcaaccggtgcaagaagatcctgctgcccaccaccgtaccccccgccaccatgagaatatggttattgggcggcctgctgccctttctgctgctgttgtcagggcttcagcgcccaactgaaggtagtgagctgccagcccgtaacgcctcactcattctttag

SEQ ID NO: 207362 - DNA, 945 bp, Artificial Sequence
  derived and/or modified sequence
atgggccccctgatcaaccggtgcaagaagatcctgctgcccaccacagttccacctgcaacaatgcggatttggctgctgggaggcttgctgccttttctgcttttgctgagcggccttcagcgcccaacagaagggtcagaggtcgccattaaaatcgacttcgactttgctccagggtcctttgacgatcaataccagggctgttcgaaacaggttatggagaagctgacacaaggagactatttcacaaaagatatcgaggcccagaaaaactactttcgcatgtggcagaaggctcatcttgcctggctgaatcagggcaaagtcttgccacagaatatgaccaccacccatgccgtagcgatcttattttatacattaaatagcaatgtacactcagacttcacacgggctatggcttctgtcgccaggacgccacagcagtatgaacgcagcttccacttcaaatatttacattattatctgacttcagccatccagttgctgcggaaagactccattatggaaaatggaacattgtgttacgaagtgcactacaggaccaaggacgttcacttcaacgcttatacgggtgccacaatccgctttggacagtttctgtccactagcctgctcaaagaggaggcacaggaattcgggaaccagacactctttaccatattcacgtgcctcggtgccccagtgcagtatttcagcctgaaaaaggaagtactgatccccccttatgaacttttcaaggttatcaacatgagctatcacccccgaggcgactggctgcagctccgatcaaccggtaatctgtccacttacaactgtcagcttctaaaagcaagtagcaaaaaatgcatcccagacccaatcgcaattgcaagcctttcatttctcacatccgtgattatatttagcaaatcacgagtctag

SEQ ID NO: 207363 - DNA, 177 bp, Artificial Sequence
  derived and/or modified sequence
atggggccattaattaatcgctgcaagaagatcctgcttcctacaacggtgcctccagcaaccatgcgtatctggctattgggtgggctgctgccctttctgctgcttctgagtggcctccagaggcctacagagggtagcgaactgccagctaggaacgcctccctgattctgtag

SEQ ID NO: 207364 - DNA, 945 bp, Artificial Sequence
  derived and/or modified sequence
atgggcccactcatcaaccggtgtaaaaagatcctcctgcccaccaccgtgccacctgctactatgcgaatttggctcctcggaggactgctgccttttctcctgctgctttccggcctgcagagacctactgaagggtctgaagtagccataaaaatcgacttcgacttcgccccaggctctttcgacgaccagtatcagggctgcagcaagcaggtcatggagaagctgacgcaaggcgactatttcactaaggatattgaagcccagaagaattactttaggatgtggcagaaggcccacttggcatggctcaatcaggggaaggtcctgcctcagaatatgacaacaacgcatgccgttgcaatcttgttttatacactgaactccaatgtgcacagtgactttacccgggctatggctagtgtcgcccgaaccccacagcaatacgagcgaagttttcactttaaataccttcattactatctgacttctgctattcagttacttcgcaaagactcaatcatggaaaacggaacactctgttatgaggtgcactaccggactaaggacgttcacttcaatgcttacacaggtgccacaataagattcggccaattcctgagtacatccttactgaaagaagaggcacaggagtttggcaatcagacgctcttcaccatctttacctgtctcggggcacccgtccagtactttagcttaaagaaagaggtactcatcccaccctacgagctatttaaggtaattaacatgagctaccaccctcgcggtgattggctacaactgagatctaccggaaatctgagcacctacaattgccagctgctgaaggcgtcttcaaagaagtgtattccggaccctattgccatcgcttctctatccttcttaaccagcgtcatcatcttctctaagtctcgcgtttag

SEQ ID NO: 207365 - DNA, 177 bp, Artificial Sequence
  derived and/or modified sequence
atgggccccctgatcaacagatgcaagaagatcctgctgcccaccaccgtgccccccgccaccatgagaatctggctgctgggcggcctgctgcccttcctgctgctgctgagcggcctgcagagacccaccgagggcagcgagctgcccgccagaaacgccagcctgatcctgtag

SEQ ID NO: 207366 - DNA, 945 bp, Artificial Sequence
  derived and/or modified sequence
atgggccccctgatcaacagatgcaagaagatcctgctgcccaccaccgtgccccccgccaccatgagaatctggctgctgggcggcctgctgcccttcctgctgctgctgagcggcctgcagagacccaccgagggcagcgaggtggccatcaagatcgacttcgacttcgcccccggcagcttcgacgaccagtaccagggctgcagcaagcaggtgatggagaagctgacccagggcgactacttcaccaaggacatcgaggcccagaagaactacttcagaatgtggcagaaggcccacctggcctggctgaaccagggcaaggtgctgccccagaacatgaccaccacccacgccgtggccatcctgttctacaccctgaacagcaacgtgcacagcgacttcaccagagccatggccagcgtggccagaaccccccagcagtacgagagaagcttccacttcaagtacctgcactactacctgaccagcgccatccagctgctgagaaaggacagcatcatggagaacggcaccctgtgctacgaggtgcactacagaaccaaggacgtgcacttcaacgcctacaccggcgccaccatcagattcggccagttcctgagcaccagcctgctgaaggaggaggcccaggagttcggcaaccagaccctgttcaccatcttcacctgcctgggcgcccccgtgcagtacttcagcctgaagaaggaggtgctgatccccccctacgagctgttcaaggtgatcaacatgagctaccaccccagaggcgactggctgcagctgagaagcaccggcaacctgagcacctacaactgccagctgctgaaggccagcagcaagaagtgcatccccgaccccatcgccatcgccagcctgagcttcctgaccagcgtgatcatcttcagcaagagcagagtgtag

SEQ ID NO: 207367 - protein, 890 aa, Artificial Sequence
  derived and/or modified sequence
MEGGGKPNSSSNSRDDGNSVFPAKASATGAGPAAAEKRLGTPPGGGGAGAKEHGNSVCFKVDGGGGGGGGGGGGEEPAGGFEDAEGPRRQYGFMQRQFTSMLQPGVNKFSLRMFGSQKAVEKEQERVKTAGFWIIHPYSDFRFYWDLIMLIMMVGNLVIIPVGITFFTEQTTTPWIIFNVASDTVFLLDLIMNFRTGTVNEDSSEIILDPKVIKMNYLKSWFVVDFISSIPVDYIFLIVEKGMDSEVYKTARALRIVRFTKILSLLRLLRLSRLIRYIHQWEEIFHMTYDLASAVVRIFNLIGMMLLLCHWDGCLQFLVPLLQDFPPDCWVSLNEMVNDSWGKQYSYALFKAMSHMLCIGYGAQAPVSMSDLWITMLSMIVGATCYAMFVGHATALIQSLDSSRRQYQEKYKQVEQYMSFHKLPADMRQKIHDYYEHRYQGKIFDEENILNELNDPLREEIVNFNCRKLVATMPLFANADPNFVTAMLSKLRFEVFQPGDYIIREGAVGKKMYFIQHGVAGVITKSSKEMKLTDGSYFGEICLLTKGRRTASVRADTYCRLYSLSVDNFNEVLEEYPMMRRAFETVAIDRLDRIGKKNSILLQKFQKDLNTGVFNNQENEILKQIVKHDREMVQAIAPINYPQMTTLNSTSSTTTPTSRMRTQSPPVYTATSLSHSNLHSPSPSTQTPQPSAILSPCSYTTAVCSPPVQSPLAARTFHYASPTASQLSLMQQQPQQQVQQSQPPQTQPQQPSPQPQTPGSSTPKNEVHKSTQALHNTNLTREVRPLSASQPSLPHEVSTLISRPHPTVGESLASIPQPVTAVPGTGLQAGGRSTVPQRVTLFRQMSSGAIPPNRGVPPAPPPPAAALPRESSSVLNTDPDAEKPRFASNL

SEQ ID NO: 207368 - DNA, 2673 bp, Artificial Sequence
  derived and/or modified sequence
atggagggcggcggcaagcccaacagcagcagcaacagcagagacgacggcaacagcgtgttccccgccaaggccagcgccaccggcgccggccccgccgccgccgagaagagactgggcaccccccccggcggcggcggcgccggcgccaaggagcacggcaacagcgtgtgcttcaaggtggacggcggcggcggcggcggcggcggcggcggcggcggcgaggagcccgccggcggcttcgaggacgccgagggccccagaagacagtacggcttcatgcagagacagttcaccagcatgctgcagcccggcgtgaacaagttcagcctgagaatgttcggcagccagaaggccgtggagaaggagcaggagagagtgaagaccgccggcttctggatcatccacccctacagcgacttcagattctactgggacctgatcatgctgatcatgatggtgggcaacctggtgatcatccccgtgggcatcaccttcttcaccgagcagaccaccaccccctggatcatcttcaacgtggccagcgacaccgtgttcctgctggacctgatcatgaacttcagaaccggcaccgtgaacgaggacagcagcgagatcatcctggaccccaaggtgatcaagatgaactacctgaagagctggttcgtggtggacttcatcagcagcatccccgtggactacatcttcctgatcgtggagaagggcatggacagcgaggtgtacaagaccgccagagccctgagaatcgtgagattcaccaagatcctgagcctgctgagactgctgagactgagcagactgatcagatacatccaccagtgggaggagatcttccacatgacctacgacctggccagcgccgtggtgagaatcttcaacctgatcggcatgatgctgctgctgtgccactgggacggctgcctgcagttcctggtgcccctgctgcaggacttcccccccgactgctgggtgagcctgaacgagatggtgaacgacagctggggcaagcagtacagctacgccctgttcaaggccatgagccacatgctgtgcatcggctacggcgcccaggcccccgtgagcatgagcgacctgtggatcaccatgctgagcatgatcgtgggcgccacctgctacgccatgttcgtgggccacgccaccgccctgatccagagcctggacagcagcagaagacagtaccaggagaagtacaagcaggtggagcagtacatgagcttccacaagctgcccgccgacatgagacagaagatccacgactactacgagcacagataccagggcaagatcttcgacgaggagaacatcctgaacgagctgaacgaccccctgagagaggagatcgtgaacttcaactgcagaaagctggtggccaccatgcccctgttcgccaacgccgaccccaacttcgtgaccgccatgctgagcaagctgagattcgaggtgttccagcccggcgactacatcatcagagagggcgccgtgggcaagaagatgtacttcatccagcacggcgtggccggcgtgatcaccaagagcagcaaggagatgaagctgaccgacggcagctacttcggcgagatctgcctgctgaccaagggcagaagaaccgccagcgtgagagccgacacctactgcagactgtacagcctgagcgtggacaacttcaacgaggtgctggaggagtaccccatgatgagaagagccttcgagaccgtggccatcgacagactggacagaatcggcaagaagaacagcatcctgctgcagaagttccagaaggacctgaacaccggcgtgttcaacaaccaggagaacgagatcctgaagcagatcgtgaagcacgacagagagatggtgcaggccatcgcccccatcaactacccccagatgaccaccctgaacagcaccagcagcaccaccacccccaccagcagaatgagaacccagagcccccccgtgtacaccgccaccagcctgagccacagcaacctgcacagccccagccccagcacccagaccccccagcccagcgccatcctgagcccctgcagctacaccaccgccgtgtgcagcccccccgtgcagagccccctggccgccagaaccttccactacgccagccccaccgccagccagctgagcctgatgcagcagcagccccagcagcaggtgcagcagagccagcccccccagacccagccccagcagcccagcccccagccccagacccccggcagcagcacccccaagaacgaggtgcacaagagcacccaggccctgcacaacaccaacctgaccagagaggtgagacccctgagcgccagccagcccagcctgccccacgaggtgagcaccctgatcagcagaccccaccccaccgtgggcgagagcctggccagcatcccccagcccgtgaccgccgtgcccggcaccggcctgcaggccggcggcagaagcaccgtgccccagagagtgaccctgttcagacagatgagcagcggcgccatcccccccaacagaggcgtgccccccgccccccccccccccgccgccgccctgcccagagagagcagcagcgtgctgaacaccgaccccgacgccgagaagcccagattcgccagcaacctgtag

SEQ ID NO: 207369 - DNA, 2673 bp, Artificial Sequence
  derived and/or modified sequence
atggagggcggcggaaagcctaattcctcttcgaatagcagggacgatggtaactccgtgttccctgccaaagcatccgcgaccggggccggacctgctgccgcggaaaaacgccttggcactcctccagggggaggaggcgcaggagctaaggagcacggcaactctgtatgctttaaagtggacggtggagggggcggggggggaggcgggggaggtggcgaagagcctgcaggaggttttgaggacgccgagggccctagaagacagtatggattcatgcagcgccagttcacatctatgcttcaaccaggcgtgaataagttctctctgaggatgttcggttctcagaaagctgttgaaaaggagcaagagagagtgaagacagcaggattctggattatccacccctattcagattttagattttactgggatctcatcatgctgatcatgatggtggggaatctggtaattattcctgtgggcatcacattcttcacagaacaaactacaaccccctggatcatttttaacgtggcctcggacacagtcttcctgctggacctgattatgaatttccgcactggcacagtcaatgaggactccagcgagatcatcttagaccctaaagtgataaagatgaattatttgaagtcatggtttgtggtggattttattagctctattcccgtggactatatctttctcatcgtagaaaaggggatggattcggaggtgtacaaaaccgcccgcgcactcaggatcgttcggtttactaagattttaagcctgctgcggcttctgcgtctgagccgactgatccgctacattcaccagtgggaagaaatcttccacatgacgtacgatctggcgtctgcagttgtgaggatctttaacctcattgggatgatgcttctcctctgtcattgggatggttgcctgcagtttctggtgccgctcttgcaggatttcccgcccgactgctgggttagcttaaacgagatggtgaatgactcttgggggaaacagtacagctacgcattattcaaggcgatgtcacacatgctgtgtattggctacggggcccaagcccctgtttctatgagcgatttatggattaccatgctgagcatgatagtgggagcaacgtgctacgcgatgtttgtggggcacgccactgccctcatccagagtctggatagctctcgaaggcagtatcaggagaaatacaaacaagtggagcagtatatgagttttcacaagttacccgccgatatgaggcagaagattcacgactattacgagcatcggtatcagggaaagattttcgacgaggaaaatatcctgaacgaactcaatgatcctcttcgcgaagaaatcgtgaactttaactgcagaaaattggtggccactatgccactcttcgcaaacgccgatccgaatttcgtgacagctatgctctccaaattacgctttgaggtttttcaaccaggcgactatattatccgcgagggggccgtcggtaagaaaatgtatttcattcagcacggggtagcgggtgtgatcacaaagtccagcaaagagatgaaactgaccgacggtagctatttcggggagatctgtctgttgactaagggaagacggacagccagcgtgagagcggacacctattgcagactctatagccttagcgtcgacaatttcaacgaggttttagaagaataccctatgatgagacgggcgttcgagactgttgcgatcgaccgtctcgacaggatcggaaagaaaaactccatccttcttcagaaattccagaaagatttaaatacgggggtgttcaacaaccaggaaaatgaaattctgaaacaaattgtcaaacacgatagagaaatggtgcaggccatcgccccaattaactatccccagatgacaaccctgaacagtactagttcaacaacaacgcctacgtcccggatgaggactcagtccccaccagtctatacagctacatccctgtctcatagcaacctgcactcacccagcccatccacccagaccccccagccatccgccattttaagcccttgttcctatacgacggctgtgtgcagcccacccgttcagtcccccctggccgcccgcactttccattacgcctcgcccactgcatcccagctttcactgatgcagcaacagccacagcagcaggtgcagcagtcacagccaccccaaacccagccacagcagcccagtccacagccccaaaccccgggctcaagcacacctaagaatgaggtccacaaaagcacccaggctctgcataataccaaccttacaagagaagtgcgtccattgagtgcatctcaacctagtctcccacatgaggtaagcaccctcattagcagacctcatcctacagtcggggaatcactcgcttccattccccagccagtgactgctgtgccaggaacagggctgcaagccggaggtcgaagtactgtaccccagcgggttactctgttccgtcaaatgtcatccggagccatcccaccgaacaggggggtcccaccagccccacccccacctgccgcagctctgcctcgagagagctcctctgttctgaatacagatccagacgcagagaagcccagatttgccagcaatctgtag

SEQ ID NO: 207370 - DNA, 5405 bp, Artificial Sequence
  derived and/or modified sequence
ggcgccgggcggccggcgagtctggagcccgcgccgtcgccggccgcgtcctccgggcatggaaggaggcggcaagcccaactcttcgtctaacagccgggacgatggcaacagcgtcttccccgccaaggcgtccgcgacgggcgcggggccggccgcggccgagaagcgcctgggcaccccgccggggggcggcggggccggcgcgaaggagcacggcaactccgtgtgcttcaaggtggacggcggtggcggcggtggcggcggcggcggcggcggcgaggagccggcggggggcttcgaagacgccgaggggccccggcggcagtacggcttcatgcagaggcagttcacctccatgctgcagcccggggtcaacaaattctccctccgcatgtttgggagccagaaggcggtggaaaaggagcaggaaagggttaaaactgcaggcttctggattatccacccttacagtgatttcaggttttactgggatttaataatgcttataatgatggttggaaatctagtcatcataccagttggaatcacattctttacagagcaaacaacaacaccatggattattttcaatgtggcatcagatacagttttcctattggacctgatcatgaattttaggactgggactgtcaatgaagacagttctgaaatcatcctggaccccaaagtgatcaagatgaattatttaaaaagctggtttgtggttgacttcatctcatccatcccagtggattatatctttcttattgtagaaaaaggaatggattctgaagtttacaagacagccagggcacttcgcattgtgaggtttacaaaaattctcagtctcttgcgtttattacgactttcaaggttaattagatacatacatcaatgggaagagatattccacatgacatatgatctcgccagtgcagtggtgagaatttttaatctcatcggcatgatgctgctcctgtgccactgggatggttgtcttcagttcttagtaccactactgcaggacttcccaccagattgctgggtgtctttaaatgaaatggttaatgattcttggggaaagcagtattcatacgcactcttcaaagctatgagtcacatgctgtgcattgggtatggagcccaagccccagtcagcatgtctgacctctggattaccatgctgagcatgatcgtcggggccacctgctatgccatgtttgtcggccatgccaccgctttaatccagtctctggattcttcgaggcggcagtatcaagagaagtataagcaagtggaacaatacatgtcattccataagttaccagctgatatgcgtcagaagatacatgattactatgaacacagataccaaggcaaaatctttgatgaggaaaatattctcaatgaactcaatgatcctctgagagaggagatagtcaacttcaactgtcggaaactggtggctacaatgcctttatttgctaatgcggatcctaattttgtgactgccatgctgagcaagttgagatttgaggtgtttcaacctggagattatatcatacgagaaggagccgtgggtaaaaaaatgtatttcattcaacacggtgttgctggtgtcattacaaaatccagtaaagaaatgaagctgacagatggctcttactttggagagatttgcctgctgaccaaaggacgtcgtactgccagtgttcgagctgatacatattgtcgtctttactcactttccgtggacaatttcaacgaggtcctggaggaatatccaatgatgaggagagcctttgagacagttgccattgaccgactagatcgaataggaaagaaaaattcaattcttctgcaaaagttccagaaggatctgaacactggtgttttcaacaatcaggagaacgaaatcctcaagcagattgtgaaacatgacagggagatggtgcaggcaatcgctcccatcaattatcctcaaatgacaaccctgaattccacatcgtctactacgaccccgacctcccgcatgaggacacaatctccaccggtgtacacagcgaccagcctgtctcacagcaacctgcactcccccagtcccagcacacagaccccccagccatcagccatcctgtcaccctgctcctacaccaccgcggtctgcagccctcctgtacagagccctctggccgctcgaactttccactatgcctcccccaccgcctcccagctgtcactcatgcaacagcagccgcagcagcaggtacagcagtcccagccgccgcagactcagccacagcagccgtccccgcagccacagacacctggcagctccacgccgaaaaatgaagtgcacaagagcacgcaggcgcttcacaacaccaacctgacccgggaagtcaggccactctccgcctcgcagccctcgctgccccatgaggtgtccactctgatttccagacctcatcccactgtgggcgagtccctggcctccatccctcaacccgtgacggcggtccccggaacgggccttcaggcagggggcaggagcactgtcccgcagcgcgtcaccctcttccgacagatgtcgtcgggagccatccccccgaaccgaggagtccctccagcaccccctccaccagcagctgctcttccaagagaatcttcctcagtcttaaacacagacccagacgcagaaaagccacgatttgcttcaaatttatgatccctgctgattgtcaaagcagaaagaaatactctcataaactgagactatactcagatcttattttattctatctcctgatagatccctctagcctactatgaagagatattttagacagctgtggcctacacgtgaaatgtaaaaatatatatacatatactataaaatatatatctaaattcccaagagagggtcaaaagacctgtttagcattcagtgttatatgtcttcctttctttaaatcattaaaggatttaaaatgtcgttgtaagattatttatttctaacctacttttacttaagtcctttgatatgtatatttctctattttatgaagagttcttggattcaatggaaacaaaactgattttaaaaaggcaactcaaatgaactagtaaatagcaccaatcaaaactttctttcattagctgtgtctctgcatctaaattgttaatcattaatggtggagaattaaataacaaatcccattttatagatctaaattgtatttcggtgctttcaatttcaaattaggttaaagaatgcactacttgcttggccaccgtaggagactagcattgccactgtttgttaagaatatcactaacctcaaacatgttcattgatctttcagaaagctgagggaaaattaatatttgtcttcatgtgttatcggacttttaccaagactcgatcaatgttagttgtaaataactttttcaacccaaataaaaatagctattctgtgttgtatgaaggtaaaagtcattgtttaagaatttagttttattgcttcacttcaaaacttagagttttaaattttacaaaacctgattgtgagaattattcaattgtaatgcaatggcttgaaacctacaatattattttaacctgcaatgttttatgcaaaattgtatgctcgaatctacaaattgcttgtattacaccaaaaatcgttacttttctttcttcttgccataatcaagcatctgaaaatagtccctgcatgcttctggggaaaaaaaaataggttcaaatcagtcattgtagagaaaggcttacagtatttctcgtttctagaaaagcataacaattcattaattgcctatcttataattcctataaggctgacttggatctctgacttaagtctagaagtgaggttttcacttttatttaatattattgctattattatttaaataattatttgtaaaccacagcttgatttggagttaagtgttgtctgtgtcttcactgtagctggtaatttactatggtattaatttaaagaaataaattcaatacagcatcacgtctgtttgggaacacacattttgctctatgtatattgtaactaaatggttagtaaactttaaggcatgtggtgactaacgtagcccttagataggaggtttgtcatttttaatgtgttgaaaatagtacagacatggtgacagaaagcaggggtaaagttgaacgtctatgagcattgtctgtctgttttcttaactctttacatgatctgtgagcacctgcttcttctcaaagaactcccttagtaatcatttgtgcctaatgcatcccacacatgtggagtatgactggaacacaattgaaagattcctaacaactggctgcggtaaataacccaagttaagagcatgacttaaagtggaggtcttcagtatctctggcactggcaatacatttaagaacatacagagatcacacattatgtgggacagggcctgcagatagacttgaggacagaaaacaaaaacaaaagcagaaactctaaagtggatccttgctgcctgttatgccttttgtggatataatacctataataccaaaatgagttgttatgtttaatttcaaacaaatcccaactggtgtggaagtaattaactgctagtcgatgtaatgtaatcatcaatatgctggtgacatatgatggcatgtcaggaatactgttgtaagaaagggattgttcagtctacctagaacctatgggaaagctgcaagaccatttacatatcagtacaaaactcctttattttattaaaatatgagaattaacttcaatttattaagattacgtattggtcctttaaattattaaaggtttacatttgataggattaatggatttggtagtgaaatatttttatatatataaatttttggttttttattttgagcactattgggaaacataagcaaaattgaaatgcatggtctttcagtgcaaccatacaatttttattcactttgtaatagaatggacaaaaaaactaaggtttatatattaaactaataaaaaggtacagggtaaattatatacatatatgtatgaatgtatatatacttagattaagaaaaaaaaatgactcacattcctgtaatataaaggtccattgctagttgaaaagtgacctcttttctctgtacatagtgaagcccgtatgtatggagttttaatctgtacagaaagaaatgtattattcattggtctttctgctgctggaaagataatagaatagctgattcttacaacaactgtatgatcagggatgagttagagtatttcttttgtctttgctcaaagccatacatatataaatatatataaagattattaataaattcaacaaaaaataaactacaa

SEQ ID NO: 207371 - DNA, 2673 bp, Artificial Sequence
  derived and/or modified sequence
atggagggcggcggcaagcccaacagcagcagcaacagcagagatgatggcaacagcgtcttccctgccaaggccagcgccaccggggccggccctgctgctgctgagaagaggctgggcaccccacctgggggcggcggggccggggccaaggagcacggcaacagcgtgtgcttcaaggtggatggcggcggcggcggcggcggcggcggcggcggcggggaggagcctgctgggggctttgaagatgctgagggcccccggcggcagtatggcttcatgcagaggcagttcacctccatgctgcagcccggggtgaacaagttcagcctgaggatgtttggcagccagaaggctgtggagaaggagcaggagcgggtgaagacagctggcttctggatcatccacccctacagcgacttccgcttctactgggacctgatcatgctgatcatgatggtgggcaacctggtgatcatccctgtgggcatcaccttcttcacagagcagaccaccaccccctggatcatcttcaacgtggccagtgacaccgtcttcctgctggacctgatcatgaacttcagaacaggcaccgtgaatgaagacagcagcgagatcatcctggaccccaaggtgatcaagatgaactacctgaagtcctggtttgtggtggacttcatcagcagcatccctgtggactacatcttcctgattgtggagaagggcatggattctgaggtgtacaagacagcccgggccctgcgcatcgtgcgcttcaccaagatcctgagcctgctgcggctgctgcggctgagccgcctcatccgctacatccaccagtgggaggagatcttccacatgacctatgacctggccagcgctgtggtgcgcatcttcaacctgattggcatgatgctgctgctgtgccactgggatggctgcctgcagttcctggtgcccctgctgcaggacttccccccagactgctgggtgtccctgaatgagatggtgaatgacagctggggcaagcagtacagctatgccctcttcaaggccatgagccacatgctgtgcatcggctatggagcccaggcccctgtgtccatgtctgacctgtggatcaccatgctgtccatgattgtgggcgccacctgctacgccatgtttgtgggccacgccacagccctgatccagagcctggacagcagccggcggcagtaccaggagaagtacaagcaggtggagcagtacatgtccttccacaagctgcctgctgacatgaggcagaagatccatgactactatgagcaccgctaccagggcaagatctttgatgaggagaacatcctgaatgagctgaatgaccccctgcgggaggagatcgtgaacttcaactgcaggaagctggtggccaccatgcccctgtttgccaatgctgaccccaactttgtgacagccatgctgagcaagctgcgctttgaggtgttccagcccggggactacatcatccgggagggcgctgtgggcaagaagatgtacttcatccagcacggcgtggccggggtcatcaccaagagcagcaaggagatgaagctgacagatggcagctactttggagagatctgcctgctgaccaagggccgcaggacagcctctgtgcgggctgacacctactgccgcctgtacagcctgtctgtggacaacttcaatgaggtgctggaggagtaccccatgatgaggcgggcctttgaaacagtggccatcgaccggctggaccgcatcggcaagaagaacagcatcctgctgcagaagttccagaaggacctgaacacaggagtcttcaacaaccaggagaatgagatcctgaagcagatcgtgaagcatgaccgggagatggtgcaggccatcgcccccatcaactacccccagatgaccaccctgaacagcaccagcagcaccaccacccccaccagcaggatgaggacccagagcccccctgtgtacacagccaccagcctgagccacagcaacctgcacagccccagccccagcacccagaccccccagcccagcgccatcctgagcccctgcagctacaccacagctgtgtgcagcccccctgtgcagagccccctggccgcccggaccttccactacgccagccccacagccagccagctgagcctgatgcagcagcagccccagcagcaggtgcagcagagccagcccccccagacccagccccagcagcccagcccccagccccagaccccaggcagcagcacccccaagaatgaggtgcacaagagcacccaggccctgcacaacaccaacctgacccgggaggtgcggcccctgagcgccagccagcccagcctgccccatgaggtgtccaccctcatcagccggccccaccccaccgtgggggagagcctggccagcatcccccagcctgtgacagctgtgcccggcaccggcctgcaggccggcggccgcagcacagtgccccagagggtgaccctcttccggcagatgagcagcggggccatcccccccaacagaggagtgcccccagcccctcctcctcctgctgctgccctgccccgggagagcagctctgtgctgaacacagatcctgatgctgagaagcccaggtttgccagcaacctgtag

SEQ ID NO: 207372 - DNA, 2673 bp, Artificial Sequence
  derived and/or modified sequence
atggagggcggcggcaagcccaacagcagcagcaacagccgggacgatggaaattctgtgtttccagctaaagccagtgccaccggcgctgggcctgctgccgccgaaaaacgactgggcacaccaccgggaggcggcggagctggagctaaagaacatggaaattccgtttgctttaaggtcgacggcggcggaggcggaggcgggggaggagggggtggtgaggaacctgctggcggtttcgaagacgccgagggtcctagaaggcagtatgggtttatgcagcgccagtttaccagcatgctgcagcctggggtgaacaaattcagtctgaggatgtttgggtcacagaaggccgtcgaaaaagagcaggagagagtgaaaacagcaggcttctggattattcacccatattcggacttcagattctactgggacttgattatgttgattatgatggtgggcaacctggttatcatccccgtggggataacgttttttactgaacagaccacaaccccctggatcatctttaacgtggcatcagacaccgtcttcttgctggatctaattatgaattttagaacaggtacagtgaacgaggactcatcagaaatcatcctcgaccctaaagtgattaagatgaactatctgaaatcttggttcgtggtggattttattagcagcattcccgtagattacattttcctcattgttgagaaaggtatggatagcgaagtgtataagactgcaagagccctgcggatagttagatttacaaaaattctgtccctgctgcggctgttgaggttgtctcgactgatccgttatattcaccagtgggaggagatcttccacatgacgtacgacctcgcaagcgctgtggtccgcatcttcaatttgatcgggatgatgctcctgctatgccactgggacggctgtctgcagttcttggtgcctctcttgcaggatttcccccccgattgttgggtgagcctgaatgaaatggtgaacgattcttggggcaagcagtactcctacgctttgtttaaagctatgtcgcacatgctctgtatcggttacggggcccaagccccagtgtccatgtcggatctttggataacaatgttgtccatgattgtaggcgccacatgctacgccatgttcgtagggcatgctacggccctgatccaaagtctggattcgtcacgacgccaataccaagaaaagtacaaacaagttgaacagtatatgtcattccataagcttccggcagacatgaggcaaaagatccatgactattacgagcacaggtatcagggcaagatattcgacgaggagaacatcctcaacgagctgaacgatcccttgcgagaggaaatcgtgaactttaactgtcgaaaactcgttgccaccatgccactctttgccaatgcagatcctaactttgtgaccgctatgttgtctaagctcagattcgaggtgtttcagcccggcgattatatcattcgggagggggccgtggggaagaaaatgtattttatacagcacggagttgccggggtgattactaaatccagtaaggaaatgaagcttactgacggcagctactttggcgaaatctgcctgctcacgaagggtcgtcggactgcttccgtccgcgcagacacgtattgtagattatacagcctgtctgtggataactttaacgaggtgctggaagagtatcctatgatgagacgcgctttcgagacagtggccatcgaccggctggatcggataggcaaaaaaaacagcattttgcttcagaagtttcagaaggaccttaatactggtgtgttcaacaaccaggagaatgagatactaaagcaaatagtgaaacacgacagagagatggtgcaagcaatcgcccctatcaactatcctcagatgacgacgctgaacagcacatcctcaacgaccactccgacaagtaggatgcgaacccaatcaccccctgtgtatactgccacctctttaagtcattccaatttacacagcccatccccctccacgcagacaccccaaccctccgcgattctttctccatgcagttacactaccgctgtatgttcaccaccagtgcagagcccacttgccgcccgcaccttccactacgcctcccctacagcatcccagttgtctctcatgcagcaacagccccagcagcaggtccagcaatcacagcctccccagacgcagccccagcagccttccccgcagccccaaaccccaggcagctccacgcctaaaaacgaagtgcacaaatccactcaagcactccataacactaaccttacacgcgaagtgagacccctatccgcatcacagcccagcctcccacatgaggtgtctactctcatatcgcgtccccacccaactgtgggcgaaagtctggcctctattcctcagccagtgacagcagttccaggaacaggattgcaggcgggcggcaggtcgaccgtgccccaacgggtcaccctctttagacagatgtctagtggggctatcccacccaaccgcggggtgccccccgcccctccaccaccggccgccgccctcccccgcgaatccagcagtgttttgaatactgaccccgacgcggagaagccacgtttcgcctctaacctatag

SEQ ID NO: 207373 - DNA, 2673 bp, Artificial Sequence
  derived and/or modified sequence
atggaaggcggtggaaagcctaacagctcttcaaactctagggacgatggcaacagtgttttccctgccaaagcatcagcgacaggggcaggtccagcagcagctgagaagagactgggaaccccccctggcggagggggtgctggcgctaaggaacacgggaactctgtctgttttaaggtggatgggggtggtgggggtggtgggggaggcggtggaggcgaagaacccgcaggtggttttgaggatgccgagggtcccagaaggcagtacggttttatgcagcggcaattcacttctatgctacagccgggagtcaacaaattctccctccggatgttcggctcgcaaaaagccgttgagaaggaacaagagagagttaagactgcaggcttctggattatccatccttattcagacttcaggttttactgggacctaatcatgttaattatgatggtggggaacctggtgataattccggttggcatcacatttttcaccgagcagacaacaactccatggatcatatttaatgtcgcctcggatacagtgtttctgctggatctgatcatgaattttcgtacaggcaccgtaaatgaggacagctcagagattatcctcgacccaaaggtcatcaagatgaactatttaaagtcatggttcgtagttgatttcatcagcagtatcccagttgactacatcttcctgatagtagagaaggggatggattccgaggtgtacaagactgccagggctctccgtatcgttcgatttacaaagattctgtcacttctccggttgctcagactgtcccgtttaatccggtacattcatcagtgggaggagatctttcacatgacctacgacttagctagtgctgtggtacgaatcttcaacctgattggcatgatgttattgctgtgtcattgggacgggtgcctccagtttctggtgccattactgcaagattttcctcccgattgctgggtgtccttaaacgaaatggtcaatgactcatggggtaagcagtatagctacgcactattcaaggcaatgtctcatatgctctgtataggatatggcgctcaggcacctgtgtcaatgtctgacctctggatcaccatgctgtctatgatagtgggggctacctgctacgccatgtttgtggggcacgcaacagcgctgattcagtcactggattcatccaggaggcaatatcaggaaaaatataagcaggttgagcaatatatgagtttccataagctgcctgcagatatgcggcagaaaatccatgattactacgagcaccgctaccagggtaagatattcgatgaagagaacatcctgaatgaactcaatgaccctctccgggaggaaattgtcaactttaactgcaggaagcttgttgccactatgcctctgtttgctaatgctgatcctaactttgttacagccatgctgagtaaacttcgattcgaggtgtttcagccgggtgattacatcattcgggagggggcagtgggcaagaaaatgtactttattcagcacggcgtcgctggcgtcatcaccaagtccagcaaggagatgaagttgaccgacggctcatattttggagagatttgccttcttacaaaagggagaaggacagccagcgtgagggccgatacatattgtcggctctatagcctttctgtggataacttcaatgaggtcctggaagaatacccaatgatgagacgggcatttgaaacagtggctatcgacagattggacagaataggcaagaaaaacagcatcctactacagaagtttcagaaagaccttaataccggggttttcaacaatcaggagaacgagatacttaaacagattgtgaagcatgatcgagagatggtgcaggcaatcgcacccatcaattatccacaaatgactactcttaacagcaccagcagcaccactactcccacaagccggatgaggacccagtctccaccggtctacacagcaacttccctgagtcatagtaacttgcactccccttccccgtccactcagactcctcagcctagcgctatcttatctccttgctcctacaccaccgccgtgtgttctccaccagtgcaaagcccgctggccgcacgaacctttcactatgcatcacccactgcgagtcagttatcactgatgcagcaacagccgcaacagcaagtgcagcagagtcagccccctcagactcagcctcaacagcccagcccacagcctcaaactcctggcagttccactcctaaaaatgaagtgcacaagtcgactcaagccctccacaacaccaacctgactcgagaagtgcgtccactgagcgcatctcagccttccctccctcacgaggtgtcaacgctcatctctcgcccacacccaactgttggggagtctctcgccagcatccctcagccagttactgctgtccctgggaccgggctccaggctggagggaggagtacagtcccacaacgggtgactttgttccggcagatgtcatctggtgcaatcccccctaaccggggagtgcctcctgcccctcctcctcctgcggcagccctccctagggagagctcgagcgttctgaacacagaccccgacgccgagaaacccagattcgctagcaatctgtag

SEQ ID NO: 207374 - protein, 454 aa, Artificial Sequence
  derived and/or modified sequence
MHLTVFLLKGIVGFLWSCWVLVGYAKGGLGDNHVHSSFIYRRLRNHERREIQREILSILGLPHRPRPFSPGKQASSAPLFMLDLYNAMTNEENPEESEYSVRASLAEETRGARKGYPASPNGYPRRIQLSRTTPLTTQSPPLASLHDTNFLNDADMVMSFVNLVERDKDFSHQRRHYKEFRFDLTQIPHGEAVTAAEFRIYKDRSNNRFENETIKISIYQIIKEYTNRDADLFLLDTRKAQALDVGWLVFDITVTSNHWVINPQNNLGLQLCAETGDGRSINVKSAGLVGRQGPQSKQPFMVAFFKASEVLLRSVRAANKRKNQNRNKSSSHQDSSRMSSVGDYNTSEQKQACKKHELYVSFRDLGWQDWIIAPEGYAAFYCDGECSFPLNAHMNATNHAIVQTLVHLMFPDHVPKPCCAPTKLNAISVLYFDDSSNVILKKYRNMVVRSCGCH

SEQ ID NO: 207375 - DNA, 1365 bp, Artificial Sequence
  derived and/or modified sequence
atgcacctgaccgtatttctgctcaaaggaattgtaggattcttatggagctgctgggtcctcgtcggctacgccaagggggggctgggcgataatcacgtgcattcttcatttatctaccggagactccgcaaccatgagcggcgcgagatccagcgtgaaatcctgagcatcctaggcttaccacatcggccccggcccttctctccgggaaaacaggcctcatccgcgcctctgtttatgttggatctatataatgccatgacaaatgaagaaaaccccgaggaaagcgagtatagcgtaagagctagtcttgccgaggaaacaagaggcgcccgcaaaggctacccagcatctcctaacggctacccgcgaagaattcaattatcccggacaactcccctgacgacacagagtccccccctggccagtctgcatgataccaactttctcaacgacgcagatatggttatgagttttgttaatctcgtggagcgtgataaagacttctcccatcaacggcgacactacaaggagttccgcttcgatctgacgcagattccgcacggcgaggccgtgacggcagctgagttccgtatctataaagaccgatccaataaccgatttgagaacgagactataaagattagtatttatcagataatcaaggaatacacgaatcgcgacgctgatcttttcttgttggacacacgcaaggcccaggccctggatgttggttggctggttttcgacatcaccgttacgtccaaccattgggtgattaacccacagaacaacctgggccttcagctatgcgccgagaccggcgacgggcgcagcataaacgtcaagagtgccggcctggtcggacgacaggggccccagagcaagcagcctttcatggtcgcctttttcaaagctagtgaggtccttttacgttcagttcgagctgctaataaaaggaagaatcagaaccgcaacaagagctcttcccaccaggacagcagcagaatgtcctctgtcggcgactacaacacatctgagcagaagcaggcatgcaaaaagcatgaactttacgtctccttccgcgacctggggtggcaggattggataatcgcccccgaaggatatgcagctttttactgcgacggtgaatgctcattccccctgaacgctcacatgaatgccaccaatcacgccatcgtgcagactctggttcatctgatgttccccgatcacgtcccaaagccctgttgcgctccaacaaagttgaacgctatcagtgtattgtacttcgacgactcttcaaatgtgattctgaagaaatacagaaatatggtagttaggtcctgtggctgccattag

SEQ ID NO: 207376 - DNA, 1365 bp, Artificial Sequence
  derived and/or modified sequence
atgcacctgaccgtcttcctgctgaagggcatcgtgggcttcctgtggagctgctgggtgctggtgggctacgccaagggcggcctgggggacaaccacgtgcacagcagcttcatctacagaaggctgaggaaccacgagcggcgggagatccagcgggagatcctgagcatcctgggcctgccccaccggccccggcccttcagccctgggaagcaggccagcagcgcccccctcttcatgctggacctgtacaatgccatgaccaatgaggagaaccctgaggagagcgagtacagcgtgcgggccagcctggccgaggagaccaggggggccaggaagggctacccagccagccccaacggctacccccggcgcatccagctgagcaggaccacccccctgaccacccagagcccccccctggccagcctgcatgacaccaacttcctgaatgatgctgacatggtgatgagctttgtgaacctggtggagcgggacaaggacttcagccaccagaggaggcactacaaggagttccgctttgacctgacccagatcccccatggagaggccgtgacagctgctgagttccgcatctacaaggacaggagcaacaacagatttgaaaatgagaccatcaagatcagcatctaccagatcatcaaggagtacaccaacagagatgctgacctcttcctgctggacaccaggaaggcccaggccctggatgtgggctggctggtgtttgacatcaccgtgaccagcaaccactgggtgatcaacccccagaacaacctgggcctgcagctgtgtgccgagactggagatggccgcagcatcaacgtgaagtctgctggcctggtgggccggcagggcccccagagcaagcagcccttcatggtggccttcttcaaggccagcgaggtgctgctgcggtctgtgcgggccgccaacaagaggaagaaccagaacagaaacaagagcagcagccaccaggacagcagcaggatgagctctgtgggggactacaacaccagcgagcagaagcaggcctgcaagaagcatgagctgtatgtgtccttccgggacctgggctggcaggactggatcatcgcccctgagggctacgccgccttctactgtgatggagaatgttccttccccctgaatgcccacatgaatgccaccaaccacgccatcgtgcagaccctggtgcacctgatgtttcctgaccacgtgcccaagccctgctgtgcccccaccaagctgaatgccatctctgtgctgtactttgatgacagcagcaatgtcatcctgaagaagtacagaaacatggtggtgcgcagctgtggctgccactag

SEQ ID NO: 207377 - DNA, 1365 bp, Artificial Sequence
  derived and/or modified sequence
atgcacctgaccgtgttcctgctgaagggcatcgtgggcttcctgtggagctgctgggtattagtgggttatgcaaaaggaggtctcggagataatcatgtacacagctccttcatttacagacgcctgcggaaccatgagagacgtgaaatccagcgcgagattctcagtatactgggactgcctcaccgacctaggccattttcacctggcaagcaggccagcagcgcccctttgtttatgctggacctgtataatgccatgaccaatgaggagaacccagaagagagcgaatacagtgtaagagcatccctggccgaggagacccgtggagcacgaaagggctacccggccagcccaaacggctatccaaggaggatccagctgagccgtaccactccactaactacacagtcaccacctcttgcttctctccacgatacaaatttcctcaatgacgcagacatggtgatgtctttcgtgaatctggttgagagggataaggacttctctcatcaacgacgccattataaagagtttagattcgacctgacacagatcccccatggagaggccgttactgcagcagagtttcggatttacaaggacagatcaaataaccggttcgaaaatgagaccattaaaatctctatataccaaatcataaaagaatacacaaatcgcgatgctgatttgttcctcctcgacacccggaaggcacaggcgctggacgtggggtggcttgtgtttgacatcaccgtcacttctaatcattgggtaattaatccccagaataatctcggcctgcagctgtgcgctgaaaccggagacggacgcagcataaacgtcaagagcgccggcctcgtgggacgccagggcccacagtctaagcagccctttatggtggcatttttcaaggcatctgaagtgctgctcaggagcgtgagagctgctaacaagaggaagaaccagaaccggaataagagttccagtcatcaggacagtagcagaatgtcgtctgtgggcgactacaacaccagtgaacagaaacaggcatgtaagaagcatgagctatacgtgtctttcagagatcttggatggcaggactggattatagcccctgaaggttacgctgcattttactgtgatggtgagtgttcgttccccttaaacgctcacatgaatgcaacaaaccacgctatcgtccaaacactggtacatttaatgttccctgaccatgtgcccaagccctgctgcgctcccactaaacttaacgcaataagcgtactttatttcgacgatagtagcaatgtgatcctgaagaaatatcggaacatggtggttagaagttgcggttgccattag

SEQ ID NO: 207378 - DNA, 1365 bp, Artificial Sequence
  derived and/or modified sequence
atgcacctgacggtctttctgcttaaaggaattgtgggatttctttggagttgttgggtcctagtcggttatgccaaaggcggtctgggagataaccatgtgcattcctccttcatctatcggcgactgcgaaaccatgagaggagggagatccagcgcgaaattcttagcatactggggttaccgcacaggcctcgtcctttttcacctggcaagcaggcctccagcgccccactgttcatgctggatctgtataacgctatgacaaatgaagagaacccagaggaatccgaatactctgttcgggcttctctggctgaagaaactaggggagccagaaaaggatacccagccagtcctaacggctacccaaggaggattcagctgtcaagaaccactcccctaactacccagtcccctcccctagcctccttacatgacaccaatttcctgaacgacgcagacatggtcatgagctttgttaatcttgttgaaagagataaggactttagccaccagcggagacattacaaagagttcaggttcgacctgactcagatcccgcatggggaggctgtcaccgccgctgagtttagaatctacaaagaccgctccaataacaggttcgagaatgaaaccatcaagatcagtatttaccagatcataaaggaatatactaatagagatgccgacctgttcctgctagatacacgtaaagctcaggccttggatgtgggctggctggtgttcgatataacagtcacgagcaaccattgggtaataaatccacagaataatcttggactgcaactgtgcgcagagacgggagatggcaggtctataaatgtcaagagtgcgggactggtagggcgacaagggccacagagcaagcaaccttttatggtagcattctttaaggccagcgaagttttgcttcgctccgtacgtgcggctaataaacgcaaaaaccaaaataggaataagagctcttctcatcaggattcatctcggatgagcagtgtgggagactacaacaccagtgagcagaaacaggcgtgcaagaaacacgagctttacgtgagttttagagaccttggctggcaggactggatcatcgctccagaaggctacgctgctttctattgcgatggcgaatgttcattcccattaaacgcccacatgaacgctacaaaccacgctatagtacagaccttagtccatttaatgtttcccgaccacgtgcctaagccctgttgtgccccaacgaagctgaatgctatttctgtcctgtacttcgatgatagttccaacgtgattctgaagaagtatcgtaatatggtggtacggtcctgcggctgtcactag

SEQ ID NO: 207379 - DNA, 3952 bp, Artificial Sequence
  derived and/or modified sequence
ctggtatatttgtgcctgctggaggtggaattaacagtaagaaggagaaagggattgaatggacttacaggaaggatttcaagtaaattcagggaaacacatttacttgaatagtacaacctagagtattattttacactaagacgacacaaaagatgttaaagttatcaccaagctgccggacagatatatattccaacaccaaggtgcagatcagcatagatctgtgattcagaaatcaggatttgttttggaaagagctcaagggttgagaagaactcaaaagcaagtgaagattactttgggaactacagtttatcagaagatcaacttttgctaattcaaataccaaaggcctgattatcataaattcatataggaatgcataggtcatctgatcaaataatattagccgtcttctgctacatcaatgcagcaaaaactcttaacaactgtggataattggaaatctgagtttcagctttcttagaaataactactcttgacatattccaaaatatttaaaataggacaggaaaatcggtgaggatgttgtgctcagaaatgtcactgtcatgaaaaataggtaaatttgttttttcagctactgggaaactgtacctcctagaaccttaggttttttttttttttaagaggacaagaaggactaaaaatatcaacttttgcttttggacaaaaatgcatctgactgtatttttacttaagggtattgtgggtttcctctggagctgctgggttctagtgggttatgcaaaaggaggtttgggagacaatcatgttcactccagttttatttatagaagactacggaaccacgaaagacgggaaatacaaagggaaattctctctatcttgggtttgcctcacagacccagaccattttcacctggaaaacaagcgtcctctgcacctctctttatgctggatctctacaatgccatgaccaatgaagaaaatcctgaagagtcggagtactcagtaagggcatccttggcagaagagaccagaggggcaagaaagggatacccagcctctcccaatgggtatcctcgtcgcatacagttatctcggacgactcctctgaccacccagagtcctcctctagccagcctccatgataccaactttctgaatgatgctgacatggtcatgagctttgtcaacttagttgaaagagacaaggatttttctcaccagcgaaggcattacaaagaatttcgatttgatcttacccaaattcctcatggagaggcagtgacagcagctgaattccggatatacaaggaccggagcaacaaccgatttgaaaatgaaacaattaagattagcatatatcaaatcatcaaggaatacacaaatagggatgcagatctgttcttgttagacacaagaaaggcccaagctttagatgtgggttggcttgtctttgatatcactgtgaccagcaatcattgggtgattaatccccagaataatttgggcttacagctctgtgcagaaacaggggatggacgcagtatcaacgtaaaatctgctggtcttgtgggaagacagggacctcagtcaaaacaaccattcatggtggccttcttcaaggcgagtgaggtacttcttcgatccgtgagagcagccaacaaacgaaaaaatcaaaaccgcaataaatccagctctcatcaggactcctccagaatgtccagtgttggagattataacacaagtgagcaaaaacaagcctgtaagaagcacgaactctatgtgagcttccgggatctgggatggcaggactggattatagcaccagaaggatacgctgcattttattgtgatggagaatgttcttttccacttaacgcccatatgaatgccaccaaccacgctatagttcagactctggttcatctgatgtttcctgaccacgtaccaaagccttgttgtgctccaaccaaattaaatgccatctctgttctgtactttgatgacagctccaatgtcattttgaaaaaatatagaaatatggtagtacgctcatgtggctgccactaatattaaataatattgataataacaaaaagatctgtattaaggtttatggctgcaataaaaagcatactttcagacaaacggggaatttcctaaaattagtctggctcattttgactcttttcctatgtacaatatcatgtatatagtcatttttatttatttaaacgtatatattctcttctgtggaggctttatcaataaaatctatttcataggccactacattatacaatagatcatctagtataattttcaatgggttatgctgagtccattcaattccatttcaacatttttttctaatacaattttacataattttctgagattagacagaactcctttgactgtttaatattgtggaaggaaattgaataatttagttatattgtgccaatgaaaaccatgatagaatatttatttagaaataagacttaaaaaaataacaacccaaacaaaaattcttggataaacacaatttctcttttagagttcctgcttcattagataaagtgaaatgttgaactggatttgaataaataaacggtaggcagaacatagaagctgaaagattgcacagaattgttttaactgtttgctttaacagaagtggtgtaactgtaggagcatgttcctttttggcttgtggattgtagattttgcaaagagctcaaagcttcaggagacaggcttgagcctgtgtccatagctttccaagttaacactaattgtagtacaaccttcttacctcaaataaatcatgtctgcctattatctagaacactactgctgcagaatttttttttcagatttaaaaacctagtccaaaataaagaaacatttacatgtgctccactttcctccccacaggcaagagtcactgcatgcgtaaaatgtacaagagcagaagatgccgaaagaaccattttctttagctctcctttataactgagtttgctgattgatgtgatgcaagggattttatttagaagtaaaagcactgaaactaaactggaggaaattaccaaaagtcccagaatggctttgacagaattgccatttctaaagaacagctgaaattcatttttcatatctttgagagtgagctcaatgaaaaccttattttgtaaaggcattttgtaaaccttcttccaagcacaaataattccaaacaggaaggttctgttgtgtgtgtgtgtgtgtgtgtgtctgtgtgtgcatgtgtgttcttccctctaaaattaatttattttctctatctattagaatgccctctaaggcctttctttaacacacactgactttttgaagaatgatctttagattgataacttgctatttatggtgactctgtggttaggcttatttaccgttaatctaaagtattcataaagcaccatttattaatcatccttttggatctttcaaaccaaacgtataccaaaaatgtcttcaaaaatgttatggctttgtttgtaattcgggtatattaaaatgttgttttgaaatacagtttatcttaaagaaaatttgacagtaactatattaaggggtacattaagtaatatatttttaattaatggtgtaccattgagagaataagaaatggaagtctattgttttattctttaaatgtgctgtttaaatatatttccatattttaaaatatattaaacagatgctaatttctgctgttcttgatttggttctttatttaaaaggaatacaaaatgtaagtatatcataaattgagacaataagaatatttatcaaatgtaaactgtttgtggatcacatgattctttatgttgttcttaattgccaaaattgttttttgtgttgttaataattatctcactattaaatgtgcaaagcaacaatccatgaa

SEQ ID NO: 207380 - DNA, 1365 bp, Artificial Sequence
  derived and/or modified sequence
atgcacctgaccgtgttcctgctgaagggcatcgtgggcttcctgtggagctgctgggtgctggtgggctacgccaagggcggcctgggcgacaaccacgtgcacagcagcttcatctacagaagactgagaaaccacgagagaagagagatccagagagagatcctgagcatcctgggcctgccccacagacccagacccttcagccccggcaagcaggccagcagcgcccccctgttcatgctggacctgtacaacgccatgaccaacgaggagaaccccgaggagagcgagtacagcgtgagagccagcctggccgaggagaccagaggcgccagaaagggctaccccgccagccccaacggctaccccagaagaatccagctgagcagaaccacccccctgaccacccagagcccccccctggccagcctgcacgacaccaacttcctgaacgacgccgacatggtgatgagcttcgtgaacctggtggagagagacaaggacttcagccaccagagaagacactacaaggagttcagattcgacctgacccagatcccccacggcgaggccgtgaccgccgccgagttcagaatctacaaggacagaagcaacaacagattcgagaacgagaccatcaagatcagcatctaccagatcatcaaggagtacaccaacagagacgccgacctgttcctgctggacaccagaaaggcccaggccctggacgtgggctggctggtgttcgacatcaccgtgaccagcaaccactgggtgatcaacccccagaacaacctgggcctgcagctgtgcgccgagaccggcgacggcagaagcatcaacgtgaagagcgccggcctggtgggcagacagggcccccagagcaagcagcccttcatggtggccttcttcaaggccagcgaggtgctgctgagaagcgtgagagccgccaacaagagaaagaaccagaacagaaacaagagcagcagccaccaggacagcagcagaatgagcagcgtgggcgactacaacaccagcgagcagaagcaggcctgcaagaagcacgagctgtacgtgagcttcagagacctgggctggcaggactggatcatcgcccccgagggctacgccgccttctactgcgacggcgagtgcagcttccccctgaacgcccacatgaacgccaccaaccacgccatcgtgcagaccctggtgcacctgatgttccccgaccacgtgcccaagccctgctgcgcccccaccaagctgaacgccatcagcgtgctgtacttcgacgacagcagcaacgtgatcctgaagaagtacagaaacatggtggtgagaagctgcggctgccactag

SEQ ID NO: 207381 - protein, 249 aa, Artificial Sequence
  derived and/or modified sequence
MFFSAALRARAAGLTAHWGRHVRNLHKTVMQNGAGGALFVHRDTPENNPDTPFDFTPENYKRIEAIVKNYPEGHKAAAVLPVLDLAQRQNGWLPISAMNKVAEVLQVPPMRVYEVATFYTMYNRKPVGKYHIQVCTTTPCMLRNSDSILEAIQKKLGIKVGETTPDKLFTLIEVECLGACVNAPMVQINDNYYEDLTAKDIEEIIDELKAGKIPKPGPRSGRFSCEPAGGLTSLTEPPKGPGFGVQAGL

SEQ ID NO: 207382 - DNA, 750 bp, Artificial Sequence
  derived and/or modified sequence
atgtttttttcagcggcattgcgagcccgagcagccggattaacagcacactggggccgccacgttaggaatctgcataagactgtgatgcagaacggtgccggcggcgccctgttcgtgcaccgggatacgcccgagaacaatcctgatacccctttcgattttacacctgaaaactacaaacggatagaagctatcgtgaaaaattacccagaagggcataaagccgctgcagttctgcctgttctcgacttggctcaacgacagaacggctggttgccaatctctgctatgaataaggtcgccgaagtcctgcaggtcccaccgatgagggtttacgaagtggctaccttttacaccatgtataatcgaaagcccgttggcaaataccatatacaggtgtgcaccactactccttgtatgctccgcaactccgacagcattctcgaagcaatccagaagaagctcggtattaaggtcggagaaaccactccggataaactgttcacactcattgaagtagaatgcctgggagcctgcgtcaatgcaccaatggtccagataaacgacaactactacgaggatcttactgcaaaggatattgaagagatcattgacgagttgaaggcaggaaagatccctaagccgggcccacgatccggacgatttagctgcgaaccagccggaggattaacatctcttactgaaccacccaagggacccgggtttggtgtccaagcgggattgtag

SEQ ID NO: 207383 - DNA, 750 bp, Artificial Sequence
  derived and/or modified sequence
atgttcttctctgctgccctgcgggcccgggccgccggcctgacagcccactggggcagacatgtgaggaacctgcacaagacagtgatgcagaatggagctgggggcgccctgtttgtgcaccgggacaccccagagaacaacccagacaccccatttgacttcaccccagagaactacaagagaattgaggccatcgtgaagaactacccagagggccacaaggctgctgctgtgctgcctgtgctggacctggcccagaggcagaatggctggctgcccatcagcgccatgaacaaggtggccgaggtgctgcaggtgccccccatgagggtgtatgaggtggccaccttctacaccatgtacaacaggaagcctgtgggcaagtaccacatccaggtgtgcaccaccaccccctgcatgctgaggaacagcgacagcatcctggaggccatccagaagaagctgggcatcaaggtgggggagaccaccccagacaagctgttcaccctcatcgaggtggagtgcctgggcgcctgtgtgaatgcccccatggtgcagatcaatgacaactactatgaggacctgacagccaaggacatcgaggagatcattgatgagctgaaggccggcaagatccccaagccaggccccaggagcggccgcttcagctgtgagcctgctgggggcctgaccagcctgacagagccccccaagggccctggctttggagtgcaggccggcctgtag

SEQ ID NO: 207384 - DNA, 930 bp, Artificial Sequence
  derived and/or modified sequence
gcgtgccgtccgggtcgcctaggcctggggtcgggagcgcgcacgctgtgcgccctgggcgcgctcgggattctcgcctggcgcggctggggaaggtgaacagtgtggcccgccatgttcttctccgcggcgctccgggcccgggcggctggcctcaccgcccactggggaagacatgtaaggaatttgcataagacagttatgcaaaatggagctggaggagctttatttgtgcacagagatactcctgagaataaccctgatactccatttgatttcacaccagaaaactataagaggatagaggcaattgtaaaaaactatccagaaggccataaagcagcagctgttcttccagtcctggatttagcccaaaggcagaatgggtggttgcccatctctgctatgaacaaggttgcagaagttttacaagtacctccaatgagagtatatgaagtagcaactttttatacaatgtataatcgaaagccagttggaaagtatcacattcaggtctgcactactacaccctgcatgcttcgaaactctgacagcatactggaggccattcagaaaaagcttggaataaaggttggggagactacacctgacaaacttttcactcttatagaagtggaatgtttaggggcctgtgtgaacgcaccaatggttcaaataaatgacaattactatgaggatttgacagctaaggatattgaagaaattattgatgagctcaaggctggcaaaatcccaaaaccagggccaaggagtggacgcttctcttgtgagccagctggaggtcttacctctttgactgaaccacccaagggacctggatttggtgtacaagcaggcctttaatttatattgaactgtaaatatgtcactagagaaataaaatatggacttccaatctacgtaaactta

SEQ ID NO: 207385 - DNA, 750 bp, Artificial Sequence
  derived and/or modified sequence
atgttcttcagcgccgccctgcgggcccgggccgccggcctgaccgctcactggggccgacacgtgagaaatctacacaagaccgtcatgcagaacggtgccgggggtgcgctgtttgtccaccgagacacgcccgaaaacaatcccgatacaccttttgacttcacacccgagaactataagcgaatcgaagccattgtgaagaactaccctgaagggcacaaagccgcggcagtgcttcccgtcctggacctggcacagagacagaatgggtggcttccaatctctgcaatgaacaaagtggccgaggtgctgcaggtccctccgatgcgggtgtatgaggtggctactttctacacaatgtacaacagaaagccagttgggaaatatcatattcaggtgtgcaccactactccttgcatgctgcgtaactccgatagcatcctcgaagcgatccagaagaagctgggcatcaaagtgggcgagacgactcctgataagctgtttactctaattgaggtcgagtgccttggcgcttgtgtcaacgccccaatggtgcagatcaatgacaactattatgaggatcttaccgccaaggatattgaagaaattatcgatgagcttaaggccgggaagattcctaagcctggccccaggagcggccgcttcagctgcgagcccgctggtggactgactagcctgacagaacctcctaaaggccccggcttcggcgtgcaggcgggcctgtag

SEQ ID NO: 207386 - DNA, 750 bp, Artificial Sequence
  derived and/or modified sequence
atgtttttttcggccgctctcagagccagagccgctggactgaccgcacattggggccgtcacgtccgcaacttacacaaaacggtgatgcagaacggcgctgggggagcactatttgtccatcgtgacacaccagagaacaaccctgatacgccgttcgactttacccccgagaactacaaacgcatcgaggccatcgtcaaaaactacccggagggccataaggccgcagccgtcctccctgtactggaccttgcacagaggcagaacgggtggctcccaatttcagccatgaataaagtcgctgaggtacttcaggtgcctcccatgagagtatacgaagttgcaacattttatacaatgtataatcggaaacctgtgggaaaataccacatccaggtatgtaccacaactccgtgtatgttgcggaacagcgactccatcctggaggccattcagaagaagttaggtattaaagtgggagagaccaccccggacaaactgtttactttgattgaggtggaatgtcttggagcgtgcgttaatgcccctatggttcaaatcaacgacaactactacgaggacttgaccgctaaggatatagaggagatcatcgatgagctgaaggccggaaagataccaaagcctggccctaggtccggacgatttagttgtgaacccgctggtggactcactagcctaaccgagccccctaagggtccaggttttggcgttcaagccggtctatag

SEQ ID NO: 207387 - DNA, 750 bp, Artificial Sequence
  derived and/or modified sequence
atgttcttcagcgccgccctgagagccagagccgccggcctgaccgcccactggggcagacacgtgagaaacctgcacaagaccgtgatgcagaacggcgccggcggcgccctgttcgtgcacagagacacccccgagaacaaccccgacacccccttcgacttcacccccgagaactacaagagaatcgaggccatcgtgaagaactaccccgagggccacaaggccgccgccgtgctgcccgtgctggacctggcccagagacagaacggctggctgcccatcagcgccatgaacaaggtggccgaggtgctgcaggtgccccccatgagagtgtacgaggtggccaccttctacaccatgtacaacagaaagcccgtgggcaagtaccacatccaggtgtgcaccaccaccccctgcatgctgagaaacagcgacagcatcctggaggccatccagaagaagctgggcatcaaggtgggcgagaccacccccgacaagctgttcaccctgatcgaggtggagtgcctgggcgcctgcgtgaacgcccccatggtgcagatcaacgacaactactacgaggacctgaccgccaaggacatcgaggagatcatcgacgagctgaaggccggcaagatccccaagcccggccccagaagcggcagattcagctgcgagcccgccggcggcctgaccagcctgaccgagccccccaagggccccggcttcggcgtgcaggccggcctgtag

SEQ ID NO: 207388 - protein, 473 aa, Artificial Sequence
  derived and/or modified sequence
MAAPCLLRQGRAGALKTMLQEAQVFRGLASTVSLSAESGKSEKGQPQNSKKQSPPKNVVEPKERGKLLATQTAAELSKNLSSPSSYPPAVNKGRKVASPSPSGSVLFTDEGVPKFLSRKTLVEFPQKVLSPFRKQGSDSEARQVGRKVTSPSSSSSSSSSDSESDDEADVSEVTPRVVSKGRGGLRKPEASHSFENRAPRVTVSAKEKTLLQKPHVDITDPEKPHQPKKKGSPAKPSEGRENARPKTTMPRSQVDEEFLKQSLKEKQLQKTFRLNEIDKESQKPFEVKGPLPVHTKSGLSAPPKGSPAPAVLAEEARAEGQLQASPPGAAEGHLEKPVPEPQRKAAPPLPRKETSGTQGIEGHLKGGQAIVEDQIPPSNLETVPVENNHGFHEKTAALKLEAEGEAMEDAAAPGDDRGGTQEPAPVPAEPFDNTTYKNLQHHDYSTYTFLDLNLELSKFRMPQPSSGRESPRH

SEQ ID NO: 207389 - DNA, 1422 bp, Artificial Sequence
  derived and/or modified sequence
atggccgccccatgcctcctgcgtcagggtagagctggagcactgaaaactatgctgcaggaagcccaggtgttcaggggcctagcctccaccgttagcctaagcgctgaatccggtaagtccgaaaaagggcagccacagaattccaaaaagcagagtccacctaaaaacgtcgtggagcctaaggaacgtggaaagttactggccactcagacagccgcagagctcagcaagaacctgtcgtcccctagctcctacccgcccgctgtaaacaaagggaggaaggtggcgtcaccctctccttcaggcagtgtgctgtttaccgacgaaggagtgcccaaatttttgtcccgaaagaccctggtggaattcccccagaaggtgctatctccttttagaaaacagggctcagactcagaagcccgacaggtggggcggaaggtcaccagtcccagtagttcttcatcatccagctcatccgattcggagtcagacgatgaagccgatgtgtcggaagtaaccccacgagtggtctcaaaaggaagggggggactgaggaagcctgaagcgagccatagttttgagaatcgcgcacccagggtaactgtgagtgcaaaggaaaaaaccttgttgcaaaaaccccatgtggacataacagaccctgaaaagcctcatcagccaaaaaaaaaggggagcccagctaaaccttcagagggacgtgagaacgcacgtccgaagaccaccatgccgcgctctcaggttgacgaggaattcctgaagcagtctctgaaagagaaacagctacagaagactttcagactgaacgagatcgacaaagagtcccagaagccctttgaggtaaaaggcccacttcccgtccacacaaagtccggacttagcgccccccccaaggggtctcccgctcctgccgtgctggctgaggaagcccgggcagaagggcagctccaggcgtcccccccaggcgcagccgagggacaccttgagaaacccgtgccagaacctcagcgaaaagcggccccgccattacctcgtaaagaaacttctgggactcagggcattgaggggcaccttaaaggcggccaggctatagttgaggaccagattccaccttcaaacctggagacagtcccggtcgagaataaccacggattccatgagaaaacggctgctctgaaactcgaggctgaaggtgaggcgatggaggacgccgcagccccgggcgatgaccgcgggggaacacaggaaccagcccctgtcccggccgagccctttgacaacacaacttacaagaatctgcagcaccacgactactctacctatacgttcctggacctgaatctggaattaagtaaatttagaatgcctcagccatcctccggcagggaatctccccgccactag

SEQ ID NO: 207390 - DNA, 1422 bp, Artificial Sequence
  derived and/or modified sequence
atggccgccccctgcctgctgcggcagggccgggccggggccctgaagaccatgctgcaggaggcccaggtgttccggggcctggccagcacagtgtccctgtctgctgagagcggcaagtctgagaagggccagccccagaacagcaagaagcagagcccccccaagaatgtggtggagcccaaggagcggggcaagctgctggccacccagacagctgctgagctgagcaagaacctgagcagccccagcagctacccacctgctgtgaacaagggcaggaaggtggccagccccagccccagcggctctgtgctcttcacagatgaaggagtgcccaagttcctgagcaggaagaccctggtggagttcccccagaaggtgctgagccccttcaggaagcagggcagtgacagcgaggcccggcaggtgggcaggaaggtgaccagccccagcagcagcagcagcagcagcagcagtgacagcgagagtgatgatgaagcagatgtgtctgaggtgaccccccgggtggtgtccaagggccggggcggcctgaggaagccagaggccagccacagctttgaaaatagagccccccgggtgacagtgtctgccaaggagaagaccctgctgcagaagccccacgtggacatcacagatcctgagaagccccaccagcccaagaagaagggcagccctgccaagcccagcgagggcagagaaaatgcccggcccaagaccaccatgcccaggagccaggtggatgaggagttcctgaagcagagcctgaaggagaagcagctgcagaagaccttccggctgaatgaaattgacaaggagagccagaagccctttgaggtgaagggccccctgcctgtgcacaccaagagcggcctgagcgccccacccaagggcagccctgccccagctgtgctggccgaggaggcccgggcagagggccagctgcaggccagccccccaggagctgctgagggccacctggagaagcctgtgcctgagccccagaggaaggccgccccacccctgcccaggaaggagaccagcggcacccagggcatcgagggccacctgaagggcggccaggccatcgtggaggaccagatcccccccagcaacctggagaccgtgcctgtggagaacaaccacggcttccacgagaagacagctgccctgaagctggaggccgagggggaggccatggaggatgctgctgcccctggagatgaccggggcggcacccaggagcccgcccctgtgcctgctgagccctttgacaacaccacctacaagaacctgcagcaccacgactacagcacctacaccttcctggacctgaacctggagctgagcaagttcaggatgccccagcccagcagcggccgggagagccccaggcactag

SEQ ID NO: 207391 - DNA, 1575 bp, Artificial Sequence
  derived and/or modified sequence
ggcggctgttcaggcgcgggtgcgcgcgcagctgctgtggccctgcttggtgcgcccgctgtcaccgccatggctgccccgtgtttgctgcggcaaggacgagccggggcgctgaagactatgctccaggaagcccaggtgtttcgaggacttgcttctacggtttctttgtctgcggaatcagggaagagtgaaaagggtcagccacagaattccaagaagcaaagtccaccaaaaaatgtagtggaaccaaaggagaggggcaagctcctagccacccagacagcagctgaattgtctaaaaacttatcttcacccagttcttacccgccagctgtgaataagggcaggaaggtagctagtcccagtcccagtggcagcgtgctattcacagatgaaggggttccgaaatttttgtcaagaaagactttggtagagtttccacagaaagttctgtctccattcagaaaacagggctctgattcagaagctcgtcaggtgggtcggaaagtgacgtcgccttcgtcttcatcctcttccagctcctctgattctgaatctgatgatgaggctgacgtttcagaggtcactcctcgagtggtgagcaaaggcagaggggggcttcgaaaaccagaggcctctcattcctttgaaaacagagccccccgagttacagtatcagcaaaagagaaaaccttgctgcagaagccgcatgtggacattactgatccagagaagccccaccagccaaagaagaaagggtcccctgctaagccatcagaaggcagggaaaatgcgagaccaaaaaccacaatgcccagatctcaagtagatgaagagtttttgaagcaaagtttaaaggaaaaacaattgcagaaaacatttagattaaatgaaatagataaagaaagccaaaagccatttgaagttaaaggacccttacctgtccacacaaaatcagggttgtctgcgccaccgaagggcagcccagcgcctgctgtgttggcagaagaggccagagcagaggggcagctgcaagccagtcctcctggggcggcagaggggcatctggaaaaacccgtgccagagccccagcgcaaggcggcccctcccctgcccagaaaggaaacctcagggacgcagggaatagaaggccacctgaagggtggacaggcaatcgtggaagatcagataccaccaagcaatttggagacagttcctgttgagaataaccacggtttccatgaaaagacagcagcgctgaagcttgaggccgagggcgaggccatggaagatgcagccgcgccaggggacgaccgaggcggcacacaggagccagccccagtgcctgctgagccgtttgacaacactacctacaagaacctgcagcatcatgactacagcacgtacaccttcttagacctcaacctcgaactctcaaaattcaggatgcctcagccctcctcaggccgggagtcacctcgacactgagggccctcggtgtgaagatgaaccttccaccgtcttcactgcatcctggagtgcaaaaataaaatccactcaagagtcacaagg

SEQ ID NO: 207392 - DNA, 1422 bp, Artificial Sequence
  derived and/or modified sequence
atggccgccccctgcctgctgcggcagggccgggccggcgccctgaagacgatgctgcaggaggcgcaggtatttagaggacttgcgtcgacagtctccctgtcagcagagtctggaaagagcgaaaagggccagccacaaaactcaaaaaagcaaagtcctcctaagaatgttgtggaacccaaggagcggggcaagttgcttgcaactcaaaccgcggccgagctgagtaagaacctgtctagtccatccagctacccgcccgccgtgaacaagggcagaaaggtggccagcccttcacctagcggctccgtcttgttcactgatgagggcgttcccaaatttttgtctagaaagacactggttgagtttcctcagaaagtgctctcccccttcaggaagcaaggcagcgatagcgaagctaggcaggtggggcggaaagtcacttcaccaagctcctcttcctctagttctagctccgatagcgaatcagacgatgaggctgacgtctccgaagttacccctagggtggtttcgaaaggacgcggcggcctccgaaaacccgaggcttcgcactctttcgagaaccgggcccctcgcgtgacggtatctgccaaagagaaaacgctgctgcagaagccgcatgtggatatcaccgatcctgaaaagcctcaccagccaaagaagaaaggatcccctgccaagcccagcgaaggtcgcgaaaatgcccgcccgaagaccactatgcccaggtcccaggtggacgaagagtttctgaagcagagcttaaaggagaagcagctgcaaaaaacttttcggctcaacgaaattgataaagaaagtcaaaagccttttgaggtgaagggtccgctgcccgtccatactaagtctgggctgagcgcccctcccaagggatcgcccgcccccgccgtgctggcagaagaggcacgggccgaggggcagctgcaggccagcccgcccggagctgccgaggggcacctggaaaaaccagttcccgagccccaacgcaaggcagctccccctctgccacgcaaagagacctccggcactcagggaatcgagggtcacctcaaaggtgggcaggctatcgttgaagatcaaatcccgccaagtaatctggaaactgtcccagtggagaacaatcacggcttccacgagaagacagccgctctgaaactcgaagccgagggtgaggcaatggaagatgcggcggctcccggtgatgacaggggaggcacccaggaaccagccccggtacccgccgaaccattcgataatacaacatacaaaaacctgcagcaccacgactactcaacctatacatttctcgatctaaatctcgaactttcaaagtttcgtatgcctcagccgtcctcagggagagaatcacccagacactag

SEQ ID NO: 207393 - DNA, 1422 bp, Artificial Sequence
  derived and/or modified sequence
atggcagctccatgcctccttcgacagggacgcgctggcgctctgaaaacaatgctccaggaggcccaggtgtttcgaggtctggcatccacggtaagccttagcgccgagtctggcaaaagtgagaagggacaacctcagaatagcaagaaacagagtccgccaaaaaatgtggttgaacctaaagagcggggtaaattgctggctacacaaaccgccgcagagttgagcaaaaatctgtcctccccaagctcctacccaccagcggtcaacaagggccgaaaggtggcatcaccatcccccagtggcagcgttttatttacagacgagggagtgccgaagttcctctctagaaagaccctggttgagttccctcagaaggtactctcccctttccgcaagcagggcagcgattcggaagctcgtcaagtgggcaggaaagtgaccagtcccagctcatcctctagctcttcctcgtctgacagtgagagtgacgacgaagctgacgttagcgaggtcactcccagagtggtcagcaaaggaagggggggactgcggaagcccgaggcctcacacagtttcgaaaatagggcacctagagtcacggtgagcgcaaaagaaaagactttgctgcagaaacctcatgtcgatatcacagaccctgaaaaaccacaccaaccaaagaagaaggggtctcccgcaaaaccctcagaggggagagaaaacgctcgtcccaagacaaccatgcctaggtctcaggtcgatgaggaatttctgaagcagtctcttaaggaaaaacagcttcagaagacctttcgcttaaatgaaatagataaggaatctcaaaagccattcgaggtcaaaggccctctgcccgtgcacaccaaatcaggtctgagcgcccctcccaaaggaagtcctgcacctgccgttctggccgaagaggcgcgagccgagggtcagctgcaagcatcacctcctggcgctgcagagggccacctcgaaaaacctgtgcctgagccacagaggaaagcagctcctcccctgcctagaaaagagactagcggaactcagggtatagaggggcacctcaaaggcggacaggcgatcgtggaggatcagatccccccttccaatctcgagacagtgccagtcgagaacaaccatggtttccacgagaagaccgccgctctgaagctcgaggccgagggagaggccatggaagacgccgctgcccctggcgatgataggggtgggacgcaggaacccgctcctgtacctgcagaaccattcgacaacaccacttacaagaacttgcagcatcacgattattccacatacacgttcctagatctcaacctggaactgagcaaattccgaatgcctcagccatcctctggcagagaaagtccaaggcactag

SEQ ID NO: 207394 - DNA, 1422 bp, Artificial Sequence
  derived and/or modified sequence
atggccgccccctgcctgctgagacagggcagagccggcgccctgaagaccatgctgcaggaggcccaggtgttcagaggcctggccagcaccgtgagcctgagcgccgagagcggcaagagcgagaagggccagccccagaacagcaagaagcagagcccccccaagaacgtggtggagcccaaggagagaggcaagctgctggccacccagaccgccgccgagctgagcaagaacctgagcagccccagcagctacccccccgccgtgaacaagggcagaaaggtggccagccccagccccagcggcagcgtgctgttcaccgacgagggcgtgcccaagttcctgagcagaaagaccctggtggagttcccccagaaggtgctgagccccttcagaaagcagggcagcgacagcgaggccagacaggtgggcagaaaggtgaccagccccagcagcagcagcagcagcagcagcagcgacagcgagagcgacgacgaggccgacgtgagcgaggtgacccccagagtggtgagcaagggcagaggcggcctgagaaagcccgaggccagccacagcttcgagaacagagcccccagagtgaccgtgagcgccaaggagaagaccctgctgcagaagccccacgtggacatcaccgaccccgagaagccccaccagcccaagaagaagggcagccccgccaagcccagcgagggcagagagaacgccagacccaagaccaccatgcccagaagccaggtggacgaggagttcctgaagcagagcctgaaggagaagcagctgcagaagaccttcagactgaacgagatcgacaaggagagccagaagcccttcgaggtgaagggccccctgcccgtgcacaccaagagcggcctgagcgccccccccaagggcagccccgcccccgccgtgctggccgaggaggccagagccgagggccagctgcaggccagcccccccggcgccgccgagggccacctggagaagcccgtgcccgagccccagagaaaggccgccccccccctgcccagaaaggagaccagcggcacccagggcatcgagggccacctgaagggcggccaggccatcgtggaggaccagatcccccccagcaacctggagaccgtgcccgtggagaacaaccacggcttccacgagaagaccgccgccctgaagctggaggccgagggcgaggccatggaggacgccgccgcccccggcgacgacagaggcggcacccaggagcccgcccccgtgcccgccgagcccttcgacaacaccacctacaagaacctgcagcaccacgactacagcacctacaccttcctggacctgaacctggagctgagcaagttcagaatgccccagcccagcagcggcagagagagccccagacactag

SEQ ID NO: 207395 - protein, 1020 aa, Artificial Sequence
  derived and/or modified sequence
MMSFGGADALLGAPFAPLHGGGSLHYALARKGGAGGTRSAAGSSSGFHSWTRTSVSSVSASPSRFRGAGAASSTDSLDTLSNGPEGCMVAVATSRSEKEQLQALNDRFAGYIDKVRQLEAHNRSLEGEAAALRQQQAGRSAMGELYEREVREMRGAVLRLGAARGQLRLEQEHLLEDIAHVRQRLDDEARQREEAEAAARALARFAQEAEAARVDLQKKAQALQEECGYLRRHHQEEVGELLGQIQGSGAAQAQMQAETRDALKCDVTSALREIRAQLEGHAVQSTLQSEEWFRVRLDRLSEAAKVNTDAMRSAQEEITEYRRQLQARTTELEALKSTKDSLERQRSELEDRHQADIASYQEAIQQLDAELRNTKWEMAAQLREYQDLLNVKMALDIEIAAYRKLLEGEECRIGFGPIPFSLPEGLPKIPSVSTHIKVKSEEKIKVVEKSEKETVIVEEQTEETQVTEEVTEEEEKEAKEEEGKEEEGGEEEEAEGGEEETKSPPAEEAASPEKEAKSPVKEEAKSPAEAKSPEKEEAKSPAEVKSPEKAKSPAKEEAKSPPEAKSPEKEEAKSPAEVKSPEKAKSPAKEEAKSPAEAKSPEKAKSPVKEEAKSPAEAKSPVKEEAKSPAEVKSPEKAKSPTKEEAKSPEKAKSPEKEEAKSPEKAKSPVKAEAKSPEKAKSPVKAEAKSPEKAKSPVKEEAKSPEKAKSPVKEEAKSPEKAKSPVKEEAKTPEKAKSPVKEEAKSPEKAKSPEKAKTLDVKSPEAKTPAKEEARSPADKFPEKAKSPVKEEVKSPEKAKSPLKEDAKAPEKEIPKKEEVKSPVKEEEKPQEVKVKEPPKKAEEEKAPATPKTEEKKDSKKEEAPKKEAPKPKVEEKKEPAVEKPKESKVEAKKEEAEDKKKVPTPEKEAPAKVEVKEDAKPKEKTEVAKKEPDDAKAKEPSKPAEKKEAAPEKKDTKEEKAKKPEEKPKTEAKAKEDDKTLSKEPSKPKAEKAEKSSSTDQKDSKPPEKATEDKAAKGK

SEQ ID NO: 207396 - protein, 971 aa, Artificial Sequence
  derived and/or modified sequence
MMSFGGADALLGAPFAPLHGGGSLHYALARKGGAGGTRSAAGSSSGFHSWTRTSVSSVSASPSRFRGAGAASSTDSLDTLSNGPEGCMVAVATSRSEKEQLQALNDRFAGYIDKVRQLEAHNRSLEGEAAALRQQQAGRSAMGELYEREVREMRGAVLRLGAARGQLRLEQEHLLEDIAHVRQRLDDEARQREEAEAAARALARFAQEAEAARVDLQKKAQALQEECGYLRRHHQEEVGELLGQIQGSGAAQAQMQAETRDALKCDVTSALREIRAQLEGHAVQSTLQSEEWFRVRLDRLSEAAKVNTDAMRSAQEEITEYRRQLQARTTELEALKSTKDSLERQRSELEDRHQADIASYQEAIQQLDAELRNTKWEMAAQLREYQDLLNVKMALDIEIAAYRKLLEGEECRIGFGPIPFSLPEGLPKIPSVSTHIKVKSEEKIKVVEKSEKETVIVEEQTEETQVTEEVTEEEEKEAKEEEGKEEEGGEEEEAEGGEEETKSPPAEEAASPEKEAKSPVKEEAKSPAEAKSPEKEEAKSPAEVKSPEKAKSPAKEEAKSPPEAKSPEKEEAKSPAEVKSPEKAKSPAKEEAKSPAEAKSPEKAKSPVKEEAKSPAEAKSPVKEEAKSPAEVKSPEKAKSPTKEEAKSPEKAKSPEKEEAKSPEKAKSPVKAEAKSPEKAKSPVKAEAKSPEKAKSPVKEEAKSPEKAKSPVKEEAKSPEKAKSPVKEEAKTPEKAKSPVKEEAKSPEKAKSPLKEDAKAPEKEIPKKEEVKSPVKEEEKPQEVKVKEPPKKAEEEKAPATPKTEEKKDSKKEEAPKKEAPKPKVEEKKEPAVEKPKESKVEAKKEEAEDKKKVPTPEKEAPAKVEVKEDAKPKEKTEVAKKEPDDAKAKEPSKPAEKKEAAPEKKDTKEEKAKKPEEKPKTEAKAKEDDKTLSKEPSKPKAEKAEKSSSTDQKDSKPPEKATEDKAAKGK

SEQ ID NO: 207397 - protein, 121 aa, Artificial Sequence
  derived and/or modified sequence
MARRAGGARMFGSLLLFALLAAGVAPLSWDLPEPRSRASKIRVHSRGNLWATGHFMGKKSLEPSSPSPLGTAPHTSLRDQRLQLSHDLLGILLLKKALGVSLSRPAPQIQYRRLLVQILQK

SEQ ID NO: 207398 - DNA, 366 bp, Artificial Sequence
  derived and/or modified sequence
atggctcgtagagctggaggggcacgcatgttcgggtcactgcttctgtttgcactgctggccgctggagtggcccccctgtcttgggacctccctgaaccacgttcccgcgcctcaaagattagggtgcattcccgcgggaacctatgggccacggggcattttatgggaaaaaaaagtctagaaccatcttctccatcccctctcgggaccgcacctcatactagcctgcgggaccagcgcctgcagttgagccacgaccttctcgggattctgcttctcaagaaagctctgggcgtgagccttagcaggccagcgccacaaattcagtatcggcggcttttggtgcagatccttcaaaaatag

SEQ ID NO: 207399 - DNA, 366 bp, Artificial Sequence
  derived and/or modified sequence
atggccaggagagctggaggagccaggatgtttggcagcctgctgctgtttgccctgctggccgccggcgtggcccccctgtcctgggacctgcctgagcccaggagccgggccagcaagatccgggtgcacagccggggcaacctgtgggccaccggccacttcatgggcaagaagagcctggagcccagcagccccagccccctgggcacagccccccacaccagcctgcgggaccagaggctgcagctgagccatgacctgctgggcatcctgctgctgaagaaggccctgggcgtgtccctgagcaggcctgccccccagatccagtaccgccgcctgctggtgcagatcctgcagaagtag

SEQ ID NO: 207400 - DNA, 366 bp, Artificial Sequence
  derived and/or modified sequence
atggcccggcgggccggcggcgcccggatgttcggcagcctgctgctgttcgctctcctcgctgccggagtggcaccactgagctgggacctccctgaaccccgaagccgcgcatccaaaatccgcgttcactccagaggcaatctctgggctactggacactttatgggcaaaaaatctctggagccaagttctccgtcccccctcggcacagccccacacacgagcctccgcgaccagcggttacagctctcccatgacctgctaggcatactgctgttgaagaaggctctgggcgtttctctctctagacccgccccccagatccagtatcgccgcttactggttcagattctgcagaagtag

SEQ ID NO: 207401 - DNA, 366 bp, Artificial Sequence
  derived and/or modified sequence
atggccagaagggcgggaggcgctcggatgttcggctctttgttgttattcgctctcttggccgctggggtcgctcccctgagctgggatctgccagagccccgtagccgcgcatcgaaaatcagggtccactctcgagggaacctttgggcaaccggccactttatgggaaagaagagcctggaaccaagctccccgagccccctagggaccgcccctcacacttctcttagggatcagcgccttcagctgtcacacgatctgcttgggatacttctcctgaagaaagctctgggagtatccctgagtcgacctgctcctcagatccagtaccggaggctgttggtgcagatactgcaaaaatag

SEQ ID NO: 207402 - DNA, 366 bp, Artificial Sequence
  derived and/or modified sequence
atggccagaagagccggcggcgccagaatgttcggcagcctgctgctgttcgccctgctggccgccggcgtggcccccctgagctgggacctgcccgagcccagaagcagagccagcaagatcagagtgcacagcagaggcaacctgtgggccaccggccacttcatgggcaagaagagcctggagcccagcagccccagccccctgggcaccgccccccacaccagcctgagagaccagagactgcagctgagccacgacctgctgggcatcctgctgctgaagaaggccctgggcgtgagcctgagcagacccgccccccagatccagtacagaagactgctggtgcagatcctgcagaagtag

SEQ ID NO: 207403 - protein, 837 aa, Artificial Sequence
  derived and/or modified sequence
MAEPSQAPTPAPAAQPRPLQSPAPAPTPTPAPSPASAPIPTPTPAPAPAPAAAPAGSTGTGGPGVGSGGAGSGGDPARPGLSQQQRASQRKAQVRGLPRAKKLEKLGVFSACKANETCKCNGWKNPKPPTAPRMDLQQPAANLSELCRSCEHPLADHVSHLENVSEDEINRLLGMVVDVENLFMSVHKEEDTDTKQVYFYLFKLLRKCILQMTRPVVEGSLGSPPFEKPNIEQGVLNFVQYKFSHLAPRERQTMFELSKMFLLCLNYWKLETPAQFRQRSQAEDVATYKVNYTRWLCYCHVPQSCDSLPRYETTHVFGRSLLRSIFTVTRRQLLEKFRVEKDKLVPEKRTLILTHFPKFLSMLEEEIYGANSPIWESGFTMPPSEGTQLVPRPASVSAAVVPSTPIFSPSMGGGSNSSLSLDSAGAEPMPGEKRTLPENLTLEDAKRLRVMGDIPMELVNEVMLTITDPAAMLGPETSLLSANAARDETARLEERRGIIEFHVIGNSLTPKANRRVLLWLVGLQNVFSHQLPRMPKEYIARLVFDPKHKTLALIKDGRVIGGICFRMFPTQGFTEIVFCAVTSNEQVKGYGTHLMNHLKEYHIKHNILYFLTYADEYAIGYFKKQGFSKDIKVPKSRYLGYIKDYEGATLMECELNPRIPYTELSHIIKKQKEIIKKLIERKQAQIRKVYPGLSCFKEGVRQIPVESVPGIRETGWKPLGKEKGKELKDPDQLYTTLKNLLAQIKSHPSAWPFMEPVKKSEAPDYYEVIRFPIDLKTMTERLRSRYYVTRKLFVADLQRVIANCREYNPPDSEYCRCASALEKFFYFKLKEGGLIDK

SEQ ID NO: 207404 - DNA, 2514 bp, Artificial Sequence
  derived and/or modified sequence
atggcggagcccagccaagcgcccaccccggctccagctgcacagccccgacccttgcagtctcccgcccccgcgccgacccccacacccgccccttctcctgcatctgccccaattcctacgccgaccccagcaccagcacctgcccctgccgccgcccccgccggcagtacgggaactgggggcccgggcgtcggcagcggcggcgcaggctccggcggggatcctgctcggcctgggctgagtcagcagcaacgcgcctcacagcggaaagcccaggttaggggtctcccaagagcaaagaagctggaaaaactcggggtgttctctgcatgtaaggcaaatgagacatgcaagtgtaacggctggaagaatcccaagccaccaacggcccctcgcatggatctgcaacagcccgccgcaaatctctccgagctgtgcaggtcctgtgagcaccctcttgctgaccacgtcagccacttagagaatgtcagcgaggatgagatcaaccggcttctcgggatggtagtggacgtcgagaacctctttatgagcgtgcataaagaagaggacaccgacactaagcaggtttacttctacttgtttaagctgctgaggaagtgcattcttcaaatgacacgccctgttgtcgaaggttccctcggaagcccaccttttgaaaagcctaatatcgaacagggagtactcaattttgtccaatataagttcagtcacctcgccccgcgagagaggcagaccatgttcgaactgtctaagatgttcctcctgtgccttaattattggaagctcgaaaccccagcacagtttcggcagcgaagccaggccgaggatgttgcgacatacaaggtgaattatacaaggtggctgtgttattgccacgtgccacagtcttgtgactctctcccgaggtacgaaactacgcatgtgtttggacgttcgttattgagaagcatttttacggtaaccagacgacagctgctggagaagtttcgcgtcgagaaagacaagctcgtgccagagaagaggacgctaatcctaactcacttccctaaatttttgagcatgctggaggaggaaatctacggtgccaacagccctatctgggaatcagggttcactatgcctccatccgaaggtacccagctcgtacccagaccagctagtgtgtccgcggcggtggtgccaagcacacccatcttcagtcccagcatggggggcgggtccaactcctccttgagcctcgactccgccggagctgagccaatgccgggcgagaagaggacactcccagaaaacctgaccctcgaagatgcgaagcggctgcgggtgatgggggacatccccatggagctcgtcaatgaagttatgcttactataactgaccctgccgctatgctgggcccagaaacgagtctactatccgccaatgccgcacgcgatgagacagctcgcctggaagagaggaggggtattattgaattccacgtaatcgggaactccctgacgccgaaggctaacagacgagtactcctgtggctggtggggctccaaaacgtgttctctcaccagttaccccggatgcccaaagagtatattgcccggctggtgttcgacccgaagcataagacactcgctctgataaaggatggcagggttatcggcgggatctgtttccgaatgttccccacccagggatttaccgaaatcgtgttctgcgccgtgaccagtaacgagcaggtaaaaggatacggcacccacctcatgaatcacttaaaggagtaccatatcaagcacaacatcctgtactttctgacctatgctgacgagtacgccattggttactttaaaaagcagggctttagtaaagacattaaggtgcctaagtcacgatatctcgggtacatcaaggactatgagggtgccactctaatggaatgcgagctgaacccccgaatcccctatactgagctgagccacattattaagaaacagaaagagatcatcaaaaagcttattgagagaaaacaggcacagatccgaaaggtgtaccctgggttgtcgtgctttaaagaaggtgttagacagattccggtcgaatcagtgccaggaattagagagaccgggtggaaaccattgggcaaggagaaaggtaaggagttgaaggatcctgaccagctctacacaaccctcaagaacctcctggcccagattaaatcacacccttccgcctggccattcatggagcccgtcaaaaagagcgaagcacccgattactacgaggtgattagattccccatcgacctcaagaccatgaccgagagactgcggtctcggtactacgtgacacgaaagctattcgtggcagacctgcagagagtgatagctaactgtagggaatataatcccccagattccgaatattgtagatgtgcatccgcgctggagaaatttttctacttcaaactcaaagaggggggcctcatagacaagtag

SEQ ID NO: 207405 - DNA, 3109 bp, Artificial Sequence
  derived and/or modified sequence
ccatgcggccctagggctgggagcgcggcgccgctctccgctgcgggggaggccatggcggaaccttcccaggccccgaccccggccccggctgcgcagccccggccccttcagtccccagcccctgccccaactccgactcctgcacccagcccggcttcagccccgattccgactcccaccccggcaccagcccctgccccagctgcagccccagccggcagcacagggactggggggcccggggtaggaagtgggggggccgggagcgggggggatccggctcgacctggcctgagccagcagcagcgcgccagtcagaggaaggcgcaagtccgggggctgccgcgcgccaagaagcttgagaagctaggggtcttctcggcttgcaaggccaatgaaacctgtaagtgtaatggctggaaaaaccccaagccccccactgcaccccgcatggatctgcagcagccagctgccaacctgagtgagctgtgccgcagttgtgagcaccccttggctgaccacgtatcccacttggagaatgtgtcagaggatgagataaaccgactgctggggatggtggtggatgtggagaatctcttcatgtctgttcacaaggaagaggacacagacaccaagcaggtctatttctacctcttcaagctactgcggaaatgcatcctgcagatgacccggcctgtggtggaggggtccctgggcagccctccatttgagaaacctaatattgagcagggtgtgctgaactttgtgcagtacaagtttagtcacctggctccccgggagcggcagacgatgttcgagctctcaaagatgttcttgctctgccttaactactggaagcttgagacacctgcccagtttcggcagaggtctcaggctgaggacgtggctacctacaaggtcaattacaccagatggctctgttactgccacgtgccccagagctgtgatagcctcccccgctacgaaaccactcatgtctttgggcgaagccttctccggtccattttcaccgttacccgccggcagctgctggaaaagttccgagtggagaaggacaaattggtgcccgagaagaggaccctcatcctcactcacttccccaaattcctgtccatgctggaggaggagatctatggggcaaactctccaatctgggagtcaggcttcaccatgccaccctcagaggggacacagctggttccccggccagcttcagtcagtgcagcggttgttcccagcacccccatcttcagccccagcatgggtgggggcagcaacagctccctgagtctggattctgcaggggccgagcctatgccaggcgagaagaggacgctcccagagaacctgaccctggaggatgccaagcggctccgtgtgatgggtgacatccccatggagctggtcaatgaggtcatgctgaccatcactgaccctgctgccatgctggggcctgagacgagcctgctttcggccaatgcggcccgggatgagacagcccgcctggaggagcgccgcggcatcatcgagttccatgtcatcggcaactcactgacgcccaaggccaaccggcgggtgttgctgtggctcgtggggctgcagaatgtcttttcccaccagctgccgcgcatgcctaaggagtatatcgcccgcctcgtctttgacccgaagcacaagactctggccttgatcaaggatgggcgggtcatcggtggcatctgcttccgcatgtttcccacccagggcttcacggagattgtcttctgtgctgtcacctcgaatgagcaggtcaagggttatgggacccacctgatgaaccacctgaaggagtatcacatcaagcacaacattctctacttcctcacctacgccgacgagtacgccatcggctacttcaaaaagcagggtttctccaaggacatcaaggtgcccaagagccgctacctgggctacatcaaggactacgagggagcgacgctgatggagtgtgagctgaatccccgcatcccctacacggagctgtcccacatcatcaagaagcagaaagagatcatcaagaagctgattgagcgcaaacaggcccagatccgcaaggtctacccggggctcagctgcttcaaggagggcgtgaggcagatccctgtggagagcgttcctggcattcgagagacaggctggaagccattggggaaggagaaggggaaggagctgaaggaccccgaccagctctacacaaccctcaaaaacctgctggcccaaatcaagtctcaccccagtgcctggcccttcatggagcctgtgaagaagtcggaggcccctgactactacgaggtcatccgcttccccattgacctgaagaccatgactgagcggctgcgaagccgctactacgtgacccggaagctctttgtggccgacctgcagcgggtcatcgccaactgtcgcgagtacaaccccccggacagcgagtactgccgctgtgccagcgccctggagaagttcttctacttcaagctcaaggagggaggcctcattgacaagtaggcccatctttgggccgcagccctgacctggaatgtctccacctcggattctgatctgatccttagggggtgccctggccccacggacccgactcagcttgagacactccagccaagggtcctccggacccgatcctgcagctctttctggaccttcaggcacccccaagcgtgcagctctgtcccagccttcactgtgtgtgagaggtctcctgggttggggcccagcccctctagagtagctggtggccagggatgaaccttgcccagccgtggtggcccccaggcctggtccccaagagctttggaggcttggattcctgggcctggcccaggtggctgtttccctgaggaccagaactgctcattttagcttgagtgatggcttcaggggttggaagttcagcccaaactgaagggggccatgccttgtccagcactgttctgtcagtctcccccaggggtggggggtatggggaccattcattccctggcattaatcccttagagggaataataaagctttttatttctctgtgtga

SEQ ID NO: 207406 - DNA, 2514 bp, Artificial Sequence
  derived and/or modified sequence
atggccgagcccagccaggcccccaccccagccccagctgcccagccccggcccctgcagagccctgccccagcccccacccccaccccagcccccagccctgccagcgcccccatccccacccccaccccagccccagccccagccccagctgctgccccagctggcagcacaggcaccggcggccctggggtgggcagcggcggggccggcagcggcggggaccctgcccggcccggcctgagccagcagcagagggccagccagaggaaggcccaggtgcggggcctgccccgggccaagaagctggagaagctgggcgtcttcagcgcctgcaaggccaatgagacctgcaagtgcaatggctggaagaaccccaagccacccacagcccccaggatggacctgcagcagcctgctgccaacctgtctgagctgtgccgcagctgtgagcaccccctggccgaccacgtgagccacctggagaatgtgtctgaagatgagatcaaccggctgctgggcatggtggtggatgtggagaacctcttcatgtctgtgcacaaggaggaggacacagacaccaagcaggtgtacttctacctgttcaagctgctgaggaagtgcatcctgcagatgaccaggcctgtggtggagggcagcctgggcagccccccatttgagaagcccaacatcgagcagggcgtgctgaactttgtgcagtacaagttcagccacctggccccccgggagcggcagaccatgtttgagctgagcaagatgttcctgctgtgcctgaactactggaagctggagaccccagcccagttccggcagaggagccaggctgaagatgtggccacctacaaggtgaactacacccgctggctgtgctactgccacgtgccccagagctgtgacagcctgcccaggtatgagaccacccacgtgtttggccgcagcctgctgcggagcatcttcaccgtgacccggcggcagctgctggagaagttccgggtggagaaggacaagctggtgcctgagaagaggaccctcatcctgacccacttccccaagttcctgtccatgctggaggaggagatctacggggccaacagccccatctgggagagcggcttcaccatgccacccagcgagggcacccagctggtgcccaggcctgcctctgtgtctgctgctgtggtgcccagcacccccatcttcagccccagcatgggcggcggcagcaacagcagcctgagcctggacagcgctggagctgagcccatgcctggagagaagaggaccctgcctgagaacctgaccctggaggatgccaagaggctgcgggtgatgggagacatccccatggagctggtgaatgaggtgatgctgaccatcacagatcctgctgccatgctgggccctgagaccagcctgctgagcgccaatgctgccagagatgaaacagcccggctggaggagcggcggggcatcatcgagttccacgtgattggcaacagcctgacccccaaggccaacagaagagtgctgctgtggctggtgggcctgcagaatgtgttcagccaccagctgcccaggatgcccaaggagtacatcgcccggctggtgtttgaccccaagcacaagaccctggccctgatcaaggatggccgggtcatcggcggcatctgcttcaggatgttccccacccagggcttcacagagatcgtgttctgtgctgtgaccagcaatgagcaggtgaagggctacggcacccacctgatgaaccacctgaaggagtaccacatcaagcacaacatcctgtacttcctgacctatgcagatgaatatgccatcggctacttcaagaagcagggcttcagcaaggacatcaaggtgcccaagagccgctacctgggctacatcaaggactatgaaggagccaccctgatggagtgtgagctgaacccccgcatcccctacacagagctgagccacatcatcaagaagcagaaggagatcatcaagaagctgattgaaaggaagcaggcccagatcaggaaggtgtacccaggcctgagctgcttcaaggagggcgtgcggcagatccctgtggagagcgtgcccggcatccgggagaccggctggaagcccctgggcaaggagaagggcaaggagctgaaggaccctgaccagctgtacaccaccctgaagaacctgctggcccagatcaagagccaccccagcgcctggcccttcatggagcctgtgaagaagtctgaggccccagactactatgaggtgatccgcttccccatcgacctgaagaccatgacagagcggctgcggagccgctactacgtgaccaggaagctgtttgtggccgacctgcagagggtgattgccaactgccgggagtacaaccccccagacagcgagtactgccgctgtgccagcgccctggagaagttcttctacttcaagctgaaggagggcggcctgattgacaagtag

SEQ ID NO: 207407 - DNA, 2514 bp, Artificial Sequence
  derived and/or modified sequence
atggccgagcccagccaggcccccacccccgcccccgccgcccagccacgtccactccaaagccctgccccagctccgaccccaacaccagccccctccccagctagcgcacctattcccactcccactccagcgcccgcacctgcacctgccgcggcccctgcagggtccaccggaaccggaggtccgggagtggggtcggggggggccggctcaggcggcgatccagccagacccggactgtcacagcagcaacgtgccagtcagcgtaaggcccaggtgcgagggctgccccgggcaaaaaagctggagaaactcggggtgttcagcgcttgtaaggcaaacgagacttgcaaatgtaatggttggaagaaccctaagccacccaccgcgccccggatggaccttcaacagcccgccgccaacttaagcgagctctgcagaagctgcgagcatcccctggctgatcacgtcagtcacttagagaatgtgtcggaagacgaaatcaatcggctccttggcatggtagtggatgtcgagaatctcttcatgtccgttcacaaggaggaggacacagacaccaaacaagtctatttctaccttttcaaactacttaggaaatgtatccttcagatgactaggccagtcgtggagggaagtcttggctccccgccattcgagaagccaaacatagagcagggggtactgaactttgtgcagtacaaattttctcacctggctccaagagagaggcagactatgttcgaactgtcaaagatgtttctcctgtgcctcaattattggaagttagaaaccccagcccagttcaggcagcgctcacaggcagaagatgtggcaacctacaaggttaactacaccagatggttgtgctactgccacgtgcctcaatcctgtgactcattgccacggtatgagaccacccacgtctttggcagaagccttctgcggagcatttttacagttactcggcgacagctattggagaagttcagggttgagaaagacaaattagtgccggaaaagcggaccctgatcctgactcactttcccaaatttctcagcatgctggaggaggagatctacggggccaatagccccatttgggaatccggctttacaatgcccccttcggaggggacccagctggtgccacgtcccgcatctgtgagcgcagcagtggtcccaagtacacctattttctcccccagcatgggaggcggatctaactcgtccctgagcctggattctgctggcgccgaaccaatgcctggcgaaaaaaggactttgcctgagaacctgaccttggaggacgctaaacgactgcgcgtcatgggcgacatacctatggagctggtgaacgaagtgatgctgacaattaccgacccagccgccatgttgggccctgagacaagtctactaagcgccaatgcggcccgagacgaaactgccagacttgaggaacgtcgcggtataattgagttccacgttataggcaattcactgacgcctaaagccaaccgaagagtgctactgtggcttgtcggactccagaacgtcttttcccatcaacttccacgcatgcctaaagagtatatcgcccgcctggtgttcgaccccaagcataagacattagcactgataaaagatgggcgggttattggaggcatctgcttccgtatgttcccaacccagggcttcactgagatcgtgttttgtgcggtgacctctaacgagcaagtgaagggatatggtacccaccttatgaatcacctgaaggaatatcatattaagcacaatattttatactttctgacatacgcagatgagtatgctatcggttattttaaaaaacagggcttctccaaggacattaaggtccccaagtcacgttatttgggatatattaaagattatgaaggcgcaacactgatggagtgtgagctgaatccgagaatcccatacaccgaactgtctcacatcattaagaagcagaaagaaatcataaaaaagttgatcgagcgaaagcaagcccagatccggaaggtgtacccgggtctgtcatgtttcaaggaaggagtgcggcagatcccagtggagagtgtgcccgggatccgggagactggctggaagcccttaggaaaggagaaaggcaaagaattaaaggatcccgaccagctctacaccaccctgaaaaatttgctcgcccagattaagtcgcatccatctgcttggccgtttatggaacccgtcaagaagtctgaggcacctgactattacgaggtcattagatttccaatagacctcaagactatgaccgaacgcctccggtcccgctattacgtaacccggaaactctttgtagcggatctgcagcgtgtcatcgccaattgccgggaatacaaccctccggatagcgagtactgcaggtgtgcatctgcattagagaaattcttctacttcaagctcaaagagggaggcctgatagacaaatag

SEQ ID NO: 207408 - DNA, 2514 bp, Artificial Sequence
  derived and/or modified sequence
atggctgagcctagtcaggctcccacccccgctcccgctgctcagccacgtcctctacagagccctgcgccagcgcctactcccacgccggcaccctctcccgcatcagctccaattcccacaccaacacctgctccagccccagcacctgccgctgcccctgcaggatccacaggcacaggcggacccggagtcgggtccggcggagcaggatccgggggagaccccgctaggcccggattgagccagcagcagagagcctcacagcggaaggcacaggtccgaggcctccctcgagctaaaaaattggagaaactgggcgtgttttcagcttgcaaggctaatgaaacctgtaaatgtaacggctggaaaaaccctaagcccccaaccgccccacgaatggatctgcagcagccagccgcaaacctctcggagctctgccgatcctgcgaacatcctctggccgatcacgtgagtcacctagagaacgtgagtgaagacgaaatcaatagattgctggggatggtggtcgatgtcgaaaacctttttatgtccgtgcacaaagaggaagacacggatactaagcaggtctacttttaccttttcaagctgcttcggaagtgtatcctgcagatgacccgcccagttgtggagggatctctagggagcccacctttcgagaaacccaacatcgagcagggggtgcttaacttcgtccagtacaagttttctcacctggcgcctcgggaacgccagaccatgtttgagctcagcaaaatgttcttgttatgcctcaattactggaaattagaaacacccgctcagtttagacagaggtctcaggctgaggacgtggctacatataaggtaaactataccagatggttgtgttactgccacgtgcctcagagctgcgatagtctccctcgctatgaaaccactcatgtattcggcagatcccttctccgctccatcttcacggtgaccaggcgccagttactggagaagttcagagtggagaaagacaagttggtacctgaaaagcggaccctgatcctgacgcatttcccaaagttcctgtctatgctagaagaggagatctatggggcaaacagcccaatttgggaatccggctttactatgcccccatccgaagggacccaactggtgcccagacctgcctcggtctcagcagccgtggttcctagcacccctatcttcagtcccagcatgggtggcggatccaactcctccctaagtttagattctgcaggcgctgaaccaatgcctggggaaaaaaggactctgcccgaaaacttgactctggaggacgctaaaaggctccgggtgatgggcgatattcccatggagttagtaaacgaggtcatgctgaccatcacggaccccgcagccatgcttgggccagaaacctccttattgtctgctaacgcggctcgagacgagaccgctcgcctggaggagaggcgtggcatcatcgagttccatgtaatcggcaattccctcactcccaaggctaaccgacgcgtcctgctctggttggtcgggttgcagaatgtattctcgcaccagttacctcggatgcccaaagagtacattgctaggctcgtgttcgatcctaaacacaaaacactggcgctcatcaaagatggtagggtcatcggcggaatctgcttcaggatgtttccgactcagggcttcaccgagatcgtgttttgcgcagtcacttccaatgagcaagtgaagggatacggcacccacctgatgaatcatttgaaggaatatcatatcaagcacaacatcttgtacttcctcacgtatgccgatgagtacgccattgggtattttaaaaagcaggggttctctaaggatataaaggtgcccaagagtagatacctaggttatattaaggattacgagggggctaccctcatggaatgtgaacttaatcccaggatcccctacaccgagctgagtcatattatcaaaaagcagaaggagattataaaaaagctaatcgagcgcaagcaagcacagatccggaaggtgtaccccggactgagctgtttcaaggagggggtcaggcagatacccgtcgagagcgtaccagggataagagaaacagggtggaagccgttgggtaaggagaagggtaaagaactgaaggatcccgatcaactatatactaccctcaagaatctcctcgcgcagatcaaatcccatcccagtgcctggcctttcatggaaccagttaaaaagagtgaagccccagactattatgaagttatacgttttcccattgacctgaaaaccatgacggagaggctgagaagtagatactatgtgactcggaaactttttgtagccgatctgcagcgcgtgatcgcgaactgtcgggagtacaatcccccagacagcgaatactgtcggtgcgccagtgcacttgaaaagtttttttattttaaactgaaggaggggggtctgatcgataagtag

SEQ ID NO: 207409 - DNA, 2514 bp, Artificial Sequence
  derived and/or modified sequence
atggccgagcccagccaggcccccacccccgcccccgccgcccagcccagacccctgcagagccccgcccccgcccccacccccacccccgcccccagccccgccagcgcccccatccccacccccacccccgcccccgcccccgcccccgccgccgcccccgccggcagcaccggcaccggcggccccggcgtgggcagcggcggcgccggcagcggcggcgaccccgccagacccggcctgagccagcagcagagagccagccagagaaaggcccaggtgagaggcctgcccagagccaagaagctggagaagctgggcgtgttcagcgcctgcaaggccaacgagacctgcaagtgcaacggctggaagaaccccaagccccccaccgcccccagaatggacctgcagcagcccgccgccaacctgagcgagctgtgcagaagctgcgagcaccccctggccgaccacgtgagccacctggagaacgtgagcgaggacgagatcaacagactgctgggcatggtggtggacgtggagaacctgttcatgagcgtgcacaaggaggaggacaccgacaccaagcaggtgtacttctacctgttcaagctgctgagaaagtgcatcctgcagatgaccagacccgtggtggagggcagcctgggcagcccccccttcgagaagcccaacatcgagcagggcgtgctgaacttcgtgcagtacaagttcagccacctggcccccagagagagacagaccatgttcgagctgagcaagatgttcctgctgtgcctgaactactggaagctggagacccccgcccagttcagacagagaagccaggccgaggacgtggccacctacaaggtgaactacaccagatggctgtgctactgccacgtgccccagagctgcgacagcctgcccagatacgagaccacccacgtgttcggcagaagcctgctgagaagcatcttcaccgtgaccagaagacagctgctggagaagttcagagtggagaaggacaagctggtgcccgagaagagaaccctgatcctgacccacttccccaagttcctgagcatgctggaggaggagatctacggcgccaacagccccatctgggagagcggcttcaccatgccccccagcgagggcacccagctggtgcccagacccgccagcgtgagcgccgccgtggtgcccagcacccccatcttcagccccagcatgggcggcggcagcaacagcagcctgagcctggacagcgccggcgccgagcccatgcccggcgagaagagaaccctgcccgagaacctgaccctggaggacgccaagagactgagagtgatgggcgacatccccatggagctggtgaacgaggtgatgctgaccatcaccgaccccgccgccatgctgggccccgagaccagcctgctgagcgccaacgccgccagagacgagaccgccagactggaggagagaagaggcatcatcgagttccacgtgatcggcaacagcctgacccccaaggccaacagaagagtgctgctgtggctggtgggcctgcagaacgtgttcagccaccagctgcccagaatgcccaaggagtacatcgccagactggtgttcgaccccaagcacaagaccctggccctgatcaaggacggcagagtgatcggcggcatctgcttcagaatgttccccacccagggcttcaccgagatcgtgttctgcgccgtgaccagcaacgagcaggtgaagggctacggcacccacctgatgaaccacctgaaggagtaccacatcaagcacaacatcctgtacttcctgacctacgccgacgagtacgccatcggctacttcaagaagcagggcttcagcaaggacatcaaggtgcccaagagcagatacctgggctacatcaaggactacgagggcgccaccctgatggagtgcgagctgaaccccagaatcccctacaccgagctgagccacatcatcaagaagcagaaggagatcatcaagaagctgatcgagagaaagcaggcccagatcagaaaggtgtaccccggcctgagctgcttcaaggagggcgtgagacagatccccgtggagagcgtgcccggcatcagagagaccggctggaagcccctgggcaaggagaagggcaaggagctgaaggaccccgaccagctgtacaccaccctgaagaacctgctggcccagatcaagagccaccccagcgcctggcccttcatggagcccgtgaagaagagcgaggcccccgactactacgaggtgatcagattccccatcgacctgaagaccatgaccgagagactgagaagcagatactacgtgaccagaaagctgttcgtggccgacctgcagagagtgatcgccaactgcagagagtacaacccccccgacagcgagtactgcagatgcgccagcgccctggagaagttcttctacttcaagctgaaggagggcggcctgatcgacaagtag

SEQ ID NO: 207410 - protein, 496 aa, Artificial Sequence
  derived and/or modified sequence
MADESETAVKPPAPPLPQMMEGNGNGHEHCSDCENEEDNSYNRGGLSPANDTGAKKKKKKQKKKKEKGSETDSAQDQPVKMNSLPAERIQEIQKAIELFSVGQGPAKTMEEASKRSYQFWDTQPVPKLGEVVNTHGPVEPDKDNIRQEPYTLPQGFTWDALDLGDRGVLKELYTLLNENYVEDDDNMFRFDYSPEFLLWALRPPGWLPQWHCGVRVVSSRKLVGFISAIPANIHIYDTEKKMVEINFLCVHKKLRSKRVAPVLIREITRRVHLEGIFQAVYTAGVVLPKPVGTCRYWHRSLNPRKLIEVKFSHLSRNMTMQRTMKLYRLPETPKTAGLRPMETKDIPVVHQLLTRYLKQFHLTPVMSQEEVEHWFYPQENIIDTFVVENANGEVTDFLSFYTLPSTIMNHPTHKSLKAAYSFYNVHTQTPLLDLMSDALVLAKMKGFDVFNALDLMENKTFLEKLKFGIGDGNLQYYLYNWKCPSMGAEKVGLVLQ

SEQ ID NO: 207411 - protein, 137 aa, Artificial Sequence
  derived and/or modified sequence
MADESETAVKPPAPPLPQMMEGNGNGHEHCSDCENEEDNSYNRGGLSPANDTGAKKKKKKQKKKKEKGSETDSAQDQPVKMNSLPAERIQEIQKAIELFSVGQGPAKTMEEASKRSYQFWDTQPVPKLAKRTVHPPE

SEQ ID NO: 207412 - DNA, 1491 bp, Artificial Sequence
  derived and/or modified sequence
atggcagacgagtcagagaccgccgtgaaaccccccgcccctcctttgccacagatgatggagggtaacgggaacggacacgagcattgctccgattgtgaaaatgaggaggacaacagctacaatagaggaggcctcagccccgccaatgatacgggcgccaagaaaaagaagaagaaacagaagaagaagaaagagaagggatccgaaaccgacagcgcccaggatcaaccagtcaaaatgaatagtctcccggcagaacgcatccaggagattcagaaagccatagaactgttttctgtgggccagggtcccgcaaagacgatggaggaagccagcaagagatcctaccaattttgggacacccagcccgtgccgaaattaggagaagtcgtgaacacccacggaccggtcgaaccggacaaagataatataagacaggaaccatatacactcccccagggctttacatgggacgcactagacctgggggaccggggagtactcaaagaactctacaccttgctgaatgagaattacgtcgaggatgacgataacatgttcaggtttgactatagccccgagttcctgctctgggccctaagaccacccgggtggctgccgcagtggcactgcggcgttcgtgtggtttcaagccggaagctggtgggcttcatctccgctattccggccaacattcatatatatgatactgaaaagaagatggtggaaatcaactttttgtgcgttcataaaaaattaagatctaaaagggtggcccccgttctcatccgagaaattacaagacgagttcacctcgaagggattttccaggcagtctataccgcaggagtagtcctcccgaaacccgtgggcacatgtcggtattggcaccgctcccttaacccccggaagcttatagaagtgaagtttagtcacttatcccggaacatgaccatgcaacggaccatgaaactgtatcgcttgcccgagacaccaaaaacagccggcctgagacccatggagactaaggacattccagtggtgcaccagctcctgactcggtacctaaagcagtttcaccttaccccagtaatgtcgcaggaggaggtggaacattggttttaccctcaggaaaatatcatagatacattcgttgtggaaaatgcgaatggagaggtaactgacttcctgtccttctataccctcccctcaactatcatgaatcatcctactcacaagtctctgaaggcagcttactcattttataacgtgcacacacagacccccctacttgacctcatgtcagacgccctggtactcgccaaaatgaaaggctttgacgtatttaatgctctggatctgatggagaacaagacgttcctggagaagctgaagttcggtatcggtgatggaaatttgcagtactacctatataactggaagtgcccttctatgggtgccgagaaagtcggcttggtcctccagtag

SEQ ID NO: 207413 - DNA, 414 bp, Artificial Sequence
  derived and/or modified sequence
atggccgatgagtcggaaacagccgtgaagccaccagcccctccactccctcagatgatggaaggcaatgggaacggacatgagcattgcagcgactgcgaaaacgaagaagacaattcttataacaggggcgggctgagccctgcaaacgacactggcgcaaaaaaaaagaagaaaaagcagaagaagaagaaggaaaaagggagtgagaccgattccgcacaggaccagcctgtgaaaatgaacagcctgcccgctgagcggatccaggagatccagaaggccatcgagctgttctccgtgggacaggggccagcaaagacaatggaggaggcctccaagagatcgtatcagttttgggacactcagcccgtccccaaacttgccaagaggaccgtgcaccctcccgaatag

SEQ ID NO: 207414 - DNA, 1491 bp, Artificial Sequence
  derived and/or modified sequence
atggcggacgagtccgagaccgctgtgaagccccccgccccgccattgcctcagatgatggaggggaatggcaatggacacgagcactgctccgattgcgaaaacgaggaagacaattcctataacaggggagggctctcccccgctaatgacactggggccaaaaaaaagaagaaaaagcagaaaaaaaagaaggagaaagggagcgagactgatagtgcgcaggaccagccagtgaagatgaattccctgcctgcagagcgaatccaggaaatccagaaagccatcgaacttttctcagtggggcagggccccgctaaaaccatggaggaggctagcaagcggtcatatcaattctgggatacgcagccggtgccgaagctcggggaagtggttaacacacacggccctgtggagccggacaaggacaatataagacaagaaccttacactctgcctcagggctttacatgggacgccctcgacctgggggaccggggcgtgcttaaagagctgtatactttattaaacgaaaattacgtggaggatgacgacaacatgttccggtttgactactcccccgagttcctgctgtgggctctcaggccccctggatggctcccgcaatggcactgtggggttcgcgtcgtgtcttcccggaaactggtgggatttatctcagccatcccagcgaatatccacatctatgatactgagaaaaaaatggtagaaatcaactttctctgtgttcataagaagctgcgctctaagagggtcgcgccagtgctgatccgggagattactcgaagggtgcatctagaggggatctttcaggcagtgtatactgccggagtcgtgctgcctaagccagtcggcacctgcagatattggcaccgatcacttaatcctagaaagctcatcgaggtgaagttctcgcacctgtcccggaatatgacgatgcaacggacaatgaaactctaccgcctgcctgaaaccccaaagactgcgggccttcggcctatggagactaaggatatccctgtcgtccaccaactgctaacacgatacctcaaacagtttcatctgactcctgttatgtctcaggaagaagttgagcactggttttaccctcaagagaatattatcgacacatttgtggtggaaaacgctaacggcgaggtgaccgatttcttgtccttttacacgttgcctagcaccattatgaaccacccaactcataagtccctgaaagccgcatattctttctacaacgtccatacacaaactcccctgctggacttaatgagtgacgcactggtactggctaaaatgaaaggattcgacgtcttcaatgctttggatcttatggagaataagacattcctagaaaaactgaagttcggtatcggcgacggaaacttacagtactatctgtacaattggaagtgtccatctatgggcgcagaaaaagttgggctcgtgttacagtag

SEQ ID NO: 207415 - DNA, 1491 bp, Artificial Sequence
  derived and/or modified sequence
atggctgatgaaagtgaaacagctgtgaagcccccagccccacccctgccccagatgatggagggcaatggaaatggacatgagcactgcagcgactgtgaaaatgaggaggacaacagctacaacagaggaggcctgagccctgccaatgacaccggggccaagaagaagaagaagaagcagaagaagaagaaggagaagggcagcgagacagattctgcccaggaccagcctgtgaagatgaacagcctgcctgctgagcgcatccaggagatccagaaggccatcgagctgttctctgtgggccagggccctgccaagaccatggaggaggccagcaagaggagctaccagttctgggacacccagcctgtgcccaagctgggggaggtggtgaacacccacggccctgtggagccagacaaggacaacatccggcaggagccctacaccctgccccagggcttcacctgggatgccctggacctgggggacagaggagtgctgaaggagctgtacaccctgctgaatgaaaactacgtggaggatgatgacaacatgttccgctttgactacagccctgagttcctgctgtgggccctgcggcccccaggctggctgccccagtggcactgcggcgtgcgggtggtgagcagcaggaagctggtgggcttcatcagcgccatcccagccaacatccacatctatgacacagagaagaagatggtggagatcaacttcctgtgtgtgcacaagaagctgcggagcaagagggtggcccctgtgctgatccgggagatcaccaggagagtgcacctggagggcatcttccaggccgtgtacacagctggggtggtgctgcccaagcctgtgggcacctgccgctactggcacaggagcctgaaccccaggaagctgattgaggtgaagttcagccacctgagcaggaacatgaccatgcagaggaccatgaagctgtaccgcctgcctgagacccccaagacagctggcctgcggcccatggagaccaaggacatccctgtggtgcaccagctgctgacccgctacctgaagcagttccacctgacccctgtgatgagccaggaggaggtggagcactggttctacccccaggagaacatcatcgacacctttgtggtggagaatgccaatggagaggtgacagacttcctgtccttctacaccctgcccagcaccatcatgaaccaccccacccacaagagcctgaaggccgcctacagcttctacaacgtgcacacccagacccccctgctggacctgatgtctgatgccctggtgctggccaagatgaagggctttgatgtgttcaatgccctggacctgatggagaacaagaccttcctggagaagctgaagtttggaattggagatggcaacctgcagtactacctgtacaactggaagtgccccagcatgggcgctgagaaggtgggcctggtgctgcagtag

SEQ ID NO: 207416 - DNA, 414 bp, Artificial Sequence
  derived and/or modified sequence
atggctgatgaaagtgaaacagctgtgaagcccccagccccacccctgccccagatgatggagggcaatggaaatggacatgagcactgcagcgactgtgaaaatgaggaggacaacagctacaacagaggaggcctgagccctgccaatgacaccggggccaagaagaagaagaagaagcagaagaagaagaaggagaagggcagcgagacagattctgcccaggaccagcctgtgaagatgaacagcctgcctgctgagcgcatccaggagatccagaaggccatcgagctgttctctgtgggccagggccctgccaagaccatggaggaggccagcaagaggagctaccagttctgggacacccagcctgtgcccaagctggccaagaggacagtgcaccccccagagtag

SEQ ID NO: 207417 - DNA, 1491 bp, Artificial Sequence
  derived and/or modified sequence
atggccgacgagagcgagaccgccgtgaagccccccgccccccccctgccacaaatgatggaaggcaacggcaatgggcacgaacattgttccgactgtgagaatgaggaggacaattcatacaaccgcggcggtctctcacctgccaacgatacaggcgccaagaagaagaagaagaagcagaaaaaaaaaaaggagaagggcagcgagaccgattctgcccaggatcagcccgtcaagatgaacagcctgccagccgaacgcatccaggagatacaaaaggctattgagctatttagtgtgggccagggccccgcgaaaacaatggaagaagctagtaaacgctcataccagttctgggatacccagccagtgcctaaacttggggaggttgtgaacacacacggaccagtcgagccagacaaagacaacattcgccaggagccatacaccctccctcagggcttcacttgggatgctctggatttaggcgaccgtggcgtgttaaaggaactgtatacactgttaaatgaaaactacgtagaggacgacgacaatatgtttagattcgattattctcccgaatttttgctttgggccctgagacctccagggtggctgcctcaatggcactgtggcgtcagggtggtttcttctagaaagttggttgggttcatcagtgccatcccagccaacattcatatctacgataccgagaagaaaatggtggagatcaactttctgtgtgtgcacaagaaattgaggtcaaaacgtgtcgcccctgtgctgatacgagaaattactcgccgcgtgcatttggagggcatttttcaggccgtctacacggccggcgtcgtgttgccaaagccagtggggacttgtagatattggcacagatccctgaacccccgcaagctcatcgaggtgaagttttcgcacctgagtcgtaatatgactatgcagagaaccatgaagctctacaggttgcctgaaactcccaagacagccggcctacggccaatggagacgaaggatatcccagtcgttcatcagctgctgaccaggtaccttaaacagttccatctcacacccgtcatgtcccaagaggaagttgaacactggttctacccccaggaaaacatcatcgatacatttgtggtggagaatgcgaatggagaggttactgatttcctatcattctacacgcttccgtcaacgatcatgaaccacccaacccataaatctttaaaggccgcttattcgttctataacgttcacacacagacgccgctcctggatctgatgagcgacgcactagtgctggcaaagatgaaaggcttcgacgtgtttaatgctttagacctgatggaaaataaaacatttctagaaaaactgaaattcggtattggagacgggaatctgcagtattacttgtataactggaagtgtccttccatgggcgccgagaaagttgggctcgttctgcagtag

SEQ ID NO: 207418 - DNA, 414 bp, Artificial Sequence
  derived and/or modified sequence
atggccgacgagagcgagaccgccgtgaagccccccgccccccccttgccccagatgatggagggcaatggcaacggacacgaacactgctccgactgcgagaatgaggaggacaattcgtacaacagagggggactgtcaccagcaaacgatacgggagctaagaaaaagaagaagaagcagaaaaagaagaaggagaaaggaagtgagacagatagtgctcaggaccagccagtcaagatgaattccctgccagccgaaagaattcaggaaatacagaaagctatcgaactcttctccgttggccaggggccagccaaaaccatggaagaagccagtaagcgctcttatcaattctgggacactcaaccggttcctaagctcgcaaagcgcactgttcacccacctgagtag

SEQ ID NO: 207419 - DNA, 1491 bp, Artificial Sequence
  derived and/or modified sequence
atggccgacgagagcgagaccgccgtgaagccccccgccccccccctgcctcagatgatggagggaaatggcaatgggcatgagcactgtagtgactgcgagaatgaggaggacaattcatataatagaggagggctgagccccgcaaatgataccggtgctaagaaaaaaaaaaagaagcagaagaagaagaaggaaaaaggctccgagaccgattccgctcaagatcagcctgtcaaaatgaacagtctgcccgccgagcggattcaggaaattcagaaggcaattgagttgttttcagtcggtcaaggaccggctaaaactatggaagaggcgagcaagcgatcttaccagttctgggacactcagccggtgcccaaactaggcgaagtcgtgaatacccatgggcccgtcgaacccgacaaagacaatataagacaagaaccatacaccctgccccaggggtttacttgggacgccctcgaccttggggatagaggggtcctgaaggagctgtacaccctgcttaacgagaattacgtggaagacgatgacaacatgtttcggtttgattactctcccgaatttctgttatgggcgcttagacctcccgggtggctgcctcagtggcactgcggagtccgagtggtaagcagccggaaattggtaggattcatttcagctattccggcgaacattcatatttacgacaccgagaagaagatggtcgaaatcaattttttatgtgttcataagaaactcagatccaagagagtggcccctgttctgattagagaaattacccgaagggttcaccttgagggaatattccaggctgtgtataccgccggagtggtgctccctaagccagtgggcacctgccggtattggcatagatcacttaacccaaggaaacttatcgaggtgaaatttagtcacctgagccgcaatatgactatgcagaggaccatgaagttatacaggctgcccgagaccccgaaaaccgctggcctgcgacctatggaaacaaaagacatccccgtggtgcaccaactgctcaccagatatctaaagcaattccaccttacaccagtgatgagccaggaggaagtggaacactggttctaccctcaggaaaacattatcgacacgtttgttgtggagaacgctaacggtgaggttacagattttctgtctttctacaccctcccatctactatcatgaaccatccgacacacaagtccttaaaagcagcctattctttttacaacgtacacacacagactccattgctcgaccttatgtcagacgcgcttgtgctcgccaagatgaaaggttttgacgtctttaacgcgttagatctgatggaaaacaagacgtttctggaaaagctcaagtttggtatcggagatggcaatctgcagtattacctctacaactggaaatgcccttctatgggtgccgaaaaggtcggtttggtcctgcagtag

SEQ ID NO: 207420 - DNA, 4879 bp, Artificial Sequence
  derived and/or modified sequence
ctgctctcgcaactcaagatggcggacgagagtgagacagcagtgaagccgccggcacctccgctgccgcagatgatggaagggaacgggaacggccatgagcactgcagcgattgcgagaatgaggaggacaacagctacaaccggggtggtttgagtccagccaatgacactggagccaaaaagaagaaaaagaaacaaaaaaagaagaaagaaaaaggcagtgagacagattcagcccaggatcagcctgtgaagatgaactctttgccagcagagaggatccaggaaatacagaaggccattgagctgttctcagtgggtcagggacctgccaaaaccatggaggaggctagcaagcgaagctaccagttctgggatacgcagcccgtccccaagctgggcgaagtggtgaacacccatggccccgtggagcctgacaaggacaatatccgccaggagccctacaccctgccccagggcttcacctgggatgctttggacctgggcgatcgtggtgtgctaaaagaactgtacaccctcctgaatgagaactatgtggaagatgatgacaacatgttccgatttgattattccccggagtttcttttgtgggctctccggccacccggctggctcccccagtggcactgtggggttcgagtggtctcaagtcggaaattggttgggttcattagcgccatcccagcaaacatccatatctatgacacagagaagaagatggtagagatcaacttcctgtgtgtccacaagaagctgcgttccaagagggttgctccagttctgatccgagagatcaccaggcgggttcacctggagggcatcttccaagcagtttacactgccggggtggtactaccaaagcccgttggcacctgcaggtattggcatcggtccctaaacccacggaagctgattgaagtgaagttctcccacctgagcagaaatatgaccatgcagcgcaccatgaagctctaccgactgccagagactcccaagacagctgggctgcgaccaatggaaacaaaggacattccagtagtgcaccagctcctcaccaggtacttgaagcaatttcaccttacgcccgtcatgagccaggaggaggtggagcactggttctacccccaggagaatatcatcgacactttcgtggtggagaacgcaaacggagaggtgacagatttcctgagcttttatacgctgccctccaccatcatgaaccatccaacccacaagagtctcaaagctgcttattctttctacaacgttcacacccagacccctcttctagacctcatgagcgacgcccttgtcctcgccaaaatgaaagggtttgatgtgttcaatgcactggatctcatggagaacaaaaccttcctggagaagctcaagtttggcataggggacggcaacctgcagtattacctttacaattggaaatgccccagcatgggggcagagaaggttggactggtgctacaataaccagtcaccagtgcgattctggataaagccactgaaaattcgaaccaggaaatggaaccccaccactgttggtccaattttcacacacgtgagaatccctggcaaagggagcagaactgaaccggctttaccaaaccgccagcgaacttgacaattgtattgcgatggcgtgggctgcgtgacgtcacctccggtcgtgtctctggtctccgtgttttccagttaattacatcctcatgcagccgtgatcaagggaatgtaactgctgaaaactagctcgtgattggcatataatggagttaacgggtgaataataaaagtatatatatatattatatatatataaatattttaaatatctttcatgttccaaatgtacaaggatgtttggtctttaatgaaaagctgaatccagatcattcctcagaatgaggacccgaggacagtggcagacagacgcgttggcacagttcatggtttcctccagaggagacattggcttatcatggggaaaaagaggatctggagaacctcatccagctccccttctgaatcagctgggatgactggctttgagaaggaagggaagatggaacaggctcagatctcatgggatagcacgtggagctcttggctggggctgaccctgggcagggactttcctgcagggccagacctgcctgcattctgagacaaagcaatggacggtccgcagaagcagacctcattgattgagtcctttcttccatccccttggcctgctccctgtaggaagtcatcctgccaactgatttaaaagggctctttagccagttgttgccaaccttatagggatgagtcccctgtgagattttgcttttccactgcctgggatgatgcagtttgaagaggcccttggacctccttgtaacatcagggacctttggagaccattatcagtgtaagccctgcttagctcatcttagagcaaagagccagcaccctgatgtccctggggtggctaggcaggagtggcgtggggccaatacccagaccccttcagccaccagcccctggcctgtgccttccaacccattagccatttcttgttgtgcccctttccaagatacagcctgcaagtggtagcaagaagtgattagaggcagatctggacttggcaacagaagtggtttcccatctccattgtctgagtctgattttcgctgatgctgttttgtggatttttgtggtagtgatggttgtcagtgctgccagtttcccaaaacgtaatcaagcctctggtcacatggctgtcgatgtaggcattctggagtggtgttcagccaagtgaccgggcaaaattgggctgtgaaattgtacttccaggcttggatgtaatttttgctctagagagaagcaagtggtgggaaggaggtagcatgacgtgtggtgtgcgggtttccttgctgccgtcacctctccgctcatacaggaatgaagccttagccaggaggccaggctcagccctgtgccactcaccgaagccactttctacaggccagcaggggcttgttgcaggctgtgggttttggtgtggtttgtcagaggctaattctgcagagtttccaaaaccagaagacatcgtatgcttgggatgggggccgtgccacccgtgggaatgctgcccgctctgcagactgctgctagagccagcaactccactaaggtggattttcatcaggggcctgcagggccctcccttttcccattgttcctgcgctgcaaattgcaggccccagcaatcgtgactgacgtttgctccttgactccaagaaactgagaccaaagaagctgctgttcttagcaagatgcgcactgcattccacaggtgggaggagtcggagaggcaggggcttgctttgcagccccacagacaacagttgcacagtgcctcaagccccagagtggctcaccctgtccagacctttgaggatatcaaaggacaaagtgcccaagtctttcctaccttgggggaacctggaacttggaaaggctccctgtcctagtcttgatctgttctgggccaggtcccagcttgagctgcctctgagatttgggctgtgcggatctctggagtgagctctgtttcggttgacccaggtcatggaatggaaacggtgaggccccagtggctgttctggaagaaacagatctcctggcaaaggccccagcatctccctcactgaaaccaggtggccggctcctcggactctgctttatgttgcggtgagaactctgcccaggtgtgcagggtttggcttgtgggctgcttgctgctcatctgatttttgtcccagtagtccctgcgttcttcattcaaccccttctgggacttcagctcagagagcaccatcccgggggtcagggcctccccacaggagccctgcagtgtggtagcgccatggctgtctcaaaccaagcaaaggaaggaccctgaggccttcacgctaaccgtcctcgagcaactgctgttggaaggcctccctgggcctggcccccaccctctgccacccagtcctcccagctgccatgtttcaaagacgacctttacctcctgcctttggattgactctgcatttgaccacggactccagtctgtgtgtagggagagagctgagtaggaggcctccactccggatcgaggcctgtatagggctcgtttccccacacatgcctatttctgaagaggcttctgtcttatttgaaggccagcccacacccagctactttaacaccaggtttatggaaaatgtcaggccttccccacaactcctgtctaactgctgtcgcccccctacttgctggctctcagaagcctaggggagtccctgtggtcctgaattctttccccaaagacgaccagcatttaaccaacctaagggcccaaaggccttggacaactgcatggagctgcactctaggagaaggaggggaaccagatgttagatcaggggagggagcaggagtgtccctcccgtcagtgcctacccacctgtgaggcagccttctgatggcctggcccaccttccccagaaccaggggaggcctgaggcttcagttttactctgctgcaaaatgaaggcgggcctgcaagccgactacacctacggaggctgttgaggacaatttcattccattaaattaaaaaatactgactggctggcaggcaggtgccatgtctgggaacagggacgggggagcttcacctttttgtcttggcttttctttgggctgtgggggggcatccatttccagggtcggggaggaaataccaaatgcattgttgttctgctcaatacatctcacttgtttctaataaagaaagcagctg

SEQ ID NO: 207421 - DNA, 4999 bp, Artificial Sequence
  derived and/or modified sequence
caggccggctcagcgggcgaggcgggacctcgggagcgcgcgcctgcagaccggacgtccggccagcaggcggggccgggagaggaaccccccatgtagtggggcgcggagccctgctctcgcaactcaagatggcggacgagagtgagacagcagtgaagccgccggcacctccgctgccgcagatgatggaagggaacgggaacggccatgagcactgcagcgattgcgagaatgaggaggacaacagctacaaccggggtggtttgagtccagccaatgacactggagccaaaaagaagaaaaagaaacaaaaaaagaagaaagaaaaaggcagtgagacagattcagcccaggatcagcctgtgaagatgaactctttgccagcagagaggatccaggaaatacagaaggccattgagctgttctcagtgggtcagggacctgccaaaaccatggaggaggctagcaagcgaagctaccagttctgggatacgcagcccgtccccaagctgggcgaagtggtgaacacccatggccccgtggagcctgacaaggacaatatccgccaggagccctacaccctgccccagggcttcacctgggatgctttggacctgggcgatcgtggtgtgctaaaagaactgtacaccctcctgaatgagaactatgtggaagatgatgacaacatgttccgatttgattattccccggagtttcttttgtgggctctccggccacccggctggctcccccagtggcactgtggggttcgagtggtctcaagtcggaaattggttgggttcattagcgccatcccagcaaacatccatatctatgacacagagaagaagatggtagagatcaacttcctgtgtgtccacaagaagctgcgttccaagagggttgctccagttctgatccgagagatcaccaggcgggttcacctggagggcatcttccaagcagtttacactgccggggtggtactaccaaagcccgttggcacctgcaggtattggcatcggtccctaaacccacggaagctgattgaagtgaagttctcccacctgagcagaaatatgaccatgcagcgcaccatgaagctctaccgactgccagagactcccaagacagctgggctgcgaccaatggaaacaaaggacattccagtagtgcaccagctcctcaccaggtacttgaagcaatttcaccttacgcccgtcatgagccaggaggaggtggagcactggttctacccccaggagaatatcatcgacactttcgtggtggagaacgcaaacggagaggtgacagatttcctgagcttttatacgctgccctccaccatcatgaaccatccaacccacaagagtctcaaagctgcttattctttctacaacgttcacacccagacccctcttctagacctcatgagcgacgcccttgtcctcgccaaaatgaaagggtttgatgtgttcaatgcactggatctcatggagaacaaaaccttcctggagaagctcaagtttggcataggggacggcaacctgcagtattacctttacaattggaaatgccccagcatgggggcagagaaggttggactggtgctacaataaccagtcaccagtgcgattctggataaagccactgaaaattcgaaccaggaaatggaaccccaccactgttggtccaattttcacacacgtgagaatccctggcaaagggagcagaactgaaccggctttaccaaaccgccagcgaacttgacaattgtattgcgatggcgtgggctgcgtgacgtcacctccggtcgtgtctctggtctccgtgttttccagttaattacatcctcatgcagccgtgatcaagggaatgtaactgctgaaaactagctcgtgattggcatataatggagttaacgggtgaataataaaagtatatatatatattatatatatataaatattttaaatatctttcatgttccaaatgtacaaggatgtttggtctttaatgaaaagctgaatccagatcattcctcagaatgaggacccgaggacagtggcagacagacgcgttggcacagttcatggtttcctccagaggagacattggcttatcatggggaaaaagaggatctggagaacctcatccagctccccttctgaatcagctgggatgactggctttgagaaggaagggaagatggaacaggctcagatctcatgggatagcacgtggagctcttggctggggctgaccctgggcagggactttcctgcagggccagacctgcctgcattctgagacaaagcaatggacggtccgcagaagcagacctcattgattgagtcctttcttccatccccttggcctgctccctgtaggaagtcatcctgccaactgatttaaaagggctctttagccagttgttgccaaccttatagggatgagtcccctgtgagattttgcttttccactgcctgggatgatgcagtttgaagaggcccttggacctccttgtaacatcagggacctttggagaccattatcagtgtaagccctgcttagctcatcttagagcaaagagccagcaccctgatgtccctggggtggctaggcaggagtggcgtggggccaatacccagaccccttcagccaccagcccctggcctgtgccttccaacccattagccatttcttgttgtgcccctttccaagatacagcctgcaagtggtagcaagaagtgattagaggcagatctggacttggcaacagaagtggtttcccatctccattgtctgagtctgattttcgctgatgctgttttgtggatttttgtggtagtgatggttgtcagtgctgccagtttcccaaaacgtaatcaagcctctggtcacatggctgtcgatgtaggcattctggagtggtgttcagccaagtgaccgggcaaaattgggctgtgaaattgtacttccaggcttggatgtaatttttgctctagagagaagcaagtggtgggaaggaggtagcatgacgtgtggtgtgcgggtttccttgctgccgtcacctctccgctcatacaggaatgaagccttagccaggaggccaggctcagccctgtgccactcaccgaagccactttctacaggccagcaggggcttgttgcaggctgtgggttttggtgtggtttgtcagaggctaattctgcagagtttccaaaaccagaagacatcgtatgcttgggatgggggccgtgccacccgtgggaatgctgcccgctctgcagactgctgctagagccagcaactccactaaggtggattttcatcaggggcctgcagggccctcccttttcccattgttcctgcgctgcaaattgcaggccccagcaatcgtgactgacgtttgctccttgactccaagaaactgagaccaaagaagctgctgttcttagcaagatgcgcactgcattccacaggtgggaggagtcggagaggcaggggcttgctttgcagccccacagacaacagttgcacagtgcctcaagccccagagtggctcaccctgtccagacctttgaggatatcaaaggacaaagtgcccaagtctttcctaccttgggggaacctggaacttggaaaggctccctgtcctagtcttgatctgttctgggccaggtcccagcttgagctgcctctgagatttgggctgtgcggatctctggagtgagctctgtttcggttgacccaggtcatggaatggaaacggtgaggccccagtggctgttctggaagaaacagatctcctggcaaaggccccagcatctccctcactgaaaccaggtggccggctcctcggactctgctttatgttgcggtgagaactctgcccaggtgtgcagggtttggcttgtgggctgcttgctgctcatctgatttttgtcccagtagtccctgcgttcttcattcaaccccttctgggacttcagctcagagagcaccatcccgggggtcagggcctccccacaggagccctgcagtgtggtagcgccatggctgtctcaaaccaagcaaaggaaggaccctgaggccttcacgctaaccgtcctcgagcaactgctgttggaaggcctccctgggcctggcccccaccctctgccacccagtcctcccagctgccatgtttcaaagacgacctttacctcctgcctttggattgactctgcatttgaccacggactccagtctgtgtgtagggagagagctgagtaggaggcctccactccggatcgaggcctgtatagggctcgtttccccacacatgcctatttctgaagaggcttctgtcttatttgaaggccagcccacacccagctactttaacaccaggtttatggaaaatgtcaggccttccccacaactcctgtctaactgctgtcgcccccctacttgctggctctcagaagcctaggggagtccctgtggtcctgaattctttccccaaagacgaccagcatttaaccaacctaagggcccaaaggccttggacaactgcatggagctgcactctaggagaaggaggggaaccagatgttagatcaggggagggagcaggagtgtccctcccgtcagtgcctacccacctgtgaggcagccttctgatggcctggcccaccttccccagaaccaggggaggcctgaggcttcagttttactctgctgcaaaatgaaggcgggcctgcaagccgactacacctacggaggctgttgaggacaatttcattccattaaattaaaaaatactgactggctggcaggcaggtgccatgtctgggaacagggacgggggagcttcacctttttgtcttggcttttctttgggctgtgggggggcatccatttccagggtcggggaggaaataccaaatgcattgttgttctgctcaatacatctcacttgtttctaataaagaaagcagctgaacaaaa

SEQ ID NO: 207422 - DNA, 1491 bp, Artificial Sequence
  derived and/or modified sequence
atggctgatgagagcgaaactgcagtgaaacctcccgcacctccacttccccagatgatggaaggtaatgggaacggccatgagcactgtagcgattgcgagaacgaagaggataattcgtataaccgcggaggtctgtctcctgcaaatgatacgggcgctaaaaagaagaagaaaaaacaaaaaaagaaaaaggaaaagggcagcgagaccgactccgctcaagaccaaccagtgaaaatgaactctctacccgctgagaggatccaagaaattcaaaaggcaatcgagctgttcagcgtgggacaagggccagccaaaacaatggaggaggccagcaagagatcctaccagttctgggacactcagcctgttcccaaactaggcgaggttgtgaacacgcatggccctgtggaacccgataaagataacattcggcaggagccctataccttgcctcagggattcacttgggacgctctggacctgggagatagaggggttcttaaggaactttataccctgcttaacgagaactatgtggaagacgacgataacatgtttagattcgactactcgcccgaattcctcctgtgggctctgaggcccccagggtggctcccacagtggcattgcggggttagggtggtctcctcccggaagctggtggggtttatctccgctattcctgctaacatacacatttatgataccgaaaaaaaaatggtcgaaattaacttcctgtgtgtgcacaagaagctccggtccaagcgtgttgcacccgttctgataagggaaatcaccagacgcgtacatctcgaaggcatcttccaggccgtgtacacagccggtgtcgtcttaccaaagcccgtcggaacatgccgctactggcaccggagtctgaatccgcgtaagctcatcgaagtaaaatttagtcatctaagcagaaatatgaccatgcagaggaccatgaaactgtatcgtctcccggagacacccaagacagcagggttgagacctatggaaactaaagatatcccagtcgtgcaccaacttctcacccgctatcttaagcaattccacctaacacctgttatgtcccaggaggaagtggagcactggttctacccccaagaaaacataatcgatacatttgtcgtggagaacgccaacggcgaggtgaccgacttcctgtcgttttacactctgccctccacaatcatgaaccatcccacccacaaaagtctgaaggccgcatactcgttttataacgtgcacacacaaaccccgttattggatttgatgagcgatgctttggtgttagctaagatgaagggcttcgatgtgtttaacgcattagacctaatggaaaataagacctttctggaaaagcttaaattcgggattggtgatggcaacttgcaatactacctctacaactggaagtgcccctctatgggagctgaaaaggtgggccttgtgctgcagtag

SEQ ID NO: 207423 - DNA, 414 bp, Artificial Sequence
  derived and/or modified sequence
atggcagatgagtcagagactgcagtaaagccccctgccccaccactaccccagatgatggaagggaatgggaatggacacgaacactgcagtgattgcgagaatgaagaggacaactcatacaacaggggaggtctatctcctgccaacgatactggcgctaagaaaaaaaagaagaaacagaagaaaaagaaagaaaagggaagtgagaccgacagtgcacaagatcaaccagtgaaaatgaattctttgccagccgagcgcattcaggaaatccagaaggccattgaactgttctcggtagggcagggtcctgccaagacaatggaggaagctagcaaacgctcttaccagttttgggacacgcagcctgtcccaaaactggctaagcggactgtacaccctcctgagtag

SEQ ID NO: 207424 - DNA, 1491 bp, Artificial Sequence
  derived and/or modified sequence
atggccgacgaaagtgagaccgccgtgaagccaccagcccctccgctgccacagatgatggagggcaacgggaatgggcacgaacactgtagtgactgtgaaaatgaggaggataacagttataatcgtggcggtctttcacctgccaatgatacaggtgcaaaaaagaagaaaaagaagcagaaaaagaaaaaggagaaaggatccgaaactgattccgcgcaggaccagccagtgaagatgaattctctaccagcagagcgaatccaggaaatccagaaggccatcgaactcttcagcgtgggtcaaggcccagcaaagactatggaggaggcatccaaacgcagctaccagttttgggatacccagcccgtgcccaaactgggagaagtggttaacacacacggacccgttgaacctgacaaagataacattcggcaggagccctataccttgcctcaggggttcacgtgggacgcactggacttgggagaccggggagtgctcaaggaactctacacactcttgaatgaaaattacgtagaggacgatgataacatgttccgttttgattactcccccgaatttctactgtgggctctgcgtccgccaggctggctgccgcagtggcactgtggggtgcgggttgtgagttctcgcaagctggtcggcttcataagtgccattccagctaatattcatatttacgacactgagaagaagatggtggagataaattttctctgtgtgcataagaaactgagatccaagcgggtggcacccgttcttatcagagaaatcacacgccgtgtccacctggagggaatcttccaggcagtgtacaccgcaggcgtcgtactccctaagccagttggcacctgtcgttattggcaccggagcctcaatcctagaaaactaattgaagtgaagtttagccatctgagccgcaacatgaccatgcagaggacaatgaaactatacaggctgcctgaaacacccaaaacagcaggcctgcgtccgatggagacaaaggacatcccagttgtgcaccagctgctgacaaggtacctcaagcagtttcatcttacgccagtcatgagtcaggaagaagttgaacattggttttacccccaagaaaacatcattgacacatttgtagtggagaatgccaatggagaggttactgacttcctgagcttctacactctgccaagcacgatcatgaatcatccgacgcacaagtctctgaaagcagcatacagcttttacaacgtgcatactcagaccccccttctggatctgatgtcagacgccctcgtgttagcaaagatgaaggggttcgatgtcttcaacgcgcttgatctgatggagaataaaactttcttggaaaagctgaaattcggaatcggagacgggaatttacagtattacctgtataactggaaatgtccaagtatgggagcagaaaaggtaggcttggttcttcagtag

SEQ ID NO: 207425 - DNA, 1491 bp, Artificial Sequence
  derived and/or modified sequence
atggccgacgagagcgagaccgccgtgaagccccccgccccccccctgccccagatgatggagggcaacggcaacggccacgagcactgcagcgactgcgagaacgaggaggacaacagctacaacagaggcggcctgagccccgccaacgacaccggcgccaagaagaagaagaagaagcagaagaagaagaaggagaagggcagcgagaccgacagcgcccaggaccagcccgtgaagatgaacagcctgcccgccgagagaatccaggagatccagaaggccatcgagctgttcagcgtgggccagggccccgccaagaccatggaggaggccagcaagagaagctaccagttctgggacacccagcccgtgcccaagctgggcgaggtggtgaacacccacggccccgtggagcccgacaaggacaacatcagacaggagccctacaccctgccccagggcttcacctgggacgccctggacctgggcgacagaggcgtgctgaaggagctgtacaccctgctgaacgagaactacgtggaggacgacgacaacatgttcagattcgactacagccccgagttcctgctgtgggccctgagaccccccggctggctgccccagtggcactgcggcgtgagagtggtgagcagcagaaagctggtgggcttcatcagcgccatccccgccaacatccacatctacgacaccgagaagaagatggtggagatcaacttcctgtgcgtgcacaagaagctgagaagcaagagagtggcccccgtgctgatcagagagatcaccagaagagtgcacctggagggcatcttccaggccgtgtacaccgccggcgtggtgctgcccaagcccgtgggcacctgcagatactggcacagaagcctgaaccccagaaagctgatcgaggtgaagttcagccacctgagcagaaacatgaccatgcagagaaccatgaagctgtacagactgcccgagacccccaagaccgccggcctgagacccatggagaccaaggacatccccgtggtgcaccagctgctgaccagatacctgaagcagttccacctgacccccgtgatgagccaggaggaggtggagcactggttctacccccaggagaacatcatcgacaccttcgtggtggagaacgccaacggcgaggtgaccgacttcctgagcttctacaccctgcccagcaccatcatgaaccaccccacccacaagagcctgaaggccgcctacagcttctacaacgtgcacacccagacccccctgctggacctgatgagcgacgccctggtgctggccaagatgaagggcttcgacgtgttcaacgccctggacctgatggagaacaagaccttcctggagaagctgaagttcggcatcggcgacggcaacctgcagtactacctgtacaactggaagtgccccagcatgggcgccgagaaggtgggcctggtgctgcagtag

SEQ ID NO: 207426 - DNA, 414 bp, Artificial Sequence
  derived and/or modified sequence
atggccgacgagagcgagaccgccgtgaagccccccgccccccccctgccccagatgatggagggcaacggcaacggccacgagcactgcagcgactgcgagaacgaggaggacaacagctacaacagaggcggcctgagccccgccaacgacaccggcgccaagaagaagaagaagaagcagaagaagaagaaggagaagggcagcgagaccgacagcgcccaggaccagcccgtgaagatgaacagcctgcccgccgagagaatccaggagatccagaaggccatcgagctgttcagcgtgggccagggccccgccaagaccatggaggaggccagcaagagaagctaccagttctgggacacccagcccgtgcccaagctggccaagagaaccgtgcacccccccgagtag

SEQ ID NO: 207427 - protein, 729 aa, Artificial Sequence
  derived and/or modified sequence
MNPFQKNESKETLFSPVSIEEVPPRPPSPPKKPSPTICGSNYPLSIAFIVVNEFCERFSYYGMKAVLILYFLYFLHWNEDTSTSIYHAFSSLCYFTPILGAAIADSWLGKFKTIIYLSLVYVLGHVIKSLGALPILGGQVVHTVLSLIGLSLIALGTGGIKPCVAAFGGDQFEEKHAEERTRYFSVFYLSINAGSLISTFITPMLRGDVQCFGEDCYALAFGVPGLLMVIALVVFAMGSKIYNKPPPEGNIVAQVFKCIWFAISNRFKNRSGDIPKRQHWLDWAAEKYPKQLIMDVKALTRVLFLYIPLPMFWALLDQQGSRWTLQAIRMNRNLGFFVLQPDQMQVLNPLLVLIFIPLFDFVIYRLVSKCGINFSSLRKMAVGMILACLAFAVAAAVEIKINEMAPAQPGPQEVFLQVLNLADDEVKVTVVGNENNSLLIESIKSFQKTPHYSKLHLKTKSQDFHFHLKYHNLSLYTEHSVQEKNWYSLVIREDGNSISSMMVKDTESRTTNGMTTVRFVNTLHKDVNISLSTDTSLNVGEDYGVSAYRTVQRGEYPAVHCRTEDKNFSLNLGLLDFGAAYLFVITNNTNQGLQAWKIEDIPANKMSIAWQLPQYALVTAGEVMFSVTGLEFSYSQAPSSMKSVLQAAWLLTIAVGNIIVLVVAQFSGLVQWAEFILFSCLLLVICLIFSIMGYYYVPVKTEDMRGPADKHIPHIQGNMIKLETKKTKL

SEQ ID NO: 207428 - DNA, 2190 bp, Artificial Sequence
  derived and/or modified sequence
atgaaccccttccagaagaacgagagcaaggagaccctgttcagccccgtgagcatcgaggaggtgccccccagaccccccagcccccccaagaagcccagccccaccatctgcggcagcaactaccccctgagcatcgccttcatcgtggtgaacgagttctgcgagagattcagctactacggcatgaaggccgtgctgatcctgtacttcctgtacttcctgcactggaacgaggacaccagcaccagcatctaccacgccttcagcagcctgtgctacttcacccccatcctgggcgccgccatcgccgacagctggctgggcaagttcaagaccatcatctacctgagcctggtgtacgtgctgggccacgtgatcaagagcctgggcgccctgcccatcctgggcggccaggtggtgcacaccgtgctgagcctgatcggcctgagcctgatcgccctgggcaccggcggcatcaagccctgcgtggccgccttcggcggcgaccagttcgaggagaagcacgccgaggagagaaccagatacttcagcgtgttctacctgagcatcaacgccggcagcctgatcagcaccttcatcacccccatgctgagaggcgacgtgcagtgcttcggcgaggactgctacgccctggccttcggcgtgcccggcctgctgatggtgatcgccctggtggtgttcgccatgggcagcaagatctacaacaagcccccccccgagggcaacatcgtggcccaggtgttcaagtgcatctggttcgccatcagcaacagattcaagaacagaagcggcgacatccccaagagacagcactggctggactgggccgccgagaagtaccccaagcagctgatcatggacgtgaaggccctgaccagagtgctgttcctgtacatccccctgcccatgttctgggccctgctggaccagcagggcagcagatggaccctgcaggccatcagaatgaacagaaacctgggcttcttcgtgctgcagcccgaccagatgcaggtgctgaaccccctgctggtgctgatcttcatccccctgttcgacttcgtgatctacagactggtgagcaagtgcggcatcaacttcagcagcctgagaaagatggccgtgggcatgatcctggcctgcctggccttcgccgtggccgccgccgtggagatcaagatcaacgagatggcccccgcccagcccggcccccaggaggtgttcctgcaggtgctgaacctggccgacgacgaggtgaaggtgaccgtggtgggcaacgagaacaacagcctgctgatcgagagcatcaagagcttccagaagaccccccactacagcaagctgcacctgaagaccaagagccaggacttccacttccacctgaagtaccacaacctgagcctgtacaccgagcacagcgtgcaggagaagaactggtacagcctggtgatcagagaggacggcaacagcatcagcagcatgatggtgaaggacaccgagagcagaaccaccaacggcatgaccaccgtgagattcgtgaacaccctgcacaaggacgtgaacatcagcctgagcaccgacaccagcctgaacgtgggcgaggactacggcgtgagcgcctacagaaccgtgcagagaggcgagtaccccgccgtgcactgcagaaccgaggacaagaacttcagcctgaacctgggcctgctggacttcggcgccgcctacctgttcgtgatcaccaacaacaccaaccagggcctgcaggcctggaagatcgaggacatccccgccaacaagatgagcatcgcctggcagctgccccagtacgccctggtgaccgccggcgaggtgatgttcagcgtgaccggcctggagttcagctacagccaggcccccagcagcatgaagagcgtgctgcaggccgcctggctgctgaccatcgccgtgggcaacatcatcgtgctggtggtggcccagttcagcggcctggtgcagtgggccgagttcatcctgttcagctgcctgctgctggtgatctgcctgatcttcagcatcatgggctactactacgtgcccgtgaagaccgaggacatgagaggccccgccgacaagcacatcccccacatccagggcaacatgatcaagctggagaccaagaagaccaagctgtag

SEQ ID NO: 207429 - DNA, 2190 bp, Artificial Sequence
  derived and/or modified sequence
atgaatcctttccagaagaacgaaagtaaggaaactttgttctccccagtgagtatcgaggaagtgcctccacggcctccaagtccacccaagaagccttcccccacaatttgcgggtctaactatcctctgtcaattgcttttatagtggtgaacgagttctgcgaaaggttcagttattatggcatgaaagccgtgctcatcctgtacttcctgtacttcctacattggaacgaagacacaagtacaagcatctatcacgcgtttagcagcctctgttacttcacgcctatcttgggcgcagctatcgcggattcatggttgggtaagttcaagacaatcatatatctcagtctcgtgtacgttctgggacacgtgatcaagtcactaggagcccttccaatcctgggaggccaggtggtccacaccgtgctgagcctaatcggcctgagccttatcgctctgggtaccggaggaatcaagccctgcgtagccgcgtttgggggagaccagtttgaagaaaagcacgctgaagaacggactcgatatttcagtgttttctatctctcgattaatgcggggagtttaatttccacctttattacacccatgctacggggagatgtccagtgcttcggcgaagattgttacgcactagcattcggcgttccgggtctcctgatggtaatagcactggtggtgttcgccatggggtctaagatatacaataagcccccaccagagggcaatatcgtcgctcaggtgttcaaatgtatttggttcgcaattagcaataggtttaaaaacaggagcggggatatccctaagagacaacactggttggactgggccgctgagaagtatcccaaacaactcattatggatgtcaaagcactcactagagtgctgtttctgtatatcccgttgcccatgttctgggccctgttagaccagcagggaagccgctggaccctgcaagctatcaggatgaacaggaatctcgggtttttcgtgctgcaacccgaccaaatgcaggtcctcaatcctctcctggtcctgattttcatacccctcttcgattttgtgatctatcggttagtgtcaaagtgcgggatcaactttagttcactgcggaaaatggccgtgggaatgattctggcctgcctggccttcgcagtagcagccgctgtggagattaagattaacgaaatggctcccgcgcagccagggcctcaagaggttttcctgcaggtcctgaacctggctgatgacgaggtgaaggtgactgttgtgggcaatgagaacaactctctgttgatcgaaagcatcaagagtttccagaaaacaccccattacagcaagctgcatctgaaaaccaaatcacaggactttcacttccaccttaagtaccacaatttatccttgtacacggagcacagcgttcaggagaaaaactggtactcgctggttatcagagaagatggcaattcaatttcgtccatgatggtgaaggatactgagtcgcgcacgactaacggcatgacaaccgtgagatttgtgaataccttgcacaaggacgttaatatttcacttagcacggacacctcactaaacgtgggagaggattatggagtgagtgcatatcggacggtccagaggggagagtatccagccgtacattgcaggaccgaggataagaactttagcctgaacctcggactcctagactttggcgcggcatacctcttcgtgatcaccaacaataccaatcaggggctgcaggcgtggaagatcgaagacatccctgccaacaagatgtcaatcgcatggcagctgccacagtatgccttggtgaccgcaggagaggttatgttctccgtgaccggtttagagttctcctattcacaggccccaagctcgatgaagagtgtccttcaggctgcatggcttctgactatcgccgtaggaaatattatagtcctggtcgtagcacaattctccgggttggtccaatgggctgaattcatactattcagctgtctcctgctagttatctgtttaatattttctatcatgggttactactacgttccagtgaaaaccgaggacatgaggggaccagctgacaaacatattccacacatccagggcaacatgatcaagttggaaacgaaaaagacaaagttgtag

SEQ ID NO: 207430 - DNA, 2190 bp, Artificial Sequence
  derived and/or modified sequence
atgaaccccttccagaagaatgaaagcaaggagaccctcttcagccctgtgtccattgaggaggtgcccccccggccccccagcccccccaagaagcccagccccaccatctgtggcagcaactaccccctgagcatcgccttcatcgtggtgaatgagttctgtgagcgcttctcctactacggcatgaaggctgtgctgatcctgtacttcctgtacttcctgcactggaatgaagacaccagcaccagcatctaccacgccttcagcagcctgtgctacttcacccccatcctgggcgccgccatcgctgacagctggctgggcaagttcaagaccatcatctacctgagcctggtgtatgtgctgggccacgtgatcaagagcctgggcgccctgcccatcctgggcggccaggtggtgcacacagtgctgagcctcatcggcctgagcctgattgccctgggcactggaggcatcaagccctgtgtggccgcctttggaggagaccagtttgaggagaagcatgctgaggagaggacccgctacttctctgtgttctacctgagcatcaatgccggcagcctcatcagcaccttcatcacccccatgctgcggggagatgtgcagtgcttcggggaggactgctacgccctggcctttggagtgcccggcctgctgatggtgattgccctggtggtgtttgccatgggcagcaagatctacaacaagcccccacctgagggcaacatcgtggcccaggtgttcaagtgcatctggtttgccatcagcaaccgcttcaagaacagaagtggggacatccccaagaggcagcactggctggactgggccgctgagaagtaccccaagcagctgatcatggatgtgaaggccctgaccagggtgctcttcctgtacatccccctgcccatgttctgggccctgctggaccagcagggcagccgctggaccctgcaggccatccgcatgaacagaaacctgggcttctttgtgctgcagcctgaccagatgcaggtgctgaaccccctgctggtgctgatcttcatccccctgtttgattttgtgatctaccgcctggtgtccaaatgtggcatcaacttcagcagcctgaggaagatggctgtgggcatgatcctggcctgcctggcctttgctgtggccgctgctgtggagatcaagatcaatgagatggccccagcccagcccggcccccaggaggtgttcctgcaggtgctgaacctggctgatgatgaggtgaaggtgacagtggtgggcaatgaaaacaacagcctgctgattgagagcatcaagagcttccagaagaccccccactacagcaagctgcacctgaagaccaagagccaggacttccacttccacctgaagtaccacaacctgagcctgtacacagagcacagcgtgcaggagaagaactggtacagcctggtgatcagagaagatggcaacagcatcagctccatgatggtgaaggacacagagagcaggaccaccaacggcatgaccaccgtgcgctttgtgaacaccctgcacaaggatgtgaacatcagcctgagcacagacaccagcctgaatgtgggagaagattatggagtgtctgcctacagaacagtgcagagaggagagtacccagctgtgcactgcaggacagaggacaagaacttcagcctgaacctgggcctgctggactttggagctgcctacctgtttgtgatcaccaacaacaccaaccagggcctgcaggcctggaagattgaggacatcccagccaacaagatgagcatcgcctggcagctgccccagtatgccctggtgacagctggggaggtgatgttttctgtgacaggcctggagttctcctacagccaggcccccagctccatgaagtctgtgctgcaggccgcctggctgctgaccatcgctgtgggcaacatcatcgtgctggtggtggcccagttcagcggcctggtgcagtgggccgagttcatcctcttcagctgcctgctgctggtgatctgcctgatcttcagcatcatgggctactactacgtgcctgtgaagacagaggacatgaggggccctgctgacaagcacatcccccacatccagggcaacatgatcaagctggagaccaagaagaccaagctgtag

SEQ ID NO: 207431 - DNA, 2190 bp, Artificial Sequence
  derived and/or modified sequence
atgaaccccttccagaagaacgagagcaaggagaccctgttcagcccagtgtctatagaagaggttcctccaaggccaccgagtccaccgaaaaaaccgtcacctactatttgcggatctaattatcctctgagcatagccttcatagtggttaacgaattctgtgagcgtttcagctattacggcatgaaggccgttctaatactttatttcctctactttctgcattggaatgaagacacctccacttccatttatcacgcctttagctcactgtgctacttcacccccattctgggggccgcgattgccgacagctggttaggcaaatttaaaaccatcatctatctgtcactcgtttacgttctgggtcacgtgatcaagagtctgggcgcattgcctatcctcggcggccaggtggtgcacacggtgctttccttaattgggctctctttgatagccctcggcaccggtggtatcaagccctgtgtggctgcctttggtggggatcagttcgaagagaaacacgccgaggaacgaacacgttactttagcgtgttttacctcagcattaacgcaggatcgctgatctccacatttatcaccccgatgctccgcggagatgttcaatgcttcggcgaggactgctacgctcttgcattcggcgtgcctgggttgctcatggtgatcgcccttgtcgtctttgcaatgggaagtaaaatctataataagcccccccctgagggaaacattgtcgcacaggtttttaagtgcatctggttcgccatttcaaatcgattcaaaaaccggtctggtgacatacccaagagacagcactggctcgactgggctgcagaaaaatacccgaagcagctgattatggatgtgaaagcccttactcgggtgcttttcttgtatatccccctgcccatgttctgggccctccttgaccagcagggatcacgatggacactgcaggcgatccgcatgaatcggaacctcggattcttcgttctccaacctgatcagatgcaagtgttgaatccgctcttagtgcttattttcattcctctttttgacttcgtcatttaccgtttggtatcaaagtgtggtataaacttttcctctctgaggaaaatggccgtgggcatgattttagcatgcctggccttcgccgtggcagccgccgttgaaataaaaatcaacgaaatggcacctgcacagccaggacctcaggaagtctttctgcaagtgctcaatctagctgacgacgaggtcaaagtgacagtggttggcaacgagaacaactccctcctgattgagagtatcaagtcatttcagaaaaccccccactattctaaattacatctcaaaacaaagagccaggattttcattttcatcttaagtaccataatctcagtctgtataccgagcactcagtgcaggaaaaaaactggtactccctggtgattagggaggacggcaatagcatcagtagcatgatggtgaaagacaccgagagccgaactactaacgggatgacaactgtgaggttcgtgaatacactccacaaggacgttaatatctctctctctacagatacttcgcttaatgtaggcgaggattatggcgtttcagcctaccgtaccgtacagaggggcgagtaccccgccgtgcattgtaggaccgaagataaaaacttctcccttaacttggggctattagactttggagcagcctatttgttcgtgattacgaataacacgaatcaagggctgcaggcttggaagatagaagatattccagctaacaaaatgtccatcgcgtggcagcttccgcagtacgcgcttgttacagctggcgaggtaatgttcagcgtgactgggctggagttctcatactcccaggccccaagcagtatgaagagtgtgctgcaggctgcctggttgctcacgattgctgtagggaacataattgtgttggttgtagcacagtttagcgggctggtgcagtgggccgaatttatcttgttttcgtgcctgctgctagtgatttgtctgatcttcagcatcatgggttactattacgtgccggttaaaacggaagatatgaggggaccggcggacaaacatattccccacatccagggaaacatgatcaaactcgaaacgaagaagaccaagctctag

SEQ ID NO: 207432 - DNA, 2190 bp, Artificial Sequence
  derived and/or modified sequence
atgaaccccttccaaaagaatgagagtaaggagactctctttagtcctgtgtctattgaggaggtgcctccacgccctcctagcccccctaagaaaccaagtccgactatctgcggctcaaactacccactcagtattgctttcatcgtcgttaatgagttttgcgagcggttcagctactatggaatgaaggccgtattgatcctctactttctgtactttcttcattggaatgaggacacatcgactagcatctaccatgccttttcatcactctgttacttcaccccaattttgggagcagccattgctgattcctggcttggcaagttcaaaaccatcatttacctaagtctggtgtatgtgttgggacatgtcataaaaagccttggagctttgccaattctcggtggccaggttgtgcacactgtcctgagtttaattggattgtcactgatcgcattgggcacaggcggaattaagccctgcgtggcagctttcggcggagaccaatttgaggagaagcatgcagaagagcgaacaagatacttctctgttttttacctcagcatcaatgcaggctccctcattagcactttcatcacgcctatgcttcggggtgacgtgcagtgtttcggggaggattgttatgcacttgcgttcggagtacctggattgctgatggtcatcgccctagtggtctttgcaatggggtccaagatttacaacaaacctcctccagagggaaatatcgtggctcaggtgttcaaatgtatttggttcgccatttctaacaggttcaagaaccgatcaggcgatatccccaaaagacagcactggcttgattgggctgccgagaaatatcctaagcagttgataatggacgtcaaggcgctaacccgtgttctgttcctgtacatcccactgccaatgttttgggctctcttggatcagcaaggctccaggtggaccctccaggcaattaggatgaatcgaaatctaggattcttcgtactccaaccggatcagatgcaagtgttgaaccctctcctggtacttatttttattccccttttcgacttcgtaatatacaggctggtgagcaaatgtggcataaacttttcatccttaaggaagatggccgtagggatgatccttgcgtgccttgcttttgccgttgctgcagccgtagagatcaagattaatgaaatggcacccgctcaacctggcccacaggaagtgtttctccaggttctgaacctggccgacgacgaggttaaggtcaccgtagtggggaacgagaacaactcactcttgatcgagtccatcaagagcttccagaaaaccccccattattcaaagttgcacttaaaaacgaaaagtcaggattttcacttccatcttaagtatcataatttgtctctgtataccgaacacagcgtgcaggagaaaaattggtatagtcttgtaatccgcgaagatggaaactctatctctagtatgatggttaaggatacggagtccaggaccacaaatggcatgacgaccgtgagatttgtaaacaccctccataaggacgtgaacatcagcctgtctaccgataccagtctaaacgtcggggaagattacggcgtgtctgcttaccggactgtgcagcgaggagagtaccccgcagtgcactgtagaaccgaagacaagaatttcagcctgaatttagggctcctggacttcggggcagcttacctgtttgtcattacgaacaataccaaccaaggtttacaagcctggaagattgaggatatccccgctaacaaaatgagcatcgcttggcagctcccacaatatgcactggtgaccgccggtgaggttatgttcagcgtcacgggattggagttctcatactctcaggccccttcatctatgaaatctgtgctacaggccgcatggctcctgactatcgcggtcgggaatatcattgtgttagtggtggcccagttcagcggcttagtgcagtgggcagagttcatactgttctcctgtctcctgctcgtgatttgcctcatcttctccatcatgggctattactatgtgccagtgaagaccgaggacatgcgtggccctgcggataagcatatcccacatattcagggaaacatgattaagctggagaccaaaaaaactaaattatag

SEQ ID NO: 207433 - DNA, 5673 bp, Artificial Sequence
  derived and/or modified sequence
attatatgcgtgaaccaccgcgcctgaccatggaatcagtttttcaatctgtgctcgaggtgttgtgttcttaactatcttctactcctttgcaaagataatctttcttaaacatagactttctaatcagttctctagcattgtttcattctgtctttggcatgttttcactttgctgtgctgtacttttacacattctttttaactatagcttcctgctttgctctggatcaggaagctattgaagctgacacccacagagttaaactgagttgctgaagccaccagctccccctcccagtccttcttttcagagtaggctggcagctgtcctaactgcctactaaagccaaatgcttgaggagagagagagagtaaggagccagccatgaatcctttccagaaaaatgagtccaaggaaactcttttttcacctgtctccattgaagaggtaccacctcgaccacctagccctccaaagaagccatctccgacaatctgtggctccaactatccactgagcattgccttcattgtggtgaatgaattctgcgagcgcttttcctattatggaatgaaagctgtgctgatcctgtatttcctgtatttcctgcactggaatgaagatacctccacatctatataccatgccttcagcagcctctgttattttactcccatcctgggagcagccattgctgactcgtggttgggaaaattcaagacaatcatctatctctccttggtgtatgtgcttggccatgtgatcaagtccttgggtgccttaccaatactgggaggacaagtggtacacacagtcctatcattgatcggcctgagtctaatagctttggggacaggaggcatcaaaccctgtgtggcagcttttggtggagaccagtttgaagaaaaacatgcagaggaacggactagatacttctcagtcttctacctgtccatcaatgcagggagcttgatttctacatttatcacacccatgctgagaggagatgtgcaatgttttggagaagactgctatgcattggcttttggagttccaggactgctcatggtaattgcacttgttgtgtttgcaatgggaagcaaaatatacaataaaccaccccctgaaggaaacatagtggctcaagttttcaaatgtatctggtttgctatttccaatcgtttcaagaaccgttctggagacattccaaagcgacagcactggctagactgggcggctgagaaatatccaaagcagctcattatggatgtaaaggcactgaccagggtactattcctttatatcccattgcccatgttctgggctcttttggatcagcagggttcacgatggactttgcaagccatcaggatgaataggaatttggggttttttgtgcttcagccggaccagatgcaggttctaaatccccttctggttcttatcttcatcccgttgtttgactttgtcatttatcgtctggtctccaagtgtggaattaacttctcatcacttaggaaaatggctgttggtatgatcctagcatgcctggcatttgcagttgcggcagctgtagagataaaaataaatgaaatggccccagcccagccaggtccccaggaggttttcctacaagtcttgaatctggcagatgatgaggtgaaggtgacagtggtgggaaatgaaaacaattctctgttgatagagtccatcaaatcctttcagaaaacaccacactattccaaactgcacctgaaaacaaaaagccaggattttcacttccacctgaaatatcacaatttgtctctctacactgagcattctgtgcaggagaagaactggtacagtcttgtcattcgtgaagatgggaacagtatctccagcatgatggtaaaggatacagaaagcagaacaaccaatgggatgacaaccgtgaggtttgttaacactttgcataaagatgtcaacatctccctgagtacagatacctctctcaatgttggtgaagactatggtgtgtctgcttatagaactgtgcaaagaggagaataccctgcagtgcactgtagaacagaagataagaacttttctctgaatttgggtcttctagactttggtgcagcatatctgtttgttattactaataacaccaatcagggtcttcaggcctggaagattgaagacattccagccaacaaaatgtccattgcgtggcagctaccacaatatgccctggttacagctggggaggtcatgttctctgtcacaggtcttgagttttcttattctcaggctccctctagcatgaaatctgtgctccaggcagcttggctattgacaattgcagttgggaatatcatcgtgcttgttgtggcacagttcagtggcctggtacagtgggccgaattcattttgttttcctgcctcctgctggtgatctgcctgatcttctccatcatgggctactactatgttcctgtaaagacagaggatatgcggggtccagcagataagcacattcctcacatccaggggaacatgatcaaactagagaccaagaagacaaaactctgatgactccctagattctgtcctgaccccaattcctggccctgtcttgaagcattttttttcttctactggattagacaagagagatagcagcatatcagagctgatctcctccacctttctccaatgacagaagttccaggactggttttccagtacatctttaaacaaggccccagagactctatgtctgcccgtccatcagtgaactcattaaaacttgtgcagtgttgctggagctggcctggtgtctccaaatgaccatgaaaatacacacgtataatggagatcattctctgtgggtatgcaaagttatgggaattcctttataggtaactgccatttaggactgatggccctaatttttgaggtgctgatttagaggcaaaattgcagaataacaaagaaatggtatttcaagtttttttttttataagcaatgtaattatgctattcacaggggcctcaagaattggtatgtatgatgtgatctggtccagccagggcctggcttgtcagctctctaggtttgatatgactttagtaaatttgtcaatatagatggtaggaagcagaatgccattttattaaaacacaggagaagttatatctctctgattatgatagtattttatttacttatccaaaccctcctttctcagtatggatagatcatggaaaccagattagagatagtaagcattagtaaacattgttctggagaacaggaacaggtgtaagttgtagaaatcctgaagagccagtcattcttttacagagtacattcttcttagcctctatggcgctggtctatgcccttcagtgaacagttgtataaacaataattataatttgcaaccttgtcttgtcaaccttgctgatccagctttttcttattattacaccttgtcttgcttattgcagcaaatattcaataacaacaatgtttctataagtccaacttcctttattaatgtttccatttagcctcaaaaatatcaaagtagttcctttttgatgttgttttcctgatttacttttcccataagttttaaataccatttctgccttgaagcctagaaattttctttttattcaaaaaaagttacattaatgctctaggtttgaggttctaaaatggaaatgtcaatagaggagcatggtcctatgtgaggttcctatcaaaatttgtgggagtagggatggtagagcatgagggttttgtttgtgtatgtgtatggtcatgaaaaaaaattgagaaacattacctcatacacaatgaatgaatcagaggacagacacgggaatggcacgactgtgcagtgtgttactaggaaaaaagttcagaatcactgttctagagagcttcatttccattggttttaaaacattattctcatgtagaacagtgttgggtctcatactgttaatgttaatacgtaacaatgttcatgttaacaggcacctgttaatattaacagataatgttactgttaacaggtaagagaaattgctctaagtgcccaaactttatatacttcagttttaatgacaagcatttcagaaatataagagcggcagccagaccaaccagtttttccagatatcttgatgtgaacctgaccctactcctttagaagacagcctgttcatttttaaatagctttaacccaaactgttctatgaccattgtttcaagagacattaacacagttctgtaaatagaagtgtctatggacaaataagtttgggaaatgtggcatactgtatccttttcttaacatttgcatattaaagactctgagatatcctgcagtaaagacacaagataccttgtttaaattaacatgtacgctgcagaacattggtttggaaaaaactgttgagcagttcttccttgtaagtgctgagcttcctctctgaaacctcctaccattgttttttttcccctgtagctaacaagaataagtataacagccggccaggcacagtggctcatgcctgtaatcccagcactttgggaggctgagacaggtggatcacctgaggtcaggagttcgagaccagcctggccaacatggtgaaaccgtgtctctactaaaagtacaaaaattagccaggtgtgatggcaggtgcctgtaatcccagctactcgggaggctgaagcagaagaattgcttgaacccgggaggcagaggttgcaatgagccgagatcacgccatcacactctagcctgggggacaagagtgagacttcatctaaaaaaaaaaagaaaagaatatgtataccccctttttcatgtggcagatgtttagctatttggggagaactttcatggctcttccctaatcatcaagtattcaaggtaaagattctcggttcctgtaatggttcctcaccaggcataatttgtccttttaccatcctactttctgtcttctgaaaaacattctttatctgaaatacagcaattaatattaagatatcttaatatgaagtgcctggagtcaaatataacattccaaagtagtctgactggaagaactagcacctgcctttcttcaaacaatgcacttctgttaatgcagtgtaaggtaacatgagttgtttttggaaactacatcataatgtgggcttacattctagcacttatcacttaatgacagggatacatttgaggaatgcattgttaggcaattttgtcattatgcaaacatcatagagtgtacttacacaaacctatggtatagcctactacacatctaagttatatggtatagactgtttctccagctatatggtgtagactgtttctcctaggctacaaacctgcacagcatgttactgtattaaatgctgtaggcaattgtaacacaatggtatttttatacttaaacatatctaaacatagaaacggtacaaaaaactttacacattatatagatgtatcaaattattcatatgtgctctgaaaatgtctatatctgttatgtatcaattttttaaaaagtgaatgacataattcatttgaaaaaatgtggacacacaaattggaaaagaggtataaatgcagtattataatctaatgggaccacca

SEQ ID NO: 207434 - protein, 444 aa, Artificial Sequence
  derived and/or modified sequence
MKFPASVLASVFLFVAETTAALSLSSTYRSGGDRMWQALTLLFSLLPCALVQLTLLFVHRDLSRDRPLVLLLHLLQLGPLFRCFEVFCIYFQSGNNEEPYVSITKKRQMPKNGLSEEIEKEVGQAEGKLITHRSAFSRASVIQAFLGSAPQLTLQLYISVMQQDVTVGRSLLMTISLLSIVYGALRCNILAIKIKYDEYEVKVKPLAYVCIFLWRSFEIATRVVVLVLFTSVLKTWVVVIILINFFSFFLYPWILFWCSGSPFPENIEKALSRVGTTIVLCFLTLLYTGINMFCWSAVQLKIDSPDLISKSHNWYQLLVYYMIRFIENAILLLLWYLFKTDIYMYVCAPLLVLQLLIGYCTAILFMLVFYQFFHPCKKLFSSSVSEGFQRWLRCFCWACRQQKPCEPIGKEDLQSSRDRDETPSSSKTSPEPGQFLNAEDLCSA

SEQ ID NO: 207435 - DNA, 1335 bp, Artificial Sequence
  derived and/or modified sequence
atgaagttccccgccagcgtgctggccagcgtgttcctgttcgtggccgagaccaccgccgccctgagcctgagcagcacctacagaagcggcggcgacagaatgtggcaggccctgaccctgctgttcagcctgctgccctgcgccctggtgcagctgaccctgctgttcgtgcacagagacctgagcagagacagacccctggtgctgctgctgcacctgctgcagctgggccccctgttcagatgcttcgaggtgttctgcatctacttccagagcggcaacaacgaggagccctacgtgagcatcaccaagaagagacagatgcccaagaacggcctgagcgaggagatcgagaaggaggtgggccaggccgagggcaagctgatcacccacagaagcgccttcagcagagccagcgtgatccaggccttcctgggcagcgccccccagctgaccctgcagctgtacatcagcgtgatgcagcaggacgtgaccgtgggcagaagcctgctgatgaccatcagcctgctgagcatcgtgtacggcgccctgagatgcaacatcctggccatcaagatcaagtacgacgagtacgaggtgaaggtgaagcccctggcctacgtgtgcatcttcctgtggagaagcttcgagatcgccaccagagtggtggtgctggtgctgttcaccagcgtgctgaagacctgggtggtggtgatcatcctgatcaacttcttcagcttcttcctgtacccctggatcctgttctggtgcagcggcagccccttccccgagaacatcgagaaggccctgagcagagtgggcaccaccatcgtgctgtgcttcctgaccctgctgtacaccggcatcaacatgttctgctggagcgccgtgcagctgaagatcgacagccccgacctgatcagcaagagccacaactggtaccagctgctggtgtactacatgatcagattcatcgagaacgccatcctgctgctgctgtggtacctgttcaagaccgacatctacatgtacgtgtgcgcccccctgctggtgctgcagctgctgatcggctactgcaccgccatcctgttcatgctggtgttctaccagttcttccacccctgcaagaagctgttcagcagcagcgtgagcgagggcttccagagatggctgagatgcttctgctgggcctgcagacagcagaagccctgcgagcccatcggcaaggaggacctgcagagcagcagagacagagacgagacccccagcagcagcaagaccagccccgagcccggccagttcctgaacgccgaggacctgtgcagcgcctag

SEQ ID NO: 207436 - DNA, 1335 bp, Artificial Sequence
  derived and/or modified sequence
atgaagttccccgccagtgttctggcatctgtgtttctctttgtcgcggagacaacagccgcacttagtctgagtagtacttacagatctggtggagataggatgtggcaggccctcacattgctgttttccttactcccttgcgccctagtccagctaactttgctcttcgtgcatcgggacctgtcacgggaccgccctttagttttgcttctccacctgctgcagcttggccccctgttccgttgttttgaggtgttctgtatttatttccaaagcgggaacaacgaagaaccttacgtctcaatcacaaaaaaaagacagatgcctaaaaatgggctgtcagaagaaattgaaaaggaagtaggccaggccgaagggaagctgatcacgcaccggtccgccttcagtagggccagcgtaattcaggcttttcttggtagtgcgccccagctgactctgcaactatacatctcagtgatgcagcaagacgttacagttggacgctcactgctgatgacaatttcattattatccattgtatacggggccttgcgctgtaacatactggcgattaaaatcaaatacgatgagtatgaggtaaaggtgaagcccctcgcatatgtctgtatttttctgtggcgctcctttgaaatcgcaacccgggttgtggtactagtgcttttcacctcagtcctgaaaacctgggtcgttgttataattctgataaactttttttcattctttttgtacccctggatcctgttttggtgtagtggatcacctttcccggagaacatagaaaaggccctgagccgcgttggcacaaccatagtgctgtgcttcctgaccttactgtacactggtatcaatatgttctgttggtccgccgtgcagttgaagattgactcaccagatttgatttccaaatcccataactggtaccagttgctggtctactacatgattagattcatagagaatgctatcctgctgctactctggtacctattcaagactgatatctacatgtatgtctgcgccccgctgttggtcctccagctcttgatcggctactgcactgccatcttattcatgctcgtcttctaccaattttttcacccatgtaagaagttattcagtagttcagtctccgagggtttccagagatggcttcggtgcttctgctgggcctgtcgacagcaaaaaccttgcgagcccattggaaaagaagatctccagtctagtcgtgaccgtgacgaaactccctcctcttccaaaacatctcctgagccagggcagttccttaatgcagaggatctgtgttcagcatag

SEQ ID NO: 207437 - DNA, 1335 bp, Artificial Sequence
  derived and/or modified sequence
atgaagtttcctgcctctgtgctggccagcgtcttcctgtttgtggccgagaccacagctgccctgagcctgagcagcacctaccgcagcggcggggacaggatgtggcaggccctgaccctgctcttcagcctgctgccctgtgccctggtgcagctgaccctgctgtttgtgcaccgggacctgagccgggaccggcccctggtgctgctgctgcacctgctgcagctgggccccctcttccgctgctttgaggtgttctgcatctacttccagagcggcaacaatgaggagccctacgtgtccatcaccaagaagaggcagatgcccaagaatggcctgtctgaggagattgagaaggaggtgggccaggccgagggcaagctgatcacccacaggtctgccttcagccgggccagcgtcatccaggccttcctgggcagcgccccccagctgaccctgcagctgtacatctctgtgatgcagcaggatgtgacagtgggccgcagcctgctgatgaccatcagcctgctgagcatcgtgtatggagccctgcgctgcaacatcctggccatcaagatcaagtatgatgaatatgaggtgaaggtgaagcccctggcctacgtgtgcatcttcctgtggaggagctttgaaattgccaccagggtggtggtgctggtgctcttcacctctgtgctgaagacctgggtggtggtgatcatcctgatcaacttcttctccttcttcctgtacccctggatcctcttctggtgcagcggcagccccttcccagaaaatattgagaaggccctgagccgggtgggcaccaccatcgtgctgtgcttcctgaccctgctgtacacaggcatcaacatgttctgctggagcgctgtgcagctgaagattgacagcccagacctgatcagcaagagccacaactggtaccagctgctggtgtactacatgatccgcttcattgaaaatgccatcctgctgctgctgtggtacctgttcaagacagacatctacatgtatgtgtgtgcccccctgctggtgctgcagctgctgattggctactgcacagccatcctcttcatgctggtgttctaccagttcttccacccctgcaagaagctgttcagcagctctgtgtctgagggcttccagcgctggctgcgctgcttctgctgggcctgccggcagcagaagccctgtgagcccatcggcaaggaggacctgcagagcagccgggacagagatgagacccccagcagcagcaagaccagccctgagcccggccagttcctgaatgctgaggacctgtgcagcgcctag

SEQ ID NO: 207438 - DNA, 1335 bp, Artificial Sequence
  derived and/or modified sequence
atgaagttccccgccagcgtgctggccagcgtgttcctgttcgtggccgagactaccgccgccctgtcattgtcatcaacttaccgatctgggggggaccgaatgtggcaggctctcaccctgctcttcagccttcttccatgcgccctggtccaactgactcttctgtttgtccatagagatttaagtcgtgatcgcccactggtgctgctgctgcacctcctccagctgggccctctttttcgatgcttcgaggtgttttgcatctacttccagtcggggaacaacgaagaaccgtacgtttccataaccaagaagcgacaaatgccgaaaaatggcctctctgaggaaatagagaaagaagttggtcaggctgagggcaaactcatcactcacaggtctgctttctcacgtgcatcagtaatccaggcctttctgggaagcgccccccagttgacactgcagctctacatctcggtgatgcagcaggacgtcactgttggccggagcctactcatgacaatctccctgctgagtatagtctacggtgccctgcgatgcaatatcttggcaattaaaattaaatacgacgagtacgaagtgaaagtaaagccacttgcatacgtgtgtatctttctgtggagaagtttcgagattgctacacgcgtagttgtcctcgtgctttttacatcagtgctgaaaacatgggttgttgttattattttgattaattttttcagtttttttctatacccctggattcttttctggtgttctggctcccccttccctgaaaacattgagaaggctctgtcaagggtaggcactaccatcgtcctttgcttccttactctcttgtacactggcataaacatgttttgctggtccgctgtccagctgaaaattgatagcccagacctgatcagtaaatcacacaattggtatcagttgctcgtgtattatatgatccgctttatagagaatgctatcctcctgttactttggtatctcttcaaaactgatatttatatgtacgtgtgtgcacccctgcttgttctacagttgctaatagggtactgcacagcaattctgtttatgttggtgttttaccaattctttcatccgtgcaaaaaactgttttcttcgtctgttagtgagggatttcagcgctggctgagatgtttttgctgggcctgtaggcagcagaaaccatgcgagcctattggaaaggaagatttacagtcttcaagggaccgggacgagactccttccagcagcaagacctcaccggagccaggccaatttctgaacgccgaagacctgtgctccgcctag

SEQ ID NO: 207439 - DNA, 1335 bp, Artificial Sequence
  derived and/or modified sequence
atgaagtttcctgcttcagttctggctagtgtcttcttgttcgttgctgaaacgacagccgctctctccctgagctcgacttatcgtagtggtggagatcgtatgtggcaggctctgacactactgttctctctgttgccttgcgccctcgtgcaactgactctgcttttcgtgcatagagatctatcccgcgatcgacccttagtactcctgctgcaccttctgcaactgggacctctgttcaggtgcttcgaagtgttttgtatatactttcagtctggcaataacgaagaaccatatgtgtccatcacgaagaaacgccagatgccaaagaatgggctgagcgaggagatcgagaaagaggttggacaggcggaagggaaattgatcacccaccgctcagccttctcccgtgcttccgtgatccaggcctttctcgggagcgctccccagttaacactgcagctctacatctcagtgatgcagcaggacgtcaccgtgggcagaagccttctgatgacgataagcctcctgagcatcgtgtatggcgcacttcgctgcaatatcctagccattaagatcaagtacgatgaatacgaagtgaaggtgaaacccctcgcttatgtgtgtattttcctgtggcggtcgttcgaaattgcaactcgcgtcgtggtgctggtgctttttacgtccgtgctgaagacctgggttgtggtcattatactgatcaattttttctcttttttcctgtatccctggattctgttttggtgcagtggaagcccatttcccgagaacatcgaaaaggctctttctagggtggggaccaccatagtactctgcttcctgactctgttgtacactggcataaacatgttctgctggtccgcggtccagctgaaaattgattcaccagatctgatctcaaagagccataattggtaccaactattggtgtattacatgattcggtttattgagaatgccattctactcttactttggtacttgtttaaaactgatatttacatgtatgtgtgcgcacctctgttagtcctccagctcctgatagggtattgtactgctatcctgttcatgttagtcttttaccaattttttcatccatgcaaaaaactgttcagctcttcagtgagcgaagggttccaacgctggttaaggtgcttctgctgggcctgtcgtcagcagaagccctgcgaacccataggaaaagaggacctgcagtctagccgcgaccgggatgagacaccatcatcttcgaaaacctcccctgaacctgggcagttcttgaatgccgaggacctgtgttctgcctag

SEQ ID NO: 207440 - DNA, 5206 bp, Artificial Sequence
  derived and/or modified sequence
ccaggtcggccgcccccaccaggtccagttccagagcccaggccggtcggccgggcccgcgtgccctcggcgggctgcgcagagcgcgggagcggtttggggctgggcatgctgggagcccctcgggcaacggccgccgccgccacagccacacagccgccgccactgcgtccgtccccggtgagcgccgctgacgcgcggagatgaaattcccggcctcggtgctggcgtccgtgttcctgttcgtggccgagacaacggcggcgctcagcctgagcagcacctaccgctcgggcggggaccgcatgtggcaggcgctgacgttgcttttctcgctactgccttgcgcgctcgtgcagctcacgcttctcttcgtacaccgcgacctcagccgcgaccgcccgctcgtactgctgctgcacctgctgcaacttgggccccttttcaggtgttttgaagtcttctgcatctactttcagtcaggcaacaatgaagagccttatgtcagtatcaccaagaagaggcaaatgccaaaaaatggcctctcagaggagattgagaaggaggtgggccaggcagaaggcaaactaatcacccaccgatcagcgttcagccgggcgtcggtgatccaggctttcttgggctcagccccccagctgaccctacagctgtacataagtgtcatgcagcaggacgtcactgttggaagaagtctcctcatgaccatatccctgttgtccattgtgtatggagccttgcgctgcaacatcctagccatcaaaatcaagtacgatgagtatgaagtcaaagtgaagcctctggcctatgtctgtatcttcctgtggaggagctttgagattgccactcgagttgtagtcctggtcctctttacctccgtcctgaagacctgggtggtggttataatactcatcaacttcttcagtttcttcttgtacccctggatcctcttctggtgcagtggttccccattccctgagaacatagagaaggccctcagtagagtgggcaccaccattgtactatgctttctaactttactctatactggtatcaacatgttctgctggtctgctgtacagctgaaaattgacagccctgacctcatcagcaagtcccataattggtaccagctactggtgtattacatgataagattcatcgagaatgccatcctcctcctcctgtggtatcttttcaagactgacatctatatgtatgtgtgcgcacctctgttggtcctgcagctgctcattgggtactgcacagccattctcttcatgcttgtattctatcagttcttccacccttgcaaaaagctcttttcttccagtgtttctgaaggctttcagaggtggctcaggtgtttttgctgggcctgcaggcagcaaaaaccctgtgagccgataggaaaggaagatctacagtcatccagagatagagatgagacaccttctagcagtaaaacaagtcctgagcctggtcagttcttgaatgctgaagatctctgctctgcttaatgggacccaaggtctcagagcacaggcatattattttctgggtttgatactcgttattcatacaaataatgagccctacacagggaacaaggcaggaagttagctgttaactccttgtgagctgcttctctttatagagctcttgggtatgtagaactgtatgggaagaagccaggaaaacctctgagtgttgaaggggcaacccaaggcatcacagttcacaggtaaccatgttgtgttcttctaggcattactggccttttcactgacaagttacccctgaaatctgagttgtactggttagattcattaggttgaatgaggagaggggcttacctgttctctagttttccagactgctggtttgggtaacctgaagttttatgatccctgaacatagttttcacccaagagctgtcctggtgaccaaaaaagattactagggttttgccatcagcaacatcattcctgtcagagctttcagggagggctgttcaagtttggtttttgaatagacagaggtttcattttcatctcattagggcttttttgtacatagccaactgtagccaccctggcatgctgtctctaattgattcaagggcctagatttggagactttgttccttagcatccatggatgcagaaatgagtgataaatttggccatgaaagccctggaattttaggaaagttgtgattctttgatatgttgatgaaattctggatcaggaggggtgttaaaacatcaaaatgatggcgacttgtataagtagaattcttaccatcttactcctgcctccccattccttgcctgtcaggaccattttagaagagttaccttggttaacttaagggttttttagaaaaccccacagaaatctctcacccagttcaggtgtatagggaattttcattttcattatttcaaggaatagagttttcctcactaccacttgtaattagagattgacttcagaaactttttctaaattataaagacggaatgaccagaaaatttttgtctttcatggaatgcaatttgacttggcataattgtgagttaatttgataaagatctccagttgtatcctctgacaccctttaatgttctatataatttttcctttaatcggagaccctatttgtttcattaaagaggattgggtagcatatcctcaattatcttggaaaaatgcgtagatctagtgccattatttctaccattaaaatcttgaaagcgaaatacttgaaaagaggtgaccataaagatcacaccaatttagaatgaatattaaagtctgagaaatttacaaaagggactctatggactcgattttaccatatggaatagggatccacttctctgttaacctacaaaacgtatttatctggccattgcacttcggataattttcatttttaattcctcttggtgtcaaatttttaagtaatttcatgcacacaggagaaaatgcaatttgataatcagtttccactacattcggaggtcaagaaagcagtatatattctttcacaaggcatccatactgtttaatatttatagagttcatagaaatacatcaataagctcctaaattatagagcctcaattttggtttttctcatttgaaatgtttttgatttatcaatatttgtggtttaactttgtgggggtgtccaggcagtagatcattttttgtctatttttaaccaaataagaataacactcaagactatgttctccatcccaacacatcacttaccacttgcactattcttaataggcctaaaatagtgagcatatataatcaaaataatacttcatacaacatatacttccatgcactcttcatgtaatcacatatgtgcatagatacacaatcgtattacataaaacacccttgaaaatatatgactttgaataaaataaagctaccatgttaatacatcattttttgtttcttcctaattaacaaaagggctctataatgattaggagagctgtaaggccattctttagtcattccaagtgtatatttgtatcacaccagttacttgtgttcattgacaccaaatattttcaagctttttgtgagaaagagattcttgccttgaggctctgcagtggcaaatggtaggggcaatagcgctcccttttcacctgaaatgccttcagctcaggccttgggagtgaggtgtgggagtagccaccagcctcccactgactaggcatgttaggaattagacaaggatggagagactggttttttccagccttggtttggaagcttgtctcaaaaaccattacaaaatcttaaccttcaaatacattctaaatcactttaatttagaagataggtgagcaacttgagtgatcccaaaccaaactaacagtgctggtttgtccgacacccaaagcccacttcacacatttataaggacagagatttggtaactcatttgggtattttgtcagttttaacccttaatatacaggtatcccagctttgggcacatgtatgtccattcactttcaggaaggggtgtcagtactttctttctgtgtggtgaaaacataagccatggtgaactgataatttttgtttttaaattatttatattactgaattggcaaaattacagttcacactgcagagctaggttgtcctattggcataaaacaaaccagcaacttttctcatgtgtttggagttaaaatgtgtttttcagttataatttcaatttttaaatttcttggtgctttgtctaattaattacatcccataacttgtcaggatagttgctccaactgaattgctatcatttggctggatgggggtgaagtatgtcttcaaaatatattgaagtaagttcatcaaacatgtttagacttcctctcattgctggagacagcccagtgtagagattggcacttccctgtccagcactacaacttaattgctctatgcctcagtttccccataatacccttttccaacctacctcacaaggttatcagaaagatcaaattaaataatagatgtgaaaatgctttgaaaatgtttttaagtgctatgcatatttatagagttattatagttattcaaatccataagcaggttatttttatttttttactgtttgaaaagaaataagtagtgtcattcatatgagttcctgagtggatatgcgaatctttggtcttctcgacaggtgccctttctcttaccactagttgcttacaaaaatagcacccaaacacatggcacttggaagaaaaagacccactgaatctgagaaagtactttctggtggcaaatgaatttatcattttagtatagttttcgataaaggatatagcaacatcttttgataattgtgctttacaacttgaatgctgattcaaggcattatttggatgtgagtttaatcttttcagccttgtaaatgggaaaatatatattaaaattgattgtcaaatacagcatttctttggaaaccaccttaaaacattagtgctatggttatgagtgtatgtgccagtacttaccagtcaatgcattgtggatatgagctttcgttgactgcttctctgcagtcgttgatgctaataaatattgtcctgtttcttcatataataaattaatttttcaatttctccttgta

SEQ ID NO: 207441 - protein, 426 aa, Artificial Sequence
  derived and/or modified sequence
MAAVSPTTRCQESVTFEDVAVVFTDEEWSRLVPIQRDLYKEVMLENYNSIVSLGLPVPQPDVIFQLKRGDKPWMVDLHGSEEREWPESVSLDWETKPEIHDASDKKSEGSLRECLGRQSPLCPKFEVHTPNGRMGTEKQSPSGETRKKSLSRDKGLRRRRSALSREILTKERHQECSDCGKTFFDHSSLTRHQRTHTGEKPYDCRECGKAFSHRSSLSRHLMSHTGESPYECSVCSKAFFDRSSLTVHQRIHTGEKPFQCNECGKAFFDRSSLTRHQRIHTGESPYECHQCGKAFSQKSILTRHQLIHTGRKPYECNECGKAFYGVSSLNRHQKAHAGDPRYQCNECGKAFFDRSSLTQHQKIHTGDKPYECSECGKAFSQRCRLTRHQRVHTGEKPFECTVCGKVFSSKSSVIQHQRRYAKQGID

SEQ ID NO: 207442 - protein, 384 aa, Artificial Sequence
  derived and/or modified sequence
MLENYNSIVSLGLPVPQPDVIFQLKRGDKPWMVDLHGSEEREWPESVSLDWETKPEIHDASDKKSEGSLRECLGRQSPLCPKFEVHTPNGRMGTEKQSPSGETRKKSLSRDKGLRRRRSALSREILTKERHQECSDCGKTFFDHSSLTRHQRTHTGEKPYDCRECGKAFSHRSSLSRHLMSHTGESPYECSVCSKAFFDRSSLTVHQRIHTGEKPFQCNECGKAFFDRSSLTRHQRIHTGESPYECHQCGKAFSQKSILTRHQLIHTGRKPYECNECGKAFYGVSSLNRHQKAHAGDPRYQCNECGKAFFDRSSLTQHQKIHTGDKPYECSECGKAFSQRCRLTRHQRVHTGEKPFECTVCGKVFSSKSSVIQHQRRYAKQGID

SEQ ID NO: 207443 - DNA, 1281 bp, Artificial Sequence
  derived and/or modified sequence
atggccgccgtgagccccaccaccagatgccaggagagcgtgaccttcgaggacgtggccgtggtgttcaccgacgaggagtggagcagactggtgcccatccagagagacctgtacaaggaggtgatgctggagaactacaacagcatcgtgagcctgggcctgcccgtgccccagcccgacgtgatcttccagctgaagagaggcgacaagccctggatggtggacctgcacggcagcgaggagagagagtggcccgagagcgtgagcctggactgggagaccaagcccgagatccacgacgccagcgacaagaagagcgagggcagcctgagagagtgcctgggcagacagagccccctgtgccccaagttcgaggtgcacacccccaacggcagaatgggcaccgagaagcagagccccagcggcgagaccagaaagaagagcctgagcagagacaagggcctgagaagaagaagaagcgccctgagcagagagatcctgaccaaggagagacaccaggagtgcagcgactgcggcaagaccttcttcgaccacagcagcctgaccagacaccagagaacccacaccggcgagaagccctacgactgcagagagtgcggcaaggccttcagccacagaagcagcctgagcagacacctgatgagccacaccggcgagagcccctacgagtgcagcgtgtgcagcaaggccttcttcgacagaagcagcctgaccgtgcaccagagaatccacaccggcgagaagcccttccagtgcaacgagtgcggcaaggccttcttcgacagaagcagcctgaccagacaccagagaatccacaccggcgagagcccctacgagtgccaccagtgcggcaaggccttcagccagaagagcatcctgaccagacaccagctgatccacaccggcagaaagccctacgagtgcaacgagtgcggcaaggccttctacggcgtgagcagcctgaacagacaccagaaggcccacgccggcgaccccagataccagtgcaacgagtgcggcaaggccttcttcgacagaagcagcctgacccagcaccagaagatccacaccggcgacaagccctacgagtgcagcgagtgcggcaaggccttcagccagagatgcagactgaccagacaccagagagtgcacaccggcgagaagcccttcgagtgcaccgtgtgcggcaaggtgttcagcagcaagagcagcgtgatccagcaccagagaagatacgccaagcagggcatcgactag

SEQ ID NO: 207444 - DNA, 1281 bp, Artificial Sequence
  derived and/or modified sequence
atggcagcggtgagcccaactacgcgttgccaggaatctgttacattcgaggacgtggctgttgtgtttaccgatgaagaatggtcccgcctcgtgcccattcaaagagatttatataaggaagtcatgcttgagaactacaactccattgtgtcactgggcctcccagtccctcagccagacgtgatctttcagcttaaaaggggggataagccctggatggtggacttgcatggcagcgaggaaagggagtggcccgagagtgtgtcccttgattgggagacaaaaccggaaatccatgacgcatccgataaaaagagcgagggctcactccgggaatgtctaggcaggcagtccccactatgcccaaaattcgaagtccacactcctaatggccggatgggcaccgaaaaacagtctccttcaggagagacacgcaaaaaatcattgtcccgagataagggcctacgccgcaggagatccgccttgtctagagagatactgactaaggagcgtcatcaggaatgttccgattgcggtaagactttcttcgaccactcttccttgacacgacaccaacgcactcataccggcgaaaaaccctatgattgcagagaatgcggcaaagccttcagccatcgatcctccctctcgcgccatctgatgagccacacaggggaaagtccctacgagtgctccgtttgttccaaggcgttcttcgatcgatcttctctcacagtccaccagcggatccacaccggggagaagccatttcagtgcaatgagtgcggaaaggccttctttgacagaagcagcctgactcgccaccagagaatacatacgggcgaatctccttatgaatgccaccagtgcgggaaagcttttagtcagaagtcaatcctgacccgacaccagctcatacatacgggcagaaaaccatatgagtgtaacgaatgcggcaaggcattctatggtgtgtcaagtctgaatcggcatcaaaaggcccatgctggggatcctcgctatcagtgcaatgaatgcggaaaggccttcttcgaccgctcttctctcacccagcatcagaaaattcataccggcgacaagccatatgagtgctcagaatgtggcaaagctttctcacagagatgtcgactgaccagacatcaaagggtccatacgggagaaaagccttttgagtgcactgtgtgcggtaaggtcttttcttcaaagtccagtgtcatacagcaccaacgccgctacgccaaacagggcatagactag

SEQ ID NO: 207445 - DNA, 1281 bp, Artificial Sequence
  derived and/or modified sequence
atggctgctgtgagccccaccacccgctgccaggagagcgtgacctttgaagatgtggccgtggtgttcacagatgaggagtggagccggctggtgcccatccagagggacctgtacaaggaggtgatgctggagaactacaacagcatcgtgtccctgggcctgcctgtgccccagccagatgtgatcttccagctgaagagaggagacaagccctggatggtggacctgcacggcagcgaggagcgggagtggccagagagcgtgtccctggactgggagaccaagccagagatccatgatgccagtgacaagaagtctgagggcagcctgagagaatgtctgggccggcagagccccctgtgccccaagtttgaggtgcacaccccaaatggaaggatgggcacagagaagcagagccccagcggggagaccaggaagaagagcctgagccgggacaagggcctgcggaggagaagaagtgccctgagccgggagatcctgaccaaggagcggcaccaggagtgcagcgactgtgggaagaccttctttgaccacagcagcctgaccaggcaccagaggacccacactggagagaagccctatgactgccgggagtgtgggaaggccttcagccacaggagcagcctgagccgccacctgatgagccacactggagagagcccctatgaatgttctgtgtgcagcaaggccttctttgacaggagcagcctgactgtgcaccagaggatccacactggagagaagcccttccagtgcaatgaatgtgggaaggccttctttgacaggagcagcctgaccaggcaccagaggatccacactggagagagcccctatgagtgccaccagtgtgggaaggccttcagccagaagagcatcctgaccaggcaccagctgatccacactggaaggaagccctatgaatgtaatgaatgtgggaaggccttctacggcgtgagcagcctgaacagacaccagaaggcccatgctggggacccccgctaccagtgcaatgaatgtgggaaggccttctttgacaggagcagcctgacccagcaccagaagatccacactggagacaagccctatgaatgttctgaatgtgggaaggccttcagccagcgctgccgcctgaccaggcaccagagggtgcacactggagagaagccctttgaatgtactgtgtgtgggaaggtgttcagcagcaagagcagcgtcatccagcaccagaggagatatgccaagcagggcattgattag

SEQ ID NO: 207446 - DNA, 1281 bp, Artificial Sequence
  derived and/or modified sequence
atggccgccgtgagccccaccacccggtgccaggagagcgtgacctttgaggacgtggccgttgtgttcactgacgaggagtggagcagactagttccaattcaaagagacctgtacaaagaagtcatgctggaaaactacaactctatagtgtcattgggcctgccagtgcctcagcccgacgtgatattccagctcaaacggggtgataaaccatggatggtagacctccacggcagcgaggagcgtgagtggcccgagagtgtctcactcgactgggaaacaaagcccgagatacacgatgcctcggacaaaaagagtgagggcagtctgagggaatgtctcggtcgtcagtcccccctgtgcccaaagtttgaagtgcacacccccaacggccggatggggactgaaaaacagtcaccaagtggcgagacgcgtaaaaagtctctcagcagggataaagggttacggagaagaagaagcgccctgagccgcgagatcctgaccaaggaacggcatcaggaatgctccgattgtggtaagacttttttcgatcacagctctctgaccaggcaccaacgcacacatacaggagaaaagccatatgattgtagagagtgcggtaaggcattttcccataggagttccctgtcacgacatcttatgtcacacaccggtgaatctccctatgagtgctccgtctgctccaaggccttcttcgatcgaagtagtctgacggttcatcagcggatccatactggggaaaaacccttccagtgtaatgagtgtggtaaggctttcttcgaccgcagcagtctgacaagacatcagcgcattcatactggggaaagtccatacgaatgtcaccagtgtggcaaagccttctcacagaagagtattctcactcggcatcagcttatccatacgggcaggaagccctatgaatgtaatgagtgtggcaaggccttctatggcgtcagcagcttaaaccgccaccagaaggcccatgcaggcgatccccggtatcagtgcaacgaatgtggaaaagcattcttcgacagaagcagcctgacacagcatcaaaaaatccacacaggagacaagccatatgagtgctctgaatgcggaaaggcgtttagccagcgctgccgactgactcgacatcagagggtgcacactggtgagaaaccattcgaatgtactgtgtgtggtaaggtgttttcctctaagagctccgtcattcagcatcagcgccgctacgctaaacaagggattgactag

SEQ ID NO: 207447 - DNA, 1281 bp, Artificial Sequence
  derived and/or modified sequence
atggctgctgtatcaccgacaacaagatgccaggagtccgtgacttttgaagacgttgcggtcgtgttcacagatgaagagtggagccggctcgtcccaatccagcgagacttgtacaaggaggtcatgctggaaaattacaattctattgttagtttgggactacccgttccccagcccgatgtgatcttccagctgaaaaggggcgacaagccttggatggttgatcttcatggcagcgaggaaagagagtggcctgagtcagtgtccctggattgggagactaagccagagattcatgatgcctccgacaaaaagagcgaaggttccctgagggagtgtttaggaagacagagccccctgtgccctaagttcgaggtgcacactccaaacggccgtatgggaactgaaaaacagagtccatcgggcgagaccaggaagaaaagtctgtccagagataagggtctgcgtaggcggcgaagcgccctgagcagggaaatcctgaccaaggagcgccaccaggagtgctcagactgtgggaagaccttttttgaccacagctctctgactcgacaccagcgaactcacacaggggaaaagccctatgactgcagggagtgtgggaaagccttttcccacagatcttccctaagccggcatctgatgagccacacaggggaaagcccctacgagtgctccgtttgtagtaaagctttcttcgatagaagcagcctgacagtgcaccagcgtattcacactggggaaaagccatttcagtgcaacgaatgtggtaaagcctttttcgaccgatctagcctaaccagacatcagagaatccatacaggggaatcgccatatgagtgccaccaatgtggcaaagccttttcacagaaaagcatcctgacaagacatcagttgatccacactgggagaaagccgtacgagtgcaatgagtgcggaaaggctttttacggtgttagctccttgaacagacaccagaaagctcacgctggagatccccgatatcagtgtaatgaatgcggcaaagcctttttcgacaggtcttctctgacacaacatcagaaaattcacaccggggataagccttacgagtgtagcgagtgtggaaaagctttctcacagagatgccgcctaacgcggcatcaacgagtgcacacaggggagaaacccttcgagtgcaccgtatgtggcaaggtgttcagtagcaagagctccgtcattcagcaccagagacgctatgcgaagcagggaatcgattag

SEQ ID NO: 207448 - DNA, 2604 bp, Artificial Sequence
  derived and/or modified sequence
aacgccagctgactcgatttcgtctcggtcttccccagagctggacacgaggcaccatgatcagagagacacattccctgcggacggcgctcccatcggatactggagggacgcgacactagaggcaggcagtacttcagggtgaccataagtctcccaaacagccacaacggctcgctctcccagctaaggcgacagcgctgccattttggatcctgttcagccacgggaagccggcgtttgcacacattttcggacgtcatattaaagcgcaccggacgccgagacttctgggagatgaagtccttgcgaaggccccgcattgattgggagcgcagtcgccaggaccctgtgcgcaggcgcgttggtttcccgacctgaagaggcgccgtcttcccgggtcccgagcactctgtgccggaggactctgcccttgtccacaaggagagcacacaggagagaatggctgctgtgtctccgaccaccagatgccaggaatcagtgacattcgaagacgttgccgtggttttcacagatgaagagtggagtcgtctggtccccatacagagggacctctacaaggaggtgatgctggagaactataacagcattgtgtcattgggccttccagttcctcaacctgatgtgattttccaattgaagagaggggacaagccgtggatggtagatcttcatgggtctgaggagagagaatggccagagagtgtctctctagactgggaaactaagcctgagattcacgatgcttcagacaaaaaatcagaaggatcattgagggaatgccttggaaggcaaagtcctctgtgtcctaaatttgaagttcatacacccaatggcaggatgggaacagaaaagcaaagcccttcaggggagactcgtaagaaatccctctcccgggacaaaggcttgcggcggcgacggtcagccctgtccagggaaattctcactaaagagagacaccaggaatgcagtgactgtgggaagaccttttttgaccactcatccctcacccgccatcagaggactcacactggggagaagccctacgactgccgcgagtgtgggaaagccttcagccacaggagcagcctcagcagacatctgatgtcacacactggggagagcccctacgagtgcagtgtgtgctcaaaagccttctttgaccgttcgtccctaactgtccatcagcgaattcacactggagagaaaccctttcagtgcaacgagtgtggaaaagccttttttgaccgttcatcccttactcgacaccagagaattcacactggagaaagtccttatgaatgtcatcagtgtgggaaagcctttagccagaaaagtattcttactcgccatcagctaatccacactggcaggaagccttatgagtgtaacgagtgcgggaaagctttctatggtgtctcgtctctgaatagacatcagaaagctcatgctggggaccctcgctatcagtgtaacgagtgtggcaaagctttctttgaccgctcatcccttacacagcatcagaagatccacactggagacaagccatatgaatgcagcgaatgcgggaaagcctttagccagcggtgccggctcacgcggcatcagcgtgtccacacgggagagaagccctttgaatgcactgtgtgtgggaaagttttcagttcaaaatcttctgttattcaacatcaacggcgttacgccaaacagggaatagactgagttgggcaaaagcttgggtaggacaagaacttccatacaaatttgagatagatctcgcctgtcttaaagctgccatttgctcattctacccactctggctgccgttgtcctgtcctgcttctgcgccagagtgtttaataagcactcccttcctgctgtgttatagaactgtaggggaggccatggaaatgactctaaagatacaaaattttgaagaggtttgtcagacaataggatagatgttaggaggagacacacctcttgtctgagaacctaggccccaggtatcactgcactttaagaaactggaggctgcaacaggagggaaaggcagaatgatatcacagcagtactatttttttttttcagaacatttgttttgatggctgttagtccccctctcttggagcattttggggcactaatcttgttctcttgtgtcccagcttttagacctcttacttccactgctagtagctagcacttactgagcacctgcgatgaggtaaagactcagctaagggttttacaggaagtagattaattgatcctgtcaccaaccatatgaagtaggcactgttaccatctgcatctccagatgagcaccctgaggtttagagagattaaatcacttgcccaaggtgaaccagctggtaaaaggtgatgccaggtcttgaagacaggtccaccttcaaaatctattctctttaccattatgctcgatggtttgtttgttttataatttatgtatatgtattatcctctcaactagattgtaagcacttggaggtgtgacttacaggtctttgtatctcacacagtgccttgctaataggtgctcaataaatatttatatgagtg

SEQ ID NO: 207449 - DNA, 3888 bp, Artificial Sequence
  derived and/or modified sequence
tctcccaacgccagctgactcgatttcgtctcggtcttccccagagctggacacgaggcaccatgatcagagagacacattccctgcggacggcgctcccatcggatactggagggacgcgacactagaggcaggcagtacttcagggtgaccataagtctcccaaacagccacaacggctcgctctcccagctaaggcgacagcgctgccattttggatcctgttcagccacgggaagccggcgtttgcacacattttcggacgtcatattaaagcgcaccggacgccgagacttctgggagatgaagtccttgcgaaggccccgcattgattgggagcgcagtcgccaggaccctgtgcgcaggcgcgttggtttcccgacctgaagaggcgccgtcttcccgggtcccgagcactctgtgccggaggaatcagtgacattcgaagacgttgccgtggttttcacagatgaagagtggagtcgtctggtccccatacagagggacctctacaaggaggtgatgctggagaactataacagcattgtgtcattgggccttccagttcctcaacctgatgtgattttccaattgaagagaggggacaagccgtggatggtagatcttcatgggtctgaggagagagaatggccagagagtgtctctctagactgggaaactaagcctgagattcacgatgcttcagacaaaaaatcagaaggatcattgagggaatgccttggaaggcaaagtcctctgtgtcctaaatttgaagttcatacacccaatggcaggatgggaacagaaaagcaaagcccttcaggggagactcgtaagaaatccctctcccgggacaaaggcttgcggcggcgacggtcagccctgtccagggaaattctcactaaagagagacaccaggaatgcagtgactgtgggaagaccttttttgaccactcatccctcacccgccatcagaggactcacactggggagaagccctacgactgccgcgagtgtgggaaagccttcagccacaggagcagcctcagcagacatctgatgtcacacactggggagagcccctacgagtgcagtgtgtgctcaaaagccttctttgaccgttcgtccctaactgtccatcagcgaattcacactggagagaaaccctttcagtgcaacgagtgtggaaaagccttttttgaccgttcatcccttactcgacaccagagaattcacactggagaaagtccttatgaatgtcatcagtgtgggaaagcctttagccagaaaagtattcttactcgccatcagctaatccacactggcaggaagccttatgagtgtaacgagtgcgggaaagctttctatggtgtctcgtctctgaatagacatcagaaagctcatgctggggaccctcgctatcagtgtaacgagtgtggcaaagctttctttgaccgctcatcccttacacagcatcagaagatccacactggagacaagccatatgaatgcagcgaatgcgggaaagcctttagccagcggtgccggctcacgcggcatcagcgtgtccacacgggagagaagccctttgaatgcactgtgtgtgggaaagttttcagttcaaaatcttctgttattcaacatcaacggcgttacgccaaacagggaatagactgagttgggcaaaagcttgggtaggacaagaacttccatacaaatttgagatagatctcgcctgtcttaaagctgccatttgctcattctacccactctggctgccgttgtcctgtcctgcttctgcgccagagtgtttaataagcactcccttcctgctgtgttatagaactgtaggggaggccatggaaatgactctaaagatacaaaattttgaagaggtttgtcagacaataggatagatgttaggaggagacacacctcttgtctgagaacctaggccccaggtatcactgcactttaagaaactggaggctgcaacaggagggaaaggcagaatgatatcacagcagtactatttttttttttcagaacatttgttttgatggctgttagtccccctctcttggagcattttggggcactaatcttgttctcttgtgtcccagcttttagacctcttacttccactgctagtagctagcacttactgagcacctgcgatgaggtaaagactcagctaagggttttacaggaagtagattaattgatcctgtcaccaaccatatgaagtaggcactgttaccatctgcatctccagatgagcaccctgaggtttagagagattaaatcacttgcccaaggtgaaccagctggtaaaaggtgatgccaggtcttgaagacaggtccaccttcaaaatctattctctttaccattatgctcgatggtttgtttgttttataatttatgtatatgtattatcctctcaactagattgtaagcacttggaggtgtgacttacaggtctttgtatctcacacagtgccttgctaataggtgctcaataaatatttatatgagtgaatgacttttctacttaccaaattctctccattcagaacacctcttggatttgcatactttctctgaattcacagcccagcctatacttttatcatccccagctcccactcctggcagcagtagctttctaattccagttcttcctgctttattgaagagggatgtgctaagctgtggtacagtaacaagcccgcagagagctatgtctcccttaaaacctgacgggaaccattctgtcttattctatcctcattatttggaacatctggcttccaaagtcaccacaagggcggaagagaaagctagaggaatttgtaggatattttcttagacccaggcttacatcacttctgtccacatctaataagccagaacccagcacctagaagctaggaaagtaaacaagcacctcgaaagttggttaataccaagaacctctctcacagttatattttgcatactactgttaagccagtctttgcaaatgaccccttcctgcccatcactgccttcctcaagacctaaaatagctccctatttagtgaaaaattatctgaatatttaaggtctgccttaacgtgatccccattgctgaattttacctcctgactccaaaaactcttctcttccctgggcccagtcctatttttttttttttttttttttttgtgagacagagtctcactctgtcacccaggttggaatgcaatggcacaatctccgctcactgcaagctccgcctcccgggttcacgccattctcctgcctcagcctcccgaatagctgggactacaggtgcccgccaacacgcccggctaattttttgtatttttagtagagacggggtttcaccgtgttagccaggatggtctcaatctcctgacctcgtgatccgcccgcctcggcctcccaaagtgctgggattacagacgtaagtcaccgtgcccggcctatatttttattttattaaaggttaggcactagatgaccttgactctaggcatctgcattctcttgatctttgcttagggtgaagctcagaaaaggacttggttctgaaaggctgtctggaattagattgtcctacgtgattcccagtgaattgagatgaatttcctctggaagttcaagtcggattcgagaagctgaattaccaaacagaccctccccaacctactaacgaccctattactctgttcaccctagagcagacgaacggcagggaagacttgatctgtggacttttgaaagcaacttgaggaaaaacacataacagaatctataggtgtggacaatatgtgatattgctaaataatgtcaagtaggaaataaaagagactattgacaaa

SEQ ID NO: 207450 - protein, 1198 aa, Artificial Sequence
  derived and/or modified sequence
MDEETRHSLECIQANQIFPRKQLIREDENLQVPFLELHGESTEFVGRAEDAIIALSNYRLHIKFKESLVNVPLQLIESVECRDIFQLHLTCKDCKVIRCQFSTFEQCQEWLKRLNNAIRPPAKIEDLFSFAYHAWCMEVYASEKEQHGDLCRPGEHVTSRFKNEVERMGFDMNNAWRISNINEKYKLCGSYPQELIVPAWITDKELESVSSFRSWKRIPAVIYRHQSNGAVIARCGQPEVSWWGWRNADDEHLVQSVAKACASDSRSSGSKLSTRNTSRDFPNGGDLSDVEFDSSLSNASGAESLAIQPQKLLILDARSYAAAVANRAKGGGCECPEYYPNCEVVFMGMANIHSIRRSFQSLRLLCTQMPDPGNWLSALESTKWLHHLSVLLKSALLVVHAVDQDQRPVLVHCSDGWDRTPQIVALAKLLLDPYYRTIEGFQVLVEMEWLDFGHKFADRCGHGENSDDLNERCPVFLQWLDCVHQLQRQFPCSFEFNEAFLVKLVQHTYSCLFGTFLCNNAKERGEKHTQERTCSVWSLLRAGNKAFKNLLYSSQSEAVLYPVCHVRNLMLWSAVYLPCPSPTTPVDDSCAPYPAPGTSPDDPPLSRLPKTRSYDNLTTACDNTVPLASRRCSDPSLNEKWQEHRRSLELSSLAGPGEDPLSADSLGKPTRVPGGAELSVAAGVAEGQMENILQEATKEESGVEEPAHRAGIEIQEGKEDPLLEKESRRKTPEASAIGLHQDPELGDAALRSHLDMSWPLFSQGISEQQSGLSVLLSSLQVPPRGEDSLEVPVEQFRIEEIAEGREEAVLPIPVDAKVGYGTSQSCSLLPSQVPFETRGPNVDSSTDMLVEDKVKSVSGPQGHHRSCLVNSGKDRLPQTMEPSPSETSLVERPQVGSVVHRTSLGSTLSLTRSPCALPLAECKEGLVCNGAPETENRASEQPPGLSTLQMYPTPNGHCANGEAGRSKDSLSRQLSAMSCSSAHLHSRNLHHKWLHSHSGRPSATSSPDQPSRSHLDDDGMSVYTDTIQQRLRQIESGHQQEVETLKKQVQELKSRLESQYLTSSLHFNGDFGDEVTSIPDSESNLDQNCLSRCSTEIFSEASWEQVDKQDTEMTRWLPDHLAAHCYACDSAFWLASRKHHCRNCGNVFCSSCCNQKVPVPSQQLFEPSRVCKSCYSSLHPTSSSIDLELDKPIAATSN

SEQ ID NO: 207451 - DNA, 3597 bp, Artificial Sequence
  derived and/or modified sequence
atggatgaggagacccggcactcactggaatgtatccaggccaatcagatcttccctaggaagcagcttattagagaagacgagaatctgcaggtgccattcctcgaactccatggtgaaagcactgagtttgtgggacgtgcagaggatgccatcatcgccctgtcaaattatcgtttacatatcaagttcaaggaatccctggtaaacgtgcctctccagctgatagaatctgtggagtgccgcgacatttttcagttacacctgacatgcaaggattgtaaagtcatacgttgccagttctccacattcgagcagtgtcaggagtggctgaagagactaaacaatgcaatccgacctccagcaaaaatcgaggacctgttttcattcgcttaccacgcttggtgcatggaggtatacgcctctgagaaggagcagcacggagacctctgtcggcccggggagcatgtaacttcccgattcaagaatgaggtggagcgaatggggtttgacatgaacaatgcctggcgaatttctaacattaacgagaaatataagttatgtggcagttatccccaggaactcatcgtgccagcttggatcacggacaaggagctggaaagcgtgagtagttttcggtcatggaaaaggattccagccgtcatttatagacatcagagcaacggcgcagtgatcgcccggtgcggccagcctgaggtgtcctggtggggctggcggaatgccgacgacgagcatctggtgcagtctgtggccaaggcctgcgcctctgactctcgctcgagcggttcgaagctgtcgactcggaacacatctcgggattttcctaatggcggagacttatccgacgtggagttcgacagctccttaagcaatgcatccggtgctgaatctcttgcaattcagccacaaaagctcctgatcttagacgctcggtcctacgctgccgccgtcgcgaaccgagctaagggcggcgggtgtgagtgtcccgaatactacccgaattgtgaagtggtgttcatgggcatggccaacatacactctatcagacgctccttccaaagcctgaggctgctttgcactcaaatgcccgaccctggtaactggctgtcagctttggagagcactaagtggctgcatcacttgagcgttcttcttaagtcagccttgctggtggtgcacgcagtagatcaagaccagcgccccgtgcttgtgcactgttccgatgggtgggatagaaccccacagatcgttgcattggcaaagttactgctggacccttattatcgcaccattgaggggttccaggtcttggtcgagatggagtggctggattttggacacaaatttgctgatagatgcggacatggggagaacagcgacgacctaaatgaaaggtgtccggttttcctccagtggctggattgcgtgcatcagttacagcgacagttcccctgttcttttgagttcaacgaggcattcctcgttaagttggtacaacatacatacagctgcctgttcggcacttttttgtgcaacaacgcaaaggagcgcggtgaaaagcatactcaggagcggacttgtagcgtgtggtctctgcttcgagcgggtaataaggctttcaaaaacttactctattcctcccagtcagaagcggtgctttacccagtttgtcacgttagaaatctgatgctttggtccgccgtttacctgccatgcccgagccccaccactcctgttgatgactcctgcgccccctaccccgcccccggcactagtccagatgatcctcccctgtcacggctcccaaaaaccaggtcttacgacaatctcacgactgcatgcgacaatactgtccccctcgcatcacgcagatgtagtgaccccagcctgaatgagaaatggcaggaacaccggagaagtctggaactttctagtttggccgggcccggggaagaccccctgtctgctgactccctaggcaaacccacacgggtacctggcggcgccgagctttccgtggctgcaggagtggctgaaggacagatggaaaatatactgcaggaggcaacaaaggaggaatccggggttgaggagccagcccacagggccggtatcgaaatccaggagggaaaagaggacccactgttggagaaggagagtcgacgtaagactccggaggccagcgccattgggctgcatcaggaccctgagcttggcgatgccgccttgcggtctcatctcgacatgagctggcctctgttttcccaaggaatatctgagcagcagtctggcctgtcagttctcctgtcatcactccaggtcccccctaggggtgaggactccctcgaggtgcccgtggagcagtttcggattgaagaaatagctgaaggcagggaggaggctgtcctgcctatccccgtggatgctaaggtgggatacggcacttcacagtcatgctcccttttgccctcccaggtgcccttcgagacccgcggccccaacgttgatagctccacagacatgctggtcgaagataaagtgaaatctgtgtcaggccctcagggacaccatagatcttgtctcgtgaactctggaaaggacagacttccccagacaatggaacccagtccgtcagagacttcattggtggagcgacctcaggtgggcagcgttgtgcatcggacaagcctgggctcaaccctcagtctgactcggtcaccatgcgccctcccccttgcagagtgtaaagaaggtttggtgtgcaacggggcgcctgagaccgagaatcgagcatcagagcagcctccaggcctcagcaccctgcagatgtaccctacgcccaacgggcactgcgcaaacggcgaagccggccgctctaaggattccctctctaggcagctctcggcgatgtcatgctcgtccgctcatctgcattctcgcaatctgcatcataaatggctgcatagtcactctggaagaccttctgcgaccagcagccccgatcagcccagcagatcccatctggacgacgatggaatgagcgtgtatacggatacaatacagcagcggctgcgccagatcgagtcaggtcaccagcaagaagtcgaaaccttgaaaaaacaggtgcaggagctgaagtccaggctcgagagccagtacctaacatcctccttgcatttcaatggggattttggggacgaagtaaccagcatccctgactctgaatctaacctggatcaaaattgtcttagcagatgtagcactgagatatttagcgaggcttcatgggaacaagtcgacaagcaggatactgagatgactcggtggttgcctgaccatctggctgcacactgctatgcctgcgacagcgccttttggcttgcaagcaggaaacaccactgtaggaactgtggaaacgtgttctgtagttcctgctgcaatcaaaaagtgcctgtgccgtcccagcagcttttcgaaccctccagagtgtgtaaatcttgctacagctccttgcatccaacttcctctagcattgatctggaattggataagccgatagcagccacaagtaactag

SEQ ID NO: 207452 - DNA, 3597 bp, Artificial Sequence
  derived and/or modified sequence
atggatgaggagaccaggcacagcctggagtgcatccaggccaaccagatcttccccaggaagcagctgatccgggaggatgagaacctgcaggtgcccttcctggagctgcacggggagagcacagaatttgtgggccgggcagaagatgccatcatcgccctgagcaactaccgcctgcacatcaagttcaaggagagcctggtgaatgtgcccctgcagctgattgagagcgtggagtgccgggacatcttccagctgcacctgacctgcaaggactgcaaggtgatccgctgccagttcagcacctttgagcagtgccaggagtggctgaagaggctgaacaatgccatccggcccccagccaagattgaagatctcttctcctttgcctaccacgcctggtgcatggaggtgtatgccagcgagaaggagcagcacggggacctgtgcaggcctggagagcacgtgaccagccgcttcaagaatgaggtggagaggatgggctttgacatgaacaatgcctggaggatcagcaacatcaatgagaagtacaagctgtgtggcagctacccccaggagctgattgtgcctgcctggatcacagacaaggagctggagagcgtgtcctccttccgctcctggaagaggatcccagctgtgatctaccgccaccagagcaatggagctgtgattgcccgctgtggccagcctgaggtgtcctggtggggctggagaaatgctgatgatgagcacctggtgcagagcgtggccaaggcctgtgccagtgacagccgcagcagcggcagcaagctgagcaccaggaacaccagccgggacttccccaatggaggagacctgagtgatgtggagtttgacagcagcctgagcaatgccagcggggctgagagcctggccatccagccccagaagctgctgatcctggatgcccggagctatgctgctgctgtggccaacagagccaagggcggcggctgtgagtgcccagagtactaccccaactgtgaggtggtgttcatgggcatggccaacatccacagcatccgccgctccttccagagcctgcggctgctgtgcacccagatgccagaccccggcaactggctgagcgccctggagagcaccaagtggctgcaccacctgtctgtgctgctgaagagcgccctgctggtggtgcatgctgtggaccaggaccagaggcctgtgctggtgcactgcagtgatggctgggacaggaccccccagatcgtggccctggccaagctgctgctggacccctactaccgcaccatcgagggcttccaggtgctggtggagatggagtggctggactttggccacaagtttgctgacagatgtggccacggggagaacagtgatgacctgaatgaacgctgccctgtgttcctgcagtggctggactgtgtgcaccagctgcagaggcagttcccctgcagctttgagttcaatgaggccttcctggtgaagctggtgcagcacacctacagctgcctgtttggcaccttcctgtgcaacaatgccaaggagcggggggagaagcacacccaggagaggacctgcagcgtgtggagcctgctgcgggccggcaacaaggccttcaagaacctgctgtacagcagccagagcgaggccgtgctgtaccctgtgtgccacgtgaggaacctgatgctgtggagcgctgtgtacctgccctgccccagccccaccacccctgtggatgacagctgtgccccctacccagcccctggcaccagcccagatgatcctcccctgagccggctgcccaagaccaggagctatgacaacctgaccacagcctgtgacaacacagtgcccctggccagccgccgctgcagcgaccccagcctgaatgagaagtggcaggagcacagaagaagcctggagctgagcagcctggccggccctggagaggaccccctgtctgctgacagcctgggcaagcccaccagggtgcctggaggagctgagctgtctgtggccgccggcgtggccgagggccagatggagaacatcctgcaggaggccaccaaggaggagagcggcgtggaggagcccgcccaccgggccggcatcgagatccaggagggcaaggaggaccccctgctggagaaggagagcaggaggaagaccccagaggccagcgccatcggcctgcaccaggaccctgagctgggagatgctgccctgcggagccacctggacatgtcctggcccctcttcagccagggcatcagcgagcagcagagcggcctgtctgtgctgctgagcagcctgcaggtgcccccaagaggagaggacagcctggaggtgcctgtggagcagttccgcatcgaggagattgctgagggccgggaggaggccgtgctgcccatccctgtggatgccaaggtgggctacggcaccagccagagctgcagcctgctgcccagccaggtgccctttgagacccggggccccaacgtggacagcagcacagacatgctggtggaggacaaggtgaagtctgtgtctggcccccagggccaccacaggagctgcctggtgaacagcggcaaggaccggctgccccagaccatggagcccagccccagcgagaccagcctggtggagcggccccaggtgggctctgtggtgcacaggaccagcctgggcagcaccctgagcctgaccaggagcccctgtgccctgcccctggccgagtgcaaggagggcctggtgtgcaatggagcccctgagacagaaaatagagccagcgagcagcccccaggcctgagcaccctgcagatgtaccccaccccaaatggccactgtgccaacggggaggccggccgcagcaaggacagcctgagccggcagctgagcgccatgagctgcagcagcgcccacctgcacagcaggaacctgcaccacaagtggctgcacagccacagcggccggcccagcgccaccagcagcccagaccagcccagccgcagccacctggatgatgatggcatgtctgtgtacacagacaccatccagcagaggctgcggcagatcgagagcggccaccagcaggaggtggagaccctgaagaagcaggtgcaggagctgaagagccggctggagagccagtacctgaccagcagcctgcacttcaacggggactttggagatgaggtgaccagcatcccagattctgagagcaacctggaccagaactgcctgagccgctgcagcacagagatcttcagcgaggcctcctgggagcaggtggacaagcaggacacagagatgacccgctggctgcctgaccacctggccgcccactgctacgcctgtgacagcgccttctggctggccagcaggaagcaccactgcaggaactgtggaaatgtgttctgcagcagctgctgcaaccagaaggtgcctgtgcccagccagcagctgtttgagcccagccgggtgtgcaagagctgctacagcagcctgcaccccaccagcagcagcattgacctggagctggacaagcccatcgccgccaccagcaactag

SEQ ID NO: 207453 - DNA, 6018 bp, Artificial Sequence
  derived and/or modified sequence
ggctcggcgtcgggagcgcgctctgtgtggccgctgccgccatgttgttgtggttgtgagaaggcggcggcggcggcggagtagcagccggacgagacgtcccagcggctcaggcgctgcccagcgccggccctggcagggagcctggtggggtggcggagggggagactgtgccgtggagggcctcgccatgtcctgctgcccgacttccttgtgaaacctcctagtagaaaaagttcttgggacaaacttcatttgacttcaccataagggaaagaagagagccttgttggacactgaagaagggacggggatttctcctcctaatctgggcctcttgtcatggatgaagagactcggcacagccttgagtgcatccaggccaatcagatctttcccaggaagcagctgatccgggaggatgagaatcttcaggttcctttccttgaacttcatggagagagcacagagtttgtgggccgtgccgaggatgccatcattgccctttccaattacagacttcacatcaagttcaaggagtctcttgttaatgttccattacagcttatagaaagtgttgaatgccgagatatatttcagcttcatttgacttgcaaagactgcaaagttatcaggtgtcagttttcaacctttgagcagtgtcaagagtggctgaagagactgaacaacgcaatccgaccacctgctaaaatagaagatctcttctcatttgcataccatgcttggtgcatggaggtctatgccagtgaaaaagagcaacatggagacctgtgcagaccaggggagcatgtaacttcaaggtttaaaaacgaggtggagaggatgggttttgatatgaacaacgcctggaggatttccaacatcaatgagaagtacaaattatgtggtagctatcctcaagagctcatagtgcctgcctggatcactgacaaagaactggaaagtgtatcaagtttcaggtcctggaagcgcatccctgccgtcatctacaggcaccagagcaatggagctgtcattgcccgctgtggacagccagaggttagctggtggggctggcgaaatgcagatgatgagcatctggtacagtcagtagccaaagcttgtgcctctgactcccgatcgagtggcagcaagctgtcaactaggaacacttctcgagactttcccaatgggggagacctttctgacgtggagttcgattcttctctgtcaaatgcttcaggagcagagagtttagccatccaaccgcagaagcttttgatcttggatgcacgctcctatgcagctgctgtggcaaaccgagccaaaggaggaggctgcgaatgcccagagtattacccaaactgtgaagttgtgtttatggggatggcaaacattcattctattcggaggagttttcagtctctgcggttgctgtgcactcagatgccagatccgggaaattggctatcagctcttgaaagcacaaaatggctccatcacttgtctgtgcttctgaaatcagcgcttctggtagtgcatgctgtggatcaggatcagcggccggtgctagtacactgctcagatggctgggaccgcaccccccagattgtggcattggctaagctcttgctggacccttattaccgaaccatagagggtttccaggtcctcgtggaaatggagtggctggattttggccataaatttgctgaccggtgtggtcatggggagaactcggatgatctgaatgaacgttgcccagtgtttctgcagtggcttgactgtgttcatcagcttcagaggcaatttccttgctcttttgagttcaatgaagcattccttgtgaaactggtgcagcatacctattcctgcctgtttggaacattcctgtgcaacaacgccaaggagagaggggaaaagcatactcaggaacggacatgttccgtgtggtcacttcttcgggcaggcaacaaggctttcaaaaacctactgtattcctctcagtcagaagccgtgctgtaccctgtgtgccatgtgcgtaacctgatgctgtggagtgcagtgtacctgccctgcccatccccaaccacccctgtggacgacagctgtgcaccatacccagccccaggcaccagccctgatgatccccccctgagccggctaccaaagactagatcatacgacaatctgaccacagcctgtgacaacacagtgcctctggccagccggcgctgcagcgaccccagcctgaacgagaagtggcaggagcaccggcgctcactagagctgagcagcctggctggccctggagaggatcccctttctgccgacagcctagggaagcccaccagagtgccggggggtgccgagctttctgttgcagccggagtagctgaggggcagatggagaacatcttgcaggaggccaccaaagaggagagtggagtagaggaacctgcccacagggcaggcattgagatacaggagggtaaagaggaccctctcttagaaaaggagagcaggaggaagacacctgaggcctcagccattggacttcaccaagacccagaactgggtgatgctgctctgaggagccatctggatatgagctggcctctgttctcacagggcatttctgaacagcagagtgggctcagtgttctcctcagttctctccaggtcccccccaggggagaggattccctggaggtccctgtggagcagtttcgaatagaagagattgcagagggtagggaggaagcagttcttccaatcccagtagatgcaaaagttggctatggtacctcacagtcatgttctctgctaccttcccaagtcccttttgagaccagaggaccaaacgtggacagttctacagacatgttagtggaagataaggtgaagtcagtaagtgggccccaaggtcatcatagatcttgccttgtaaatagtggcaaggacaggcttcctcagaccatggaacccagcccttcagagacaagcctggtcgagaggccccaagtggggtctgtggtgcataggacttcccttggcagcactctcagcctgacacgttccccttgtgccttgcctttagccgaatgtaaagaggggcttgtgtgcaatggtgccccagagactgaaaacagggcctcagagcagcccccaggtcttagcaccctccagatgtaccccacacccaatgggcattgcgccaatggggaggctggtaggagcaaggactcactgagccgtcagctgtctgctatgagctgcagctctgcccacttacactcaaggaacttgcaccacaagtggctgcatagccactcaggaaggccatctgcaaccagcagccccgaccagccttcccgcagccacctggacgatgatggcatgtcagtgtacacagacacgatccaacagcgcctgcgtcagattgagtcaggccaccagcaggaagtagaaactttgaagaaacaagtccaggagctgaagagtcgcctggagagccagtacctgaccagctccctacactttaatggagactttggggatgaggtgacttcaatccccgactcggaaagcaatctggatcagaactgtttgtctcgctgcagcacagagattttctctgaagccagctgggagcaggtggataaacaggacacagagatgacccgttggcttcctgaccacctggccgcccactgctatgcgtgcgacagtgccttctggcttgccagcaggaagcaccactgcaggaattgtgggaacgtattctgctccagttgttgtaaccagaaggttccagttcccagccagcagctctttgaacccagtcgagtatgcaagtcttgctatagcagcctacatcccacaagctccagcattgaccttgaactggataagcccattgctgccacttccaactgaagctcagtgacctgggtgggcagtggccaagctgctgttcctatgacaggcccactcaacctgggcagaccgagaggcccgtgcactttggaatgggagcgtggaaccacctgtacagagtgacagatttgggatgcaccactggattgtagattgatttttctttcctgtccccctactccctccctaccttttccatcctcctcctctgccttcaaaaaaggaaactttcccttggttgtcttaattttttttttttttgatggaagaccaagggttgccaggcccactgtaactgccgagctgcctgctgtcacgtgacactgagggatggcttgtttcttccgggtgggaggatggtggtcagagccaggagtatggagatctgagaccgtgagcagggaagaaagccagtgctaacatgcaaccattcctcacgccaccgccacatcagagctggttgggaaccctttgctgctggggaggctggaagcatattccccaagagcactgccctgggcatcatctccctcctgcgaggagctgagccagtcccctcacagatggataaatgaggctgatgtttggagggagaggcacacggtaaatggcatccccttaggcgcctctttgggaaaggaaagtggatgctcctttgaggcaggcgaggggctgggagtgggtagccgtcatgttgtcccccgtgggatcccatttttaacttgacccagattgtcttgggctccttttactttcagggggctgctttcctgggccaggctgtgtagcacttcccaccctcaggcatgagtacagactggtcaaaatgtttatgcagtcaaggccaaagcctgccctgagcccagacacacctgggtccccattctggggcctggtcccctaaacaatctcttcctcagccagcacagggaaatccagactcagggttccagaaatcccccgttcccaaaccaaaccaatcatggatcttccctttaaggggtagaatcagcctttagagttacaagcccctggaaaagggagcaggtcccatacaatcagcctttctcctcttctcttcttgggacaggaataactgctgagcagtccccctttgccactcctggctgtctgagtgggcacttgtctggctgctggccagcagtgaagggccacttggtgacttcgtagggttccttagagaagtgacatggccttgaggagattcagggcacctttcctcagtgagctttgatatggtccaaaaacagccttaaatcaagaatatttgtggaggtaggtgtggggaaggttggagaagagttaggtttgtgctttgtaatcttggcatccatgttttgtgcctgccctccctcttggggaggccatgcttgactctgctgaaagctgctaactggtgacagggtggatcatggtgaggactaggggtaaggtcagggaatgcttaagctctggccctgccctgtattcctcttccccttggtagcagttccctgaccaagggcaaggtgtgtctcaggaaggtggttctgtgcatgcctgggtgtggttaaggcgtggcccagaaggcttccctggtgctctcagtccaggcaaagcccagagcatctgagcacgtctctgacttccagtggcaacacagtttgaacgtggtgaaacagggtgtagttcttttccacattctgtgtcatctagtcgtgcaggtagggaaaaagttggtctaattgaagattgtgcatttcctagtgacaggtgccaagaggttatgatacgggtttcttgggtctgatgtacagtgtgaataaatgcttgcagctcttagctcttttttgatcgatgaagcacttttttattaatattttcctttgttaaaggaggaaccgtaactctccatagctgtacatataacccttttctcctaaagaggagtcagtcagtgctcctatatttttcattttttgtcaaagcaagaagtaaatactttagaattgttaaatatataaataaagcaaataaagttgagtgttccacatggtagcatttgctaacacttcctaa

SEQ ID NO: 207454 - DNA, 3597 bp, Artificial Sequence
  derived and/or modified sequence
atggacgaggagacccggcacagcctggagtgcatccaggccaaccagatcttcccgcggaagcagctgatcagggaagatgagaacctgcaggtcccttttctggagctgcacggtgaatctacagagttcgtgggtagggccgaggacgcaattattgctttgagcaactacagactgcatattaagttcaaagagtcactggtcaatgtgccactacagctgatcgaaagcgttgagtgccgggacatctttcagctgcacctgacttgcaaggattgcaaggtgattagatgtcagttcagcactttcgagcagtgccaggaatggctgaagcggttaaataatgccatacgaccacctgcaaaaatcgaagacttgttttcttttgcctatcacgcttggtgcatggaggtctacgctagtgaaaaagaacagcacggggatctgtgtcgccccggcgaacacgtgactagccgcttcaaaaatgaggtagaacgaatgggctttgatatgaacaatgcctggcggatatccaacattaatgaaaagtacaagttgtgcggctcctatccacaggaactcatcgtgcctgcctggatcacggacaaagagcttgaaagtgtgtcttctttccgcagctggaaacggattccggccgttatttataggcaccaaagcaatggagccgttattgcacgctgtggccagccggaggtatcctggtggggatggcgcaatgctgacgacgagcaccttgttcaatccgtggccaaggcgtgtgcatccgactctcgatcctctgggagtaaactatctacaaggaacacaagtagagatttccctaacggaggggacttgtccgatgtcgaatttgactcaagcctatccaacgcaagtggtgctgagtcgttggccatacagcctcagaaattgctcattcttgatgcccgatcctacgctgcagcagtggcaaatagagccaaaggtggagggtgtgagtgtccggaatactaccccaattgtgaggtagtgttcatgggtatggctaatattcatagcattagacggagcttccaatctctgaggctgttatgcacacagatgccagatcctggcaattggttgagcgccctggaatccacaaaatggctgcatcatttgagtgtgcttctgaaaagtgctctgttggtggtacatgccgtcgaccaggaccaaagaccagtcttggtgcattgctccgatggatgggatcggacaccacagattgttgctctggccaagttgctccttgatccctattataggaccattgagggctttcaggtgctcgtcgagatggagtggctggattttgggcataaattcgctgaccgatgcggtcatggggagaactcagatgacctcaacgaacggtgccctgtgtttcttcaatggctagactgtgtccaccagctccaacgccagttcccctgcagttttgagttcaacgaagcttttctggtcaaactcgtacagcatacgtatagttgcctgttcggcaccttcctgtgcaataacgccaaggaaaggggtgaaaagcacacccaagagcggacgtgcagcgtgtggtctctgctccgagcaggtaataaggctttcaaaaacctgctgtactctagccagagtgaggccgtcctctacccagtgtgtcacgtgcgaaacctcatgctctggtcagccgtgtacctgccatgcccgtctccaacaacaccggtagatgactcttgtgcaccgtatcctgctcccggtacgtctcccgacgacccacctttgagccgtctgcctaagacacgttcctacgataatctgacaacagcgtgcgataatactgtgccactggcttccaggagatgcagcgaccctagcctcaatgaaaagtggcaggaacaccggcgatcccttgagctgtctagcctcgcggggcccggtgaagaccctctgtccgcagatagcctggggaaaccgactagagtccccggcggcgccgagctttccgtagctgccggcgtggccgaaggccagatggagaacatactacaggaagcgaccaaagaggagtccggtgtcgaggagcctgctcatcgtgccggcattgagattcaggagggaaaggaggatcccctcctcgagaaagagagtagaagaaaaacccctgaagcttcagctatcggactgcaccaggatcccgaactgggtgatgctgcgttaaggagtcatcttgatatgtcctggccgcttttttcacaaggcatttcagaacagcagtcaggcctgagcgttttgcttagctctctgcaggttccaccaagaggagaagattcactggaggtgccagtagagcagtttcgaatcgaagagattgcagaggggcgagaagaagccgtactgccaatacccgtcgatgcgaaagtcgggtatggtacatcccaaagttgctcactccttccatcacaggtgccgttcgagacacgcggacctaacgttgactcgtctaccgacatgctggtggaagacaaggtgaagagcgtgtcaggtccgcaaggacaccaccggtcctgcctcgtcaactctggtaaagacaggctcccccaaacaatggagcctagcccaagtgagactagtctggtggagagaccccaggtggggagtgtggtccacaggacctcgctcggaagcaccctcagtctgacccggtccccatgtgcgctgcccctcgcagagtgtaaagagggcctggtctgtaatggggcccccgagactgaaaatcgcgcttccgagcagccccctggactgtccacattgcagatgtacccaaccccaaacggtcactgtgcaaacggagaggccggaagatcaaaggactccctgagccggcagctcagtgccatgtcctgctcatccgcccacctacactcccgcaacctccatcataaatggctacactcgcatagtggtagacccagcgccacaagctcacctgatcagccaagtcgcagccacttagatgacgacgggatgtcagtttatactgacaccatccaacagcggctgcgacagatcgaaagcggacaccagcaagaagtcgagactttgaaaaaacaggtgcaagagctaaaatctcggctggagtcccaatacttgacaagtagtctgcatttcaatggcgactttggcgacgaggtaacaagtattcccgattccgaatcaaatctggaccaaaactgcctgtctagatgcagtaccgaaattttcagtgaggcatcctgggagcaagtggataagcaggacacggagatgacccgctggctgccagaccatctggcagctcattgttacgcctgtgacagcgccttttggctggctagtagaaagcaccactgtaggaactgtggcaatgtgttttgcagttcctgttgcaatcagaaggttccagtaccaagccagcagttattcgagccaagccgcgtttgtaaatcttgttactccagtctgcatcctacgtcctcttcaattgacttggaactagacaaaccgattgctgctacgtcgaattag

SEQ ID NO: 207455 - DNA, 3597 bp, Artificial Sequence
  derived and/or modified sequence
atggacgaggagaccaggcacagtcttgagtgtatccaagctaatcagatttttccaaggaagcaactaatccgagaagatgaaaatctgcaggtgcccttcctggagctgcacggagaatccaccgaattcgtcgggagggctgaggatgccattatcgctctgtccaactaccgcctccacattaagtttaaggagtccctggtaaatgtgcccttacagctgatagagtcggtcgagtgccgggacattttccaactccacctcacttgtaaagactgcaaagtcatcaggtgtcaatttagcacattcgagcagtgccaggagtggcttaagcgtctgaacaatgctatccgtcccccagccaaaattgaggacctttttagcttcgcttaccacgcatggtgcatggaagtgtatgcgagcgagaaagaacagcatggagacctctgccggcctggggagcacgtcacgtctcgattcaaaaatgaggtcgagcggatggggttcgacatgaacaatgcatggcggatatcaaatattaacgagaaatataagctgtgcgggtcctatccacaggaacttattgtgccagcttggatcacggacaaggagctggaatctgtgagcagctttcggtcgtggaagagaatcccggctgtcatatacaggcaccagtcaaacggagcagtgatagcaagatgtgggcaacccgaggtttcctggtggggttggcggaacgcggatgatgaacatcttgtgcagagcgttgccaaagcgtgtgcctctgactcgaggtcctctggcagtaaactgtccaccagaaatactagccgcgattttcccaatgggggagatttatccgatgtggagtttgattccagcctctctaatgcctcgggtgctgagtctctcgcaattcagccccagaagctgcttatattggacgccaggtcatacgcagcagcggtggccaatcgggcaaaagggggtggatgcgagtgtccagaatattatcctaactgcgaagtggtgttcatgggaatggccaatatacactctatcaggcgatcgtttcagagtttgcggttgctttgcacgcaaatgcccgaccctgggaactggctcagtgcacttgaatccaccaagtggctgcatcacctgtccgttcttctgaagtcagctcttttggtagtgcatgcagtggaccaagaccagcggccagtgctcgtgcactgcagtgacggctgggacaggacccctcagatcgtggccttggctaagctcctgctggatccctactacagaactatagagggcttccaggtcctcgttgagatggaatggctggatttcggacataagttcgcagacagatgtgggcatggagagaacagcgatgatctgaatgaacggtgtccagtcttccttcaatggctcgactgcgtgcatcagttacaacgacagtttccgtgttcttttgaattcaacgaggcattcctggtgaaactggtccaacatacttacagctgcttgtttggaactttcctctgtaataatgcaaaagagcgcggtgagaaacatacacaggagcgaacttgcagcgtttggagcctgctgcgcgctggcaataaggctttcaaaaacctgttatattcatcacaatccgaggctgtcctttaccctgtgtgtcacgtgaggaacctaatgttgtggtcagctgtatatttaccttgcccttcccccactactccggttgatgacagttgcgctccatatcccgcacctgggacatcaccagacgatccacccttatctcggctgccaaaaacacgcagttacgataacctcactaccgcatgtgacaacacagtccctctggcctctcggcgatgttctgatccgtctttgaacgagaaatggcaagagcataggcgctcgctcgaactctcctccctggcgggtccaggcgaggatccactgagtgctgattcactagggaagcctacccgggtgcccggaggggcagagctgtcggtcgctgcaggtgttgccgaagggcagatggaaaacattcttcaagaagctactaaggaagagtccggtgttgaagagccggcacatcgggctgggattgagattcaggaggggaaagaagatcctttactggagaaagaatcaagacggaaaacgcccgaagcctcagcaattggccttcaccaggaccccgaactcggtgatgctgccctgaggtcacacctggatatgtcgtggcccctcttcagccaggggatctctgaacagcagtcaggcctcagcgtgcttctgtctagtctgcaggtcccaccccgtggtgaggactccttggaggtccccgttgagcagtttcgaatcgaggagattgcagaggggcgagaggaggccgtcctccccatccctgtggatgccaaggtaggctacgggacaagccaatcgtgtagtctcttgccatcccaggtgcctttcgagacaagaggacccaatgtggattcttctactgacatgctagtggaggacaaggtgaagagcgtgagcggtccccaggggcatcacaggagctgcttagtgaatagcggcaaggacaggctgccccagacaatggagccgagcccctcagaaacttctcttgtcgagcgacctcaagttgggagcgtggttcacagaactagcctcggaagcaccttgtccttgacaagatctccctgcgcactgcctctggctgaatgcaaggaaggcctggtgtgtaatggggcacccgaaacggaaaatcgcgcatcagaacagccgccagggctgtccaccttgcaaatgtacccaacccctaatggacactgtgctaatggcgaggctgggagatccaaggattcactctcgcgccagctctccgcaatgtcatgcagttcggcgcaccttcacagtcgaaatctccaccacaaatggctgcacagccactcaggccgaccttctgcaacttcgtcacccgatcagcctagtcggtctcatctggacgatgacgggatgtcagtgtatacagacacaatacagcagagattgagacagattgaaagtggccaccagcaagaggtggagacactgaagaaacaggtgcaggagctgaagtctcggttggaaagccagtacctcacctcttctctgcatttcaacggagacttcggagacgaagtaaccagtattcctgattctgagagcaatctggatcagaattgcctgtccagatgttccacagaaatattctccgaggccagctgggaacaggtggacaagcaggacacagaaatgactcggtggctgccagaccacctggctgcacactgttacgcgtgtgattccgcattctggctggccagccgcaaacatcactgtcggaactgtgggaatgtgttttgttcctcatgttgtaaccaaaaggtccccgtgccgagtcagcagttgttcgaaccatcaagagtgtgcaagtcctgctacagctccctccaccccacttcttccagtattgatttggaactggacaaacccatcgctgccacgtcgaattag

SEQ ID NO: 207456 - DNA, 3597 bp, Artificial Sequence
  derived and/or modified sequence
atggacgaggagaccagacacagcctggagtgcatccaggccaaccagatcttccccagaaagcagctgatcagagaggacgagaacctgcaggtgcccttcctggagctgcacggcgagagcaccgagttcgtgggcagagccgaggacgccatcatcgccctgagcaactacagactgcacatcaagttcaaggagagcctggtgaacgtgcccctgcagctgatcgagagcgtggagtgcagagacatcttccagctgcacctgacctgcaaggactgcaaggtgatcagatgccagttcagcaccttcgagcagtgccaggagtggctgaagagactgaacaacgccatcagaccccccgccaagatcgaggacctgttcagcttcgcctaccacgcctggtgcatggaggtgtacgccagcgagaaggagcagcacggcgacctgtgcagacccggcgagcacgtgaccagcagattcaagaacgaggtggagagaatgggcttcgacatgaacaacgcctggagaatcagcaacatcaacgagaagtacaagctgtgcggcagctacccccaggagctgatcgtgcccgcctggatcaccgacaaggagctggagagcgtgagcagcttcagaagctggaagagaatccccgccgtgatctacagacaccagagcaacggcgccgtgatcgccagatgcggccagcccgaggtgagctggtggggctggagaaacgccgacgacgagcacctggtgcagagcgtggccaaggcctgcgccagcgacagcagaagcagcggcagcaagctgagcaccagaaacaccagcagagacttccccaacggcggcgacctgagcgacgtggagttcgacagcagcctgagcaacgccagcggcgccgagagcctggccatccagccccagaagctgctgatcctggacgccagaagctacgccgccgccgtggccaacagagccaagggcggcggctgcgagtgccccgagtactaccccaactgcgaggtggtgttcatgggcatggccaacatccacagcatcagaagaagcttccagagcctgagactgctgtgcacccagatgcccgaccccggcaactggctgagcgccctggagagcaccaagtggctgcaccacctgagcgtgctgctgaagagcgccctgctggtggtgcacgccgtggaccaggaccagagacccgtgctggtgcactgcagcgacggctgggacagaaccccccagatcgtggccctggccaagctgctgctggacccctactacagaaccatcgagggcttccaggtgctggtggagatggagtggctggacttcggccacaagttcgccgacagatgcggccacggcgagaacagcgacgacctgaacgagagatgccccgtgttcctgcagtggctggactgcgtgcaccagctgcagagacagttcccctgcagcttcgagttcaacgaggccttcctggtgaagctggtgcagcacacctacagctgcctgttcggcaccttcctgtgcaacaacgccaaggagagaggcgagaagcacacccaggagagaacctgcagcgtgtggagcctgctgagagccggcaacaaggccttcaagaacctgctgtacagcagccagagcgaggccgtgctgtaccccgtgtgccacgtgagaaacctgatgctgtggagcgccgtgtacctgccctgccccagccccaccacccccgtggacgacagctgcgccccctaccccgcccccggcaccagccccgacgacccccccctgagcagactgcccaagaccagaagctacgacaacctgaccaccgcctgcgacaacaccgtgcccctggccagcagaagatgcagcgaccccagcctgaacgagaagtggcaggagcacagaagaagcctggagctgagcagcctggccggccccggcgaggaccccctgagcgccgacagcctgggcaagcccaccagagtgcccggcggcgccgagctgagcgtggccgccggcgtggccgagggccagatggagaacatcctgcaggaggccaccaaggaggagagcggcgtggaggagcccgcccacagagccggcatcgagatccaggagggcaaggaggaccccctgctggagaaggagagcagaagaaagacccccgaggccagcgccatcggcctgcaccaggaccccgagctgggcgacgccgccctgagaagccacctggacatgagctggcccctgttcagccagggcatcagcgagcagcagagcggcctgagcgtgctgctgagcagcctgcaggtgccccccagaggcgaggacagcctggaggtgcccgtggagcagttcagaatcgaggagatcgccgagggcagagaggaggccgtgctgcccatccccgtggacgccaaggtgggctacggcaccagccagagctgcagcctgctgcccagccaggtgcccttcgagaccagaggccccaacgtggacagcagcaccgacatgctggtggaggacaaggtgaagagcgtgagcggcccccagggccaccacagaagctgcctggtgaacagcggcaaggacagactgccccagaccatggagcccagccccagcgagaccagcctggtggagagaccccaggtgggcagcgtggtgcacagaaccagcctgggcagcaccctgagcctgaccagaagcccctgcgccctgcccctggccgagtgcaaggagggcctggtgtgcaacggcgcccccgagaccgagaacagagccagcgagcagccccccggcctgagcaccctgcagatgtaccccacccccaacggccactgcgccaacggcgaggccggcagaagcaaggacagcctgagcagacagctgagcgccatgagctgcagcagcgcccacctgcacagcagaaacctgcaccacaagtggctgcacagccacagcggcagacccagcgccaccagcagccccgaccagcccagcagaagccacctggacgacgacggcatgagcgtgtacaccgacaccatccagcagagactgagacagatcgagagcggccaccagcaggaggtggagaccctgaagaagcaggtgcaggagctgaagagcagactggagagccagtacctgaccagcagcctgcacttcaacggcgacttcggcgacgaggtgaccagcatccccgacagcgagagcaacctggaccagaactgcctgagcagatgcagcaccgagatcttcagcgaggccagctgggagcaggtggacaagcaggacaccgagatgaccagatggctgcccgaccacctggccgcccactgctacgcctgcgacagcgccttctggctggccagcagaaagcaccactgcagaaactgcggcaacgtgttctgcagcagctgctgcaaccagaaggtgcccgtgcccagccagcagctgttcgagcccagcagagtgtgcaagagctgctacagcagcctgcaccccaccagcagcagcatcgacctggagctggacaagcccatcgccgccaccagcaactag

SEQ ID NO: 207457 - protein, 2229 aa, Artificial Sequence
  derived and/or modified sequence
MAESASPPSSSAAAPAAEPGVTTEQPGPRSPPSSPPGLEEPLDGADPHVPHPDLAPIAFFCLRQTTSPRNWCIKMATGPWWWCLCMLVILLNCVTLGMYQPCDDMDCLSDRCKILQVFDDFIFIFFAMEMVLKMVALGIFGKKCYLGDTWNRLDFFIVMAGMVEYSLDLQNINLSAIRTVRVLRPLKAINRVPSMRILVNLLLDTLPMLGNVLLLCFFVFFIFGIIGVQLWAGLLRNRCFLEENFTIQGDVALPPYYQPEEDDEMPFICSLSGDNGIMGCHEIPPLKEQGRECCLSKDDVYDFGAGRQDLNASGLCVNWNRYYNVCRTGSANPHKGAINFDNIGYAWIVIFQVITLEGWVEIMYYVMDAHSFYNFIYFILLIIVGSFFMINLCLVVIATQFSETKQREHRLMLEQRQRYLSSSTVASYAEPGDCYEEIFQYVCHILRKAKRRALGLYQALQSRRQALGPEAPAPAKPGPHAKEPRHYHGKTKGQGDEGRHLGSRHCQTLHGPASPGNDHSGRGKPGPRELCPQHSPLDATPHTLVQPIPATLASDPASCPCCQHEDGRRPSGLGSTDSGQEGSGSGSSAGGEDEADGDGARSSEDGASSELGKEEEEEEQADGAVWLCGDVWRETRAKLRGIVDSKYFNRGIMMAILVNTVSMGIEHHEQANELTNILEICNVVFTSMFALEMILKLAAFGLFDYLRNPYNIFDSIIVIISIWEIVGQADGGLSVLRTFRLLRVLKLVRFMPALRRQLVVLMKTMDNVATFCMLLMLFIFIFSILGMHIFGCKFSLRTDTGDTVPDRKNFDSLLWAIVTVFQILTQEDWNVVLYNGMASTSPWASLYFVALMTFGNYVLFNLLVAILVEGFQAEGDANRSYSDEDQSSSNIEEFDKLQEGLDSSGDPKLCPIPMTPNGHLDPSLPLGGHLGPAGAAGPAPRLSLQPDPMLVALGSRKSSVMSLGRMSYDQRSLSSSRSSYYGPWGRSAAWASRRSSWNSLKHKPPSAEHESLLSAERGGGARVCEVAADEGPPRAAPLHTPHAHHIHHGPHLAHRHRHHRRTLSLDNRDSVDLAELVPAVGAHPRAAWRAAGPAPGHEDCNGRMPSIAKDVFTKMGDRGDRGEDEEEIDYTLCFRVRKMIDVYKPDWCEVREDWSVYLFSPENRFRVLCQTIIAHKLFDYVVLAFIFLNCITIALERPQIEAGSTERIFLTVSNYIFTAIFVGEMTLKVVSLGLYFGEQAYLRSSWNVLDGFLVFVSIIDIVVSLASAGGAKILGVLRVLRLLRTLRPLRVISRAPGLKLVVETLISSLKPIGNIVLICCAFFIIFGILGVQLFKGKFYHCLGVDTRNITNRSDCMAANYRWVHHKYNFDNLGQALMSLFVLASKDGWVNIMYNGLDAVAVDQQPVTNHNPWMLLYFISFLLIVSFFVLNMFVGVVVENFHKCRQHQEAEEARRREEKRLRRLEKKRRKAQRLPYYATYCHTRLLIHSMCTSHYLDIFITFIICLNVVTMSLEHYNQPTSLETALKYCNYMFTTVFVLEAVLKLVAFGLRRFFKDRWNQLDLAIVLLSVMGITLEEIEINAALPINPTIIRIMRVLRIARVLKLLKMATGMRALLDTVVQALPQVGNLGLLFMLLFFIYAALGVELFGKLVCNDENPCEGMSRHATFENFGMAFLTLFQVSTGDNWNGIMKDTLRDCTHDERSCLSSLQFVSPLYFVSFVLTAQFVLINVVVAVLMKHLDDSNKEAQEDAEMDAELELEMAHGLGPGPRLPTGSPGAPGRGPGGAGGGGDTEGGLCRRCYSPAQENLWLDSVSLIIKDSLEGELTIIDNLSGSIFHHYSSPAGCKKCHHDKQEVQLAETEAFSLNSDRSSSILLGDDLSLEDPTACPPGRKDSKGELDPPEPMRVGDLGECFFPLSSTAVSPDPENFLCEMEEIPFNPVRSWLKHDSSQAPPSPFSPDASSPLLPMPAEFFHPAVSASQKGPEKGTGTGTLPKIALQGSWASLRSPRVNCTLLRQATGSDTSLDASPSSSAGSLQTTLEDSLTLSDSPRRALGPPAPAPGPRAGLSPAARRRLSLRGRGLFSLRGLRAHQRSHSSGGSTSPGCTHHDSMDPSDEEGRGGAGGGGAGSEHSETLSSLSLTSLFCPPPPPPAPGLTPARKFSSTSSLAAPGRPHAAALAHGLARSPSWAADRSKDPPGRAPLPMGLGPLAPPPQPLPGELEPGDAASKRKR

SEQ ID NO: 207458 - protein, 2016 aa, Artificial Sequence
  derived and/or modified sequence
MAESASPPSSSAAAPAAEPGVTTEQPGPRSPPSSPPGLEEPLDGADPHVPHPDLAPIAFFCLRQTTSPRNWCIKMVCNPWFECVSMLVILLNCVTLGMYQPCDDMDCLSDRCKILQVFDDFIFIFFAMEMVLKMVALGIFGKKCYLGDTWNRLDFFIVMAGMVEYSLDLQNINLSAIRTVRVLRPLKAINRVPSMRILVNLLLDTLPMLGNVLLLCFFVFFIFGIIGVQLWAGLLRNRCFLEENFTIQGDVALPPYYQPEEDDEMPFICSLSGDNGIMGCHEIPPLKEQGRECCLSKDDVYDFGAGRQDLNASGLCVNWNRYYNVCRTGSANPHKGAINFDNIGYAWIVIFQVITLEGWVEIMYYVMDAHSFYNFIYFILLIIVGSFFMINLCLVVIATQFSETKQREHRLMLEQRQRYLSSSTVASYAEPGDCYEEIFQYVCHILRKAKRRALGLYQALQSRRQALGPEAPAPAKPGPHAKEPRHYHGKTKGQGDEGRHLGSRHCQTLHGPASPGNDHSGRELCPQHSPLDATPHTLVQPIPATLASDPASCPCCQHEDGRRPSGLGSTDSGQEGSGSGSSAGGEDEADGDGARSSEDGASSELGKEEEEEEQADGAVWLCGDVWRETRAKLRGIVDSKYFNRGIMMAILVNTVSMGIEHHEQPEELTNILEICNVVFTSMFALEMILKLAAFGLFDYLRNPYNIFDSIIVIISIWEIVGQADGGLSVLRTFRLLRVLKLVRFMPALRRQLVVLMKTMDNVATFCMLLMLFIFIFSILGMHIFGCKFSLRTDTGDTVPDRKNFDSLLWAIVTVFQILTQEDWNVVLYNGMASTSPWASLYFVALMTFGNYVLFNLLVAILVEGFQAEGDANRSYSDEDQSSSNIEEFDKLQEGLDSSGDPKLCPIPMTPNGHLDPSLPLGGHLGPAGAAGPAPRLSLQPDPMLVALGSRKSSVMSLGRMSYDQRSLSSSRSSYYGPWGRSAAWASRRSSWNSLKHKPPSAEHESLLSAERGGGARVCEVAADEGPPRAAPLHTPHAHHIHHGPHLAHRHRHHRRTLSLDNRDSVDLAELVPAVGAHPRAAWRAAGPAPGHEDCNGRMPSIAKDVFTKMGDRGDRGEDEEEIDYTLCFRVRKMIDVYKPDWCEVREDWSVYLFSPENRFRVLCQTIIAHKLFDYVVLAFIFLNCITIALERPQIEAGSTERIFLTVSNYIFTAIFVGEMTLKVVSLGLYFGEQAYLRSSWNVLDGFLVFVSIIDIVVSLASAGGAKILGVLRVLRLLRTLRPLRVISRAPGLKLVVETLISSLKPIGNIVLICCAFFIIFGILGVQLFKGKFYHCLGVDTRNITNRSDCMAANYRWVHHKYNFDNLGQALMSLFVLASKDGWVNIMYNGLDAVAVDQQPVTNHNPWMLLYFISFLLIVSFFVLNMFVGVVVENFHKCRQHQEAEEARRREEKRLRRLEKKRRKAQRLPYYATYCHTRLLIHSMCTSHYLDIFITFIICLNVVTMSLEHYNQPTSLETALKYCNYMFTTVFVLEAVLKLVAFGLRRFFKDRWNQLDLAIVLLSVMGITLEEIEINAALPINPTIIRIMRVLRIARVLKLLKMATGMRALLDTVVQALPQVGNLGLLFMLLFFIYAALGVELFGKLVCNDENPCEGMSRHATFENFGMAFLTLFQVSTGDNWNGIMKDTLRDCTHDERSCLSSLQFVSPLYFVSFVLTAQFVLINVVVAVLMKHLDDSNKEAQEDAEMDAELELEMAHGLGPGPRLPTGSPGAPGRGPGGAGGGGDTEGGLCRRCYSPAQENLWLDSVSLIIKDSLEGELTIIDNLSGSIFHHYSSPAGCKKCHHDKQEVQLAETEAFSLNSDRSSSILLGDDLSLEDPTACPPGRKDSKGELDPPEPMRVGDLGECFFPLSSTAVSPDPENFLCEMEEIPFNPVRSWLKHDSSQAPPSPFSPDASSPLLPMPAEFFHPAVSASQKGPEKGTGTGTLPKIALQGSWASLRSPRVNCTLLRQVPTPPRP

SEQ ID NO: 207459 - protein, 2223 aa, Artificial Sequence
  derived and/or modified sequence
MAESASPPSSSAAAPAAEPGVTTEQPGPRSPPSSPPGLEEPLDGADPHVPHPDLAPIAFFCLRQTTSPRNWCIKMVCNPWFECVSMLVILLNCVTLGMYQPCDDMDCLSDRCKILQVFDDFIFIFFAMEMVLKMVALGIFGKKCYLGDTWNRLDFFIVMAGMVEYSLDLQNINLSAIRTVRVLRPLKAINRVPSMRILVNLLLDTLPMLGNVLLLCFFVFFIFGIIGVQLWAGLLRNRCFLEENFTIQGDVALPPYYQPEEDDEMPFICSLSGDNGIMGCHEIPPLKEQGRECCLSKDDVYDFGAGRQDLNASGLCVNWNRYYNVCRTGSANPHKGAINFDNIGYAWIVIFQVITLEGWVEIMYYVMDAHSFYNFIYFILLIIVGSFFMINLCLVVIATQFSETKQREHRLMLEQRQRYLSSSTVASYAEPGDCYEEIFQYVCHILRKAKRRALGLYQALQSRRQALGPEAPAPAKPGPHAKEPRHYHGKTKGQGDEGRHLGSRHCQTLHGPASPGNDHSGRELCPQHSPLDATPHTLVQPIPATLASDPASCPCCQHEDGRRPSGLGSTDSGQEGSGSGSSAGGEDEADGDGARSSEDGASSELGKEEEEEEQADGAVWLCGDVWRETRAKLRGIVDSKYFNRGIMMAILVNTVSMGIEHHEQPEELTNILEICNVVFTSMFALEMILKLAAFGLFDYLRNPYNIFDSIIVIISIWEIVGQADGGLSVLRTFRLLRVLKLVRFMPALRRQLVVLMKTMDNVATFCMLLMLFIFIFSILGMHIFGCKFSLRTDTGDTVPDRKNFDSLLWAIVTVFQILTQEDWNVVLYNGMASTSPWASLYFVALMTFGNYVLFNLLVAILVEGFQAEGDANRSYSDEDQSSSNIEEFDKLQEGLDSSGDPKLCPIPMTPNGHLDPSLPLGGHLGPAGAAGPAPRLSLQPDPMLVALGSRKSSVMSLGRMSYDQRSLSSSRSSYYGPWGRSAAWASRRSSWNSLKHKPPSAEHESLLSAERGGGARVCEVAADEGPPRAAPLHTPHAHHIHHGPHLAHRHRHHRRTLSLDNRDSVDLAELVPAVGAHPRAAWRAAGPAPGHEDCNGRMPSIAKDVFTKMGDRGDRGEDEEEIDYTLCFRVRKMIDVYKPDWCEVREDWSVYLFSPENRFRVLCQTIIAHKLFDYVVLAFIFLNCITIALERPQIEAGSTERIFLTVSNYIFTAIFVGEMTLKVVSLGLYFGEQAYLRSSWNVLDGFLVFVSIIDIVVSLASAGGAKILGVLRVLRLLRTLRPLRVISRAPGLKLVVETLISSLKPIGNIVLICCAFFIIFGILGVQLFKGKFYHCLGVDTRNITNRSDCMAANYRWVHHKYNFDNLGQALMSLFVLASKDGWVNIMYNGLDAVAVDQQPVTNHNPWMLLYFISFLLIVSFFVLNMFVGVVVENFHKCRQHQEAEEARRREEKRLRRLEKKRRKAQRLPYYATYCHTRLLIHSMCTSHYLDIFITFIICLNVVTMSLEHYNQPTSLETALKYCNYMFTTVFVLEAVLKLVAFGLRRFFKDRWNQLDLAIVLLSVMGITLEEIEINAALPINPTIIRIMRVLRIARVLKLLKMATGMRALLDTVVQALPQVGNLGLLFMLLFFIYAALGVELFGKLVCNDENPCEGMSRHATFENFGMAFLTLFQVSTGDNWNGIMKDTLRDCTHDERSCLSSLQFVSPLYFVSFVLTAQFVLINVVVAVLMKHLDDSNKEAQEDAEMDAELELEMAHGLGPGPRLPTGSPGAPGRGPGGAGGGGDTEGGLCRRCYSPAQENLWLDSVSLIIKDSLEGELTIIDNLSGSIFHHYSSPAGCKKCHHDKQEVQLAETEAFSLNSDRSSSILLGDDLSLEDPTACPPGRKDSKGELDPPEPMRVGDLGECFFPLSSTAVSPDPENFLCEMEEIPFNPVRSWLKHDSSQAPPSPFSPDASSPLLPMPAEFFHPAVSASQKGPEKGTGTGTLPKIALQGSWASLRSPRVNCTLLRQATGSDTSLDASPSSSAGSLQTTLEDSLTLSDSPRRALGPPAPAPGPRAGLSPAARRRLSLRGRGLFSLRGLRAHQRSHSSGGSTSPGCTHHDSMDPSDEEGRGGAGGGGAGSEHSETLSSLSLTSLFCPPPPPPAPGLTPARKFSSTSSLAAPGRPHAAALAHGLARSPSWAADRSKDPPGRAPLPMGLGPLAPPPQPLPGELEPGDAASKRKR

SEQ ID NO: 207460 - DNA, 6690 bp, Artificial Sequence
  derived and/or modified sequence
atggcagagtcagctagcccacccagctcttccgccgcggccccagctgcggagccaggggtcaccacagaacagcctggtcctcgctctccaccatcctcaccacccggcctagaggaacccctagacggcgccgatccccacgtgccacaccctgatctggcacctatcgcatttttctgcttgcgccagaccacctctccacgtaattggtgtatcaagatggccactggcccttggtggtggtgtctgtgcatgctggtgatcctgctgaactgtgttactctcgggatgtatcaaccctgcgacgatatggattgtttatccgaccggtgcaaaattctgcaggtgtttgacgacttcatcttcatcttcttcgctatggagatggtcctgaagatggttgctctcggtatcttcggaaagaaatgctatctcggggatacatggaacagactggactttttcattgtaatggctggcatggtggagtattctctggatttgcagaacatcaatctctctgccatccggactgtgcgggtgctgagaccactcaaggcgatcaatcgggtgcctagcatgaggatcttagtgaatttgctactagacacgctcccaatgctgggaaacgtgctgttgttgtgcttcttcgtcttttttattttcggaattataggagtgcagctgtgggctggcctgctccgcaaccgatgttttttggaggagaactttacaatacagggagacgtggccctgccgccatattaccagcccgaagaggacgacgaaatgccattcatttgttcactctctggcgacaacggtataatgggatgccacgaaatacccccactgaaagagcagggcagggagtgctgtctcagcaaggacgacgtgtatgacttcggagcaggacggcaagacctgaatgcctctgggctgtgtgtaaattggaataggtactacaatgtctgccgaaccggaagtgcaaatcctcataaaggggccattaattttgataatatcgggtacgcatggattgtgatcttccaagtgattaccctggagggttgggtagagatcatgtactatgtgatggacgctcactccttctacaactttatttactttatcctactcatcatagtcgggagcttcttcatgataaatctttgcctcgtcgtcatcgccactcagtttagtgagaccaaacagcgggaacaccgattaatgcttgaacaacgccagcggtatctgtcttccagcacagtcgcctcttacgcagagcccggtgattgctacgaagagatttttcagtatgtgtgccatattcttaggaaagcaaaaagaagggctctcggcctgtatcaggccctgcagtctcggaggcaagcgctaggccccgaagctccagcccctgccaagcctggccctcatgctaaggagccccgtcactatcacggaaagaccaagggccagggtgatgagggccgccacctggggagtcgacattgtcagactttgcacgggcccgcctcaccgggaaatgaccattccggccggggaaaaccaggacccagagagctgtgtcctcaacatagccccctggacgccacaccccacaccctggttcaaccaataccagcgactctggcttcagatccggcttcatgcccgtgctgtcaacacgaggacgggcgcagacctagtggccttgggtccaccgatagcggacaggaagggtccggatccggaagtagtgcaggcggcgaggacgaggcggatggcgatggggcccgcagtagcgaggatggcgccagtagcgagctgggtaaagaagaggaagaggaggaacaagccgatggtgccgtgtggctgtgtggcgatgtgtggagagagaccagagcaaagctccggggtattgtggattccaaatatttcaacagagggattatgatggccattctggtcaatacggtctccatgggaatcgaacatcatgagcaagccaatgaattgactaatatcctcgagatctgcaatgtggtcttcaccagcatgtttgcacttgaaatgatcctaaagctggcagcctttggtttgttcgactatctacgtaacccatataatatcttcgacagcataattgtcattatttcaatctgggagatcgtgggtcaggccgatggcggactgagcgtactaagaacatttcgactcctccgggttctaaagttggttcgtttcatgccagccctgagacgccagctggttgttttaatgaagacaatggacaacgttgccacattttgtatgctgcttatgctattcatctttattttttctatcctcgggatgcatattttcggatgcaagttcagtctgcggaccgacacgggggatactgtacccgaccggaaaaattttgattcgttgctttgggctatcgtgacagtgttccagatcctgacccaagaggattggaacgtggtcttgtataacggtatggcaagtacttccccctgggcttctctgtacttcgtggcccttatgaccttcggaaactacgtgcttttcaatctgcttgtcgcaattttagtcgagggattccaggctgagggcgacgctaatcggtcctacagtgacgaggaccaatcgtctagtaacatcgaggagtttgacaagctgcaggagggccttgattcgagcggggacccaaagttatgccccattccaatgactcccaatggccatttggatccgtcgctgccgctcggcggccatttaggacccgccggcgctgctggacccgcccctagactgtcgctgcaacctgacccgatgctggtggcactgggctcccggaaatcctctgtgatgagcctgggtaggatgtcctacgatcagagatcgctgtcctcttctagatcgtcctactatggcccctggggcagatccgcagcctgggcgtctcgcaggtcctcctggaatagtcttaagcacaagccaccaagtgccgagcacgagtctcttctgtcagccgaaagaggagggggggcccgagtatgcgaagtggctgcagatgaggggccgcccagggccgcccctctgcacactccacatgcgcaccatattcaccacggcccacacctcgctcaccgacatcgtcaccatcgacggactctttcactggacaaccgcgactccgtagatctcgctgaacttgtgcccgccgtgggggcacaccctcgagccgcatggagagcagctgggccggctcccggccacgaggactgcaacggacgcatgcctagcatagctaaagacgtgttcactaagatgggcgacaggggagaccgcggcgaggatgaagaggaaatagactacacgttgtgtttccgcgtgaggaaaatgatcgatgtttacaaaccagactggtgtgaggtgagggaggattggtctgtgtacctgttttcccccgaaaaccgatttcgtgtgctgtgccagactatcattgcccacaagctcttcgattatgttgtactagcctttattttcctaaactgtattacgatagcgctggaacgaccgcagatcgaggccggcagcaccgaaagaatcttcctgaccgtcagtaactatattttcacagcaatcttcgttggcgagatgacgctgaaagtggtcagtctgggcctgtatttcggcgaacaggcctacctgagatcttcatggaacgtgctcgatggctttcttgtgtttgtttctattatcgatattgtcgttagcctggcctccgctggtggggcaaagatcctgggggtgctgcgggttctgcgcctcctccggactctgagacctcttcgggtgatcagccgtgctccagggctgaaacttgtggtcgagacgttgatcagttcactgaaaccaataggaaacatagtgcttatctgttgtgctttctttatcatttttggcatcctgggagtgcaactgttcaagggaaagttctaccattgtttgggggttgacactaggaacatcacgaaccgctcggattgtatggccgctaattaccgctgggtgcatcacaagtacaatttcgacaatttgggacaggccctgatgagcttgtttgtgctggcctccaaagatggctgggtgaacattatgtataacgggctggacgccgtggcagttgaccagcagccggtaaccaaccacaacccttggatgttgctctatttcatatccttcctgctaatagtaagctttttcgttctaaacatgtttgtgggagttgtggttgaaaacttccacaaatgcaggcagcaccaggaagctgaggaggcgcggcgtcgcgaagagaaaagactgcggcgcctggaaaagaagagacgcaaggctcagaggctcccctactatgccacctactgccacacccgtctgctcatccatagtatgtgtacatctcattatctggatattttcattacgtttatcatctgtctgaatgtggtgaccatgtcactcgagcattacaaccagccgactagccttgagactgccctgaagtattgtaattacatgtttactaccgtcttcgtgttggaggcagtcttgaagctggtggcgttcggattacgccgtttttttaaggaccgctggaaccagctggatctcgcaatcgtgctcctgagcgtgatgggcatcactctggaagagattgaaataaacgctgctttgcctattaatccaaccatcatccgcattatgcgggtgcttagaatcgcacgtgtgctgaaactgctgaagatggctaccggcatgcgggcattactggataccgtcgtgcaggcgcttccccaggtgggaaacctgggcctgctgtttatgctcctctttttcatctacgcagccctgggcgtggagctcttcggaaagttggtctgtaatgacgagaatccttgtgaaggcatgagccggcacgcaacttttgagaactttgggatggctttcctgaccttgtttcaggtctccacaggggataactggaatgggatcatgaaagatactctgcgggactgtacccacgacgaaagaagctgtttatctagcctgcaatttgtgtccccgctttactttgtcagctttgtattgaccgcacagttcgtgctaatcaacgtggttgttgccgtactgatgaagcacctcgacgattccaacaaggaggcccaagaggacgccgagatggacgcagaactggagctcgagatggctcacgggcttgggcccggtcccagactgccaacggggtctccaggtgcaccgggacgtggaccgggaggcgccggcgggggcggagatactgaaggtgggctgtgccggaggtgctattcgcccgctcaagagaatctttggttggatagtgtatccctaattatcaaggattcattagagggcgaactcacaataatcgacaatctgagcgggtccatcttccaccattattctagccccgctggatgcaaaaagtgccaccacgacaagcaggaagtgcagttagccgagaccgaagctttctcgctgaacagcgaccggagcagctcaatactccttggggacgacctaagtcttgaagatcccacagcttgcccaccaggccggaaagatagtaagggggaactcgaccccccagagcccatgagggtcggtgaccttggcgagtgtttcttccccttgagtagcaccgccgtttctcccgacccggagaatttcctctgcgagatggaagagatacccttcaatcccgttcgatcatggctgaaacatgactcatcacaggctccccccagccctttcagccctgacgcctcatcccctctgctccctatgcccgcggaatttttccacccagcagtctctgcttcccaaaaagggcctgagaaaggtacaggcactgggacacttcctaagatcgccctgcaggggtcttgggcttcacttagatctccccgggtgaattgtaccttattacgacaagctacagggtcagatacaagcctagatgcttctccctcgtcgtcagccggatccctgcagacgacactggaagattcgctaacgttatcagactcaccaagacgcgctctcggccctcccgctccggctcctgggcccagagctgggctgtctccagccgcaagaagacgattaagcttgcgaggcaggggcttgttttccctccgtggactcagggctcatcagcggagccatagcagcggagggtcaacttcaccgggctgcacccatcacgactccatggacccatctgatgaagaaggcagaggaggcgccggcgggggcggggcagggagcgagcacagtgaaacactgtcttccctgagcctcacttccctgttctgtccaccgcctcctccgccggcaccaggattgacccccgcaagaaagtttagttccaccagcagcctggctgcccccggtaggccccatgccgcagccctcgcccacggacttgcccgtagccccagctgggcagccgatcggtcaaaggaccctcctggacgcgctccactgcctatgggtctcggcccccttgccccccctcctcagcctctgcctggtgagctggagcccggcgatgctgcctccaaacgaaagagatag

SEQ ID NO: 207461 - DNA, 6051 bp, Artificial Sequence
  derived and/or modified sequence
atggccgaaagcgctagtcctcctagtagctcagccgctgccccagctgcagaacctggcgttacaacagaacagcctggtcctcggtcccccccctccagcccccccggtctggaagagcctctggacggagctgatccccatgtcccacatccagacctagcccccatcgcgtttttttgtcttagacagactactagccccaggaattggtgtatcaagatggtctgcaatccctggttcgagtgcgtctcgatgctggtcatcctcctgaattgtgtgacactgggcatgtatcaaccgtgtgacgacatggattgtttgagcgaccgctgcaagatcttgcaagtcttcgatgactttatatttatctttttcgccatggaaatggtgttgaagatggtcgcgctcggcatctttggcaagaaatgttatctgggagacacctggaaccggttagatttttttatcgttatggcggggatggttgaatactcgcttgatttacagaatatcaatctgtccgcaatcaggacagtgcgtgtattgcgcccactgaaggccatcaatcgggtgccaagcatgcgcatcctcgtcaacctgctgttggacactttacccatgctcggaaacgttctgctactttgcttctttgtctttttcatttttggcatcattggagtgcagctgtgggcgggcctgttgcggaataggtgcttcctcgaggagaactttactatccagggggatgtggcattacccccctattaccagccagaagaggacgatgagatgccatttatctgctcattgagcggcgataacgggattatgggctgccacgaaattccccctctcaaggagcaggggagggagtgttgtctctctaaagacgatgtttacgacttcggcgccggacgccaggatttaaatgcgagtggtctgtgcgtaaattggaaccgctactataacgtgtgccgaactgggagcgcaaatccacacaagggggctatcaatttcgacaatattgggtacgcctggatcgtcatctttcaagtgatcacgctcgaaggctgggtggaaataatgtactacgtaatggacgcccacagtttctacaacttcatctacttcatcctcttaattattgttggttcattttttatgattaacctgtgcctagttgtgattgcgacccagttttccgaaaccaagcaaagggagcaccggctcatgttagaacaaagacagcgatacttatcctccagtactgtcgcatcctatgcagaacctggcgactgctacgaagagatctttcagtatgtctgccatattctgcggaaagcaaaacgccgcgctctcggcttgtatcaggcgctacagagccgaaggcaggccttaggccctgaggctcccgctccggcgaaacccgggccgcacgccaaggagccgcgtcactaccacggtaagacaaagggacaaggcgacgaggggcggcatctggggtcgaggcactgtcagactctacacggtcctgctagtcctggcaatgaccactcaggccgggagctttgcccccagcactcccctctcgacgcaacgccgcacacgttagttcaaccaatccccgctactctcgccagcgacccagctagctgcccgtgctgccagcacgaagacggtcgccggccaagtggcctcggcagcactgatagtggacaggagggcagcggaagcggcagcagtgctggtggcgaagacgaggcggatggagatggcgccaggagtagcgaggacggcgctagcagtgagcttgggaaagaggaggaggaggaagaacaggccgacggtgccgtgtggttatgcggtgacgtatggagggagacacgggccaagctgcgaggaatagtcgactccaagtatttcaatagaggaattatgatggccattcttgtcaatactgttagcatgggcatcgaacaccacgagcaacccgaagaactgaccaatatccttgaaatttgcaatgtcgtttttaccagcatgttcgcactagagatgattctcaaacttgccgcttttggtctgttcgactacttaagaaacccctacaacattttcgactccatcatcgtcattatctccatctgggagattgtgggccaggctgatggcggactatctgtgttgagaacttttaggctcctgcgagtcctcaaactagtaagattcatgccagcgctgaggcgccagctcgttgtactgatgaaaactatggataacgtggccactttctgcatgctgctgatgctgttcatattcattttcagtattctgggaatgcacattttcggatgcaagtttagcttgcgcactgacacaggagatactgtgccagatcggaaaaacttcgatagtcttctttgggctattgtgacagttttccagattctcacccaggaggactggaatgtggtcctgtacaacggaatggcaagtacctctccctgggcgagtctttattttgtggccttgatgacctttgggaattacgtgcttttcaacctcctggtggccattctcgtagaaggttttcaggccgagggagacgctaacaggtcctacagtgatgaggaccaaagtagtagcaatatcgaagagtttgacaaacttcaggaggggctcgattcttcaggggatccaaagttgtgtcctatccccatgacgcccaatggacacttggacccttctttacccctcggaggacatctggggcccgccggggctgcgggaccagccccaaggctgagcctgcagcctgaccctatgctcgtggccctcggatccagaaaatcatcggtcatgtctttgggccgaatgagctacgaccaaagaagcctgagttcaagccgatcgagttattacggtccttggggcagatctgccgcctgggcatcaaggcgcagcagctggaactctcttaagcataaacccccctctgccgaacatgaatccctgctcagcgcagagaggggcggtggcgcaagagtttgcgaagtcgcggccgacgagggaccgcctcgagccgccccgttacacacgcctcacgcccatcatatccatcacggacctcacttagcacatcgacataggcaccatagacggacactgtccctcgataaccgagactcagtggatcttgccgagctggtccccgctgttggagcccatcccagagcagcatggcgcgcagccggccccgcccccgggcatgaagattgcaacggacgtatgccatcaatagccaaggatgtcttcactaaaatgggagaccgaggagatagaggagaagacgaagaagaaatcgattacacactttgtttccgggttcgaaagatgattgacgtttacaaacccgactggtgtgaagtgagggaagattggtcagtgtatcttttctcaccagagaacagattccgggtcctgtgccagactattatagcccacaagctgttcgattatgtggtgctagcttttatttttctgaactgcattacgatcgccttagagcgccctcagattgaggctgggtccactgagcgcatatttctgactgtcagtaattacatttttactgccatcttcgtgggagagatgacccttaaggtggtgtccctcggtctttacttcggggagcaggcctacctgagatcttcatggaatgtgctcgacggattcctggtgttcgtgagtatcatcgatattgtcgtgagccttgcatccgcaggcggcgccaagatcctcggggtgctgcgggttctgcggctgcttcgcacgctgcgtcctttgagagtgatttcaagggcccctggtctgaagttggtggtggagaccttaatcagctcccttaagcccattggtaacatagtgctgatatgttgcgcctttttcattatcttcggcattctcggcgtgcagttatttaagggcaaattctatcattgcctcggagttgacacccgtaatatcacaaatcggagtgattgtatggctgctaattatcgctgggtgcaccataagtacaacttcgacaacctgggtcaggctcttatgtccctgttcgtgctggcctccaaggacgggtgggttaacatcatgtacaatgggctcgacgccgtggccgtggaccagcagcctgttacaaaccacaacccctggatgttgctatacttcatttcgtttctcctcatagtgtcttttttcgtgttgaatatgttcgtaggcgtggttgtagaaaacttccataaatgtcggcagcaccaagaagccgaagaggcccggcgcagggaggagaaacggcttaggcgactagaaaaaaagagacgtaaagcccagaggctgccctactacgccacctattgtcacactcgcctcctgattcacagcatgtgcaccagccactacttagatatattcattactttcatcatttgcctgaatgtggtgactatgagcctcgaacactataatcagcccactagcttggagaccgccctcaagtattgtaattatatgtttactacagtgttcgtgctggaagccgtgcttaagctagtagcttttgggcttcggaggttttttaaggacagatggaaccagttggacctcgctattgtgctgctctccgttatggggatcacactcgaagaaatcgagatcaatgctgccctgcccattaatccaacaatcataagaatcatgagagtgttgcggatagcacgcgtcctcaagctgctcaagatggccaccgggatgagagccctgctggacactgtggttcaagcgcttccccaggtcggcaacctgggtctgctgttcatgttgttattcttcatctacgccgccctaggagtggagttattcggaaagttggtttgcaatgacgaaaacccgtgcgaaggtatgagtcgacacgccaccttcgaaaatttcgggatggcatttttgaccctgtttcaggtctccaccggcgacaattggaatggcatcatgaaggacactctccgggattgtacccacgatgaaaggtcctgtctgtcgtcgttgcagtttgtatctccgttgtacttcgtgagctttgtgctgacagcacagtttgttctcattaacgtcgtggtcgccgtgttgatgaagcatctcgacgattcaaacaaagaggcccaggaagacgcagagatggacgctgaactggagctggagatggcgcacggacttgggccgggacctcgactgccaactgggtcacccggggcgccagggcgtggacctgggggagcaggaggcgggggcgatactgaaggcggcctgtgcagaagatgctatagtcccgcccaagaaaatctttggctggactccgtatctctgatcattaaagacagtctcgagggggagcttactatcattgacaatctgtccggtagcattttccatcattattcttcccccgcaggctgtaaaaaatgccatcacgacaagcaggaagtccagctcgcagaaacagaagccttctcactcaactcggatcgtagctccagcatcctgctcggagatgatttgtcactggaggaccctaccgcctgccctcccggacgaaaggactccaaaggcgaactggatcctcccgagcctatgcgcgtcggagacctgggcgagtgctttttcccactgagtagcacggcggtttccccagatcccgagaactttctctgtgagatggaagaaattccctttaatccagtgcgctcctggctgaaacacgacagcagtcaggcgcctccttcacctttcagcccagatgcttccagcccacttcttcctatgcctgctgagttctttcaccccgccgttagcgcatcgcaaaagggacctgaaaaaggcacagggaccgggaccttacccaagatcgcactccaggggtcctgggcatctctgcgcagtcctagggtcaattgtaccctcctgagacaggtgccaactcctcctcggccctag

SEQ ID NO: 207462 - DNA, 6672 bp, Artificial Sequence
  derived and/or modified sequence
atggcagagagcgctagccctccctctagctccgctgcggctccggccgcagagccgggcgtcacaaccgagcagccagggccgagaagcccaccatccagtcctcccggcctcgaagaacccttggatggagccgatccccatgtaccgcatccggacctggccccgattgctttcttctgcctgcgacaaacaaccagtccccgcaactggtgtatcaaaatggtttgcaatccctggtttgagtgtgtaagcatgctggtaatcctcctcaactgtgtaaccctgggcatgtatcagccttgcgatgacatggattgcctctcagaccgctgcaagattctgcaggttttcgatgactttatctttatattctttgccatggaaatggtgctaaagatggtggccttagggatattcggcaaaaagtgctatctaggcgacacctggaacaggctcgacttctttatcgtaatggccggcatggttgaatactccctggacttgcagaacatcaacctgagcgcgatccggactgtgcgggtgcttaggcccctcaaggctattaatcgtgtccctagtatgcgaatattggtaaatctgctgcttgacacgttgcccatgttggggaacgtcctgctcttatgcttctttgttttctttatattcggaattataggggttcaattgtgggccggcttgctgaggaaccgctgctttctcgaagagaattttactatccaaggagatgtggcgctgccgccttattatcaaccagaggaggacgacgaaatgccatttatttgcagcttgagcggcgacaacggaataatgggttgtcacgaaatccccccgctgaaagagcagggcagagaatgttgcctgagtaaagatgacgtctatgacttcggggctggcaggcaggaccttaatgcgtctggcctctgcgttaattggaatcgatattacaacgtctgccgcactggaagtgctaatcctcataaaggggccataaacttcgacaatatagggtatgcctggattgtgatttttcaagtgatcactctcgaggggtgggtagaaataatgtactatgtcatggatgcacatagcttttacaatttcatctatttcatcctccttatcatcgtcggctcgttcttcatgataaacctgtgccttgtcgtcattgcgactcagttctcagagactaaacagcgcgagcaccgtctcatgcttgaacaaagacagcgttatcttagcagttcgactgtagccagctatgctgagccaggggattgttatgaagagatcttccagtacgtctgccacatcctacgaaaagctaagcgaagggctctgggtctgtaccaagcccttcagtcaagacggcaggctttgggcccagaggcacccgcgccagccaaacccgggccacacgctaaagagccacggcactaccacggaaaaaccaaggggcagggggatgaagggcgccatctggggagcagacattgtcagactttacatgggcccgcttcacccggcaatgatcatagcgggcgtgaactttgcccacaacacagccctctcgatgctaccccacacaccctcgtgcaaccaatccccgccaccctcgcctccgacccagcatcatgcccttgctgccaacacgaggacggcagacggccttcaggcttaggatcaacagactccgggcaggaagggtctggcagtggtagctctgcagggggagaggacgaagccgatggagatggtgcacggagcagcgaagacggcgcttcctctgagctgggcaaggaagaggaagaagaggaacaggccgacggggcagtctggttgtgcggggatgtatggcgggaaacccgagctaagcttcgaggcatcgtggactcaaaatactttaacagaggcattatgatggcaatccttgtgaatacagtgagcatggggatcgaacaccacgagcagcccgaagaactgacaaatattctagagatatgcaacgtggtctttacatcgatgtttgctctcgagatgatcttaaagctcgctgccttcggtctgtttgattacctgcggaacccttacaacattttcgatagcatcatcgtcatcatctcaatctgggagatcgttgggcaagcagatggaggactttctgtgctgcgcacgttcagactcctccgcgtactcaagctggtgcgctttatgccagcccttagaagacagctcgttgtgttgatgaagacgatggataacgtcgctaccttttgcatgctgttaatgctgttcatcttcatcttcagtattctgggtatgcatatttttggctgcaagttctccctccggaccgatacaggggataccgtgcctgacagaaagaacttcgattccctgctgtgggcgatagtgactgtgtttcagatcctaacccaggaggactggaatgtagtattatacaatggcatggcctcgacttccccctgggcttccctttattttgtcgccctaatgacctttgggaattatgtcctgtttaatctcttggtggcgattctagtggaagggtttcaggctgagggagatgctaatagatcctacagcgacgaggaccagtccagctcaaatatagaggagttcgacaagctgcaggaaggattggatagctcaggcgatcccaaactgtgtccaatcccaatgacccccaatgggcatctcgacccctctctgcccttgggtgggcatctgggtcctgcaggcgctgccggccccgcacctagattgtccctgcaacctgatcccatgctggtggcgttaggaagtaggaaatcgagcgtcatgagcctggggcgcatgtcatacgaccagcgcagcctaagctcctccaggtcctcctattacggcccctggggtcgaagcgccgcttgggcctcgcggagatcatcttggaactcacttaaacacaagccaccctcggccgagcacgagtcccttctgagcgccgagaggggcggaggagcacgcgtctgcgaagtggccgcagacgagggtcctccccgagccgcaccgctccataccccacacgcacaccatattcatcatggcccccaccttgcccaccggcatcgacaccatagacgaaccctttcactggataaccgagactctgtggatttagcggagcttgttccagctgtgggtgcacacccaagggccgcatggcgcgcagcagggcccgcccccggccacgaggactgtaacgggagaatgccaagtattgcaaaggatgtctttaccaaaatgggagatagaggagatagaggagaggatgaggaggaaatcgattacactctgtgtttcagggttcggaagatgattgatgtatacaagccagattggtgtgaggtgagagaggactggagtgtttacctgttcagcccggagaatcgatttagagtgctgtgtcaaacaataatcgcccataaactgttcgactacgttgttctggctttcatctttcttaactgtatcactatcgctctggagagaccccaaatcgaggccggatccacagagaggatcttcctcacagtgagcaactatatctttacggccatctttgttggtgagatgacgctgaaggtggtgagtttgggtctgtattttggcgaacaggcgtacctcaggagcagttggaatgtgttagacggcttcttagttttcgtgtccattatcgacattgtggtatctctggcctccgccggaggggcaaaaatactcggagtattgcgagtgctgcggcttcttcgcacactccggcctctgagagtaatcagccgcgcacccggactcaaattagtcgtcgagactcttatctccagcctgaagcccataggtaatatcgtactgatttgctgtgcattctttataatatttgggattctcggcgtccagctgtttaagggcaaattctatcattgcctgggcgtggatactcgcaatatcactaatcggtctgactgtatggcagctaattaccggtgggtgcatcataagtataacttcgataacttaggccaagcacttatgtcactcttcgttcttgcctccaaggatgggtgggttaatattatgtataatggactcgatgcggttgcagtcgaccagcagccagttactaaccataacccctggatgctgctgtacttcatctcttttttgctgattgtaagcttctttgtgttaaacatgtttgtgggagtggtggtagaaaactttcacaaatgtcggcaacatcaggaagctgaggaggcacggcgccgcgaggagaagcgactaaggaggctggaaaagaagaggcgtaaagcccaaaggcttccctattatgcgacatactgccacacccgcctccttattcattcaatgtgcaccagccactacttagatatcttcataactttcataatttgtttaaatgtagtcaccatgtctctggaacactacaaccagccaactagcctagaaactgccctcaagtactgtaactacatgttcacaacggtattcgtgctggaagccgtgctaaagctagtcgcttttggactgaggcgcttctttaaggatcgctggaatcagctggaccttgccatagtcttgctttcagtgatgggaatcactctcgaagaaatcgagataaatgccgctttgccaataaatcccacgatcatccgcatcatgagagtcctgcgtatcgcccgagtgttgaaattgctcaaaatggccaccgggatgcgggcactacttgacacggtcgtgcaggcactaccacaggttggcaatctaggcttgctctttatgctgctcttctttatttacgcagcattaggtgtggaacttttcggcaaacttgtctgtaatgatgaaaacccttgcgagggcatgtctagacacgcaacttttgagaacttcgggatggccttcctgaccttgttccaggtatcaacaggcgacaattggaacggaataatgaaagacaccttgagggattgtacacatgacgaacggtcgtgcctctcgtcgctacagtttgtttcccctctgtactttgtttccttcgtactgactgcccagttcgtgctgatcaatgtggtcgtggctgttcttatgaaacacttggatgactccaataaggaggctcaagaggatgccgaaatggacgctgaactagagctggagatggcccacggactaggacctggtcctcggctcccaacagggagcccgggagcacctggcaggggcccaggaggggcggggggcggcggtgacactgaaggcggactctgcaggcggtgttatagtcctgcacaggagaatctgtggctcgacagcgtctcgctgatcatcaaagactccctggagggggaattgactataattgacaacctcagcggctccatttttcaccattactccagtcccgctggttgcaagaagtgtcaccacgataaacaagaggtccagctagccgaaaccgaagcttttagtctgaattctgacagatcaagtagcatcctcttgggggacgatttgagcctagaggacccaactgcctgtccccccggtcgcaaggatagcaagggtgagttggatcctcctgaacctatgagggttggcgatctgggcgagtgctttttccccctgtccagcaccgccgtgtcacctgatcctgagaacttcctgtgcgagatggaggaaatacccttcaacccagtgcggtcctggctgaaacatgactcgtcccaggccccccccagcccattcagcccagacgcatcatccccactcctcccaatgccggcggagttttttcaccctgcagtctctgctagccagaagggaccagaaaagggaaccggcactgggacccttcctaagatcgccctgcaaggcagttgggcaagcctgcggtctcctcgggtaaattgcacgttattgagacaagccacaggctcagacacatccttggacgcttcaccttctagctctgctggttcactgcagacaactttggaggacagcttgaccctgtctgacagtcctagacgagccctgggccctccggcccctgccccaggcccacgcgctgggctctcaccggcagctcgtcggaggctatctctgagggggagagggctctttagcctgcgcgggcttcgtgcccatcagaggagtcactcgagcggaggctccacctcaccaggttgcacccaccacgactcaatggatccatccgatgaggaagggcgcgggggagcaggagggggtggagcggggtcagagcactcagaaaccttatcgtctctcagcctcacctcgctgttttgtccaccacccccacccccggctccaggccttactcccgctaggaagttctcaagcacatcatccctggccgcgccaggacgcccacacgccgcagccttggcccacgggctggctagaagccctagctgggccgccgaccgaagtaaagatcccccaggccgcgcccctctccccatgggactgggtccactggcccccccccctcagcccctaccaggcgagctggaacccggagacgcagcttctaaacgcaagaggtag

SEQ ID NO: 207463 - DNA, 6690 bp, Artificial Sequence
  derived and/or modified sequence
atggccgagagcgccagcccccccagcagcagcgctgctgccccagctgctgagcccggggtgaccacagagcagcccggccccaggagcccccccagcagccccccaggcctggaggagcccctggatggagctgacccccacgtgccccacccagacctggcccccatcgccttcttctgcctgcggcagaccaccagccccaggaactggtgcatcaagatggccaccggcccctggtggtggtgcctgtgcatgctggtgatcctgctgaactgtgtgaccctgggcatgtaccagccctgtgatgacatggactgcctgagtgaccgctgcaagatcctgcaggtgtttgatgacttcatcttcatcttctttgccatggagatggtgctgaagatggtggccctgggcatctttgggaagaagtgctacctgggggacacctggaaccggctggacttcttcatcgtgatggccggcatggtggagtacagcctggacctgcagaacatcaacctgagcgccatcagaacagtgcgggtgctgcggcccctgaaggccatcaacagagtgcccagcatgaggatcctggtgaacctgctgctggacaccctgcccatgctgggcaatgtgctgctgctgtgcttctttgtgttcttcatcttcggcatcatcggcgtgcagctgtgggccggcctgctgaggaaccgctgcttcctggaggagaacttcaccatccagggagatgtggccctgcccccctactaccagccagaagaagatgatgagatgcccttcatctgcagcctgagcggggacaatggcatcatgggctgccacgagatcccccccctgaaggagcagggccgggagtgctgcctgagcaaggatgatgtgtatgactttggagctggccggcaggacctgaatgccagcggcctgtgtgtgaactggaaccgctactacaacgtgtgcaggacaggcagcgccaacccccacaagggggccatcaactttgacaacatcggctacgcctggatcgtcatcttccaggtgatcaccctggagggctgggtggagatcatgtactacgtgatggatgcccacagcttctacaacttcatctacttcatcctgctgatcatcgtgggcagcttcttcatgatcaacctgtgcctggtggtgattgccacccagttcagcgagaccaagcagcgggagcaccggctgatgctggagcagaggcagcgctacctgagcagcagcacagtggccagctatgcagagcccggggactgctatgaggagatcttccagtatgtgtgccacatcctgaggaaggccaagagaagagccctgggcctgtaccaggccctgcagagccggcggcaggccctgggccctgaggccccagccccagccaagccaggcccccacgccaaggagcccaggcactaccacggcaagaccaagggccagggagatgagggccgccacctgggcagccgccactgccagaccctgcacggccctgccagccctggaaatgaccacagcggccggggcaagccaggcccccgggagctgtgcccccagcacagccccctggatgccaccccccacaccctggtgcagcccatcccagccaccctggccagtgaccctgccagctgcccctgctgccagcatgaagatggccggcggcccagcggcctgggcagcacagacagcggccaggagggcagcggcagcggcagcagcgctggaggagaagatgaagcagatggagatggagcccggagcagtgaagatggagccagcagcgagctgggcaaggaggaggaggaggaggagcaggctgatggagctgtgtggctgtgtggagatgtgtggagggagacccgggccaagctgcggggcatcgtggacagcaagtacttcaacagaggcatcatgatggccatcctggtgaacacagtgtccatgggcatcgagcaccacgagcaggccaatgagctgaccaacatcctggagatctgcaatgtggtgttcacctccatgtttgccctggagatgatcctgaagctggccgccttcggcctgtttgactacctgaggaacccctacaacatctttgacagcatcatcgtcatcatcagcatctgggagatcgtgggccaggctgatggcggcctgtctgtgctgcggaccttccggctgctgcgggtgctgaagctggtgcgcttcatgcctgccctgcggcggcagctggtggtgctgatgaagaccatggacaacgtggccaccttctgcatgctgctgatgctgttcatcttcatcttcagcatcctgggcatgcacatcttcggctgcaagttcagcctgaggacagacaccggggacacagtgcctgacaggaagaactttgacagcctgctgtgggccatcgtgacagtgttccagatcctgacccaggaggactggaatgtggtgctgtacaacggcatggccagcaccagcccctgggccagcctgtactttgtggccctgatgaccttcggcaactacgtgctcttcaacctgctggtggccatcctggtggagggcttccaggccgagggagatgccaacagaagctacagtgatgaggaccagagcagcagcaacatcgaggagtttgacaagctgcaggagggcctggacagcagcggggaccccaagctgtgccccatccccatgaccccaaatggccacctggaccccagcctgcccctgggcggccacctgggccctgctggagctgctggccctgccccccggctgagcctgcagcctgaccccatgctggtggccctgggcagcaggaagagctctgtgatgagcctgggccgcatgtcctatgaccagaggagcctgagcagcagccgcagcagctactacggcccctggggccgctctgctgcctgggccagcagaagaagctcctggaacagcctgaagcacaagccacccagcgctgagcacgagagcctgctgtctgctgagcggggcggcggggcccgggtgtgtgaggtggccgcagatgagggcccccccagggctgcccccctgcacaccccccacgcccaccacatccaccacggcccccacctggcccaccgccaccgccaccacaggaggaccctgagcctggacaacagagacagcgtggacctggccgagctggtgcctgctgtgggcgcccacccccgggccgcctggagggctgctggccctgcccctggccacgaggactgcaatggaaggatgcccagcatcgccaaggatgtgttcaccaagatgggagacagaggagacagaggagaagatgaggaggagattgactacaccctgtgcttccgggtgaggaagatgattgatgtgtacaagccagactggtgtgaggtgcgggaggactggagcgtgtacctgttcagccctgagaaccgcttccgggtgctgtgccagaccatcatcgcccacaagctgtttgattatgtggtgctggccttcatcttcctgaactgcatcaccatcgccctggagcggccccagatcgaggccggcagcacagagcgcatcttcctgactgtgagcaactacatcttcaccgccatctttgtgggggagatgaccctgaaggtggtgtccctgggcctgtactttggagagcaggcctacctgcggagctcctggaatgtgctggatggcttcctggtgtttgtgtccatcattgatattgtggtgtccctggccagcgctgggggcgccaagatcctgggcgtgctgcgggtgctgcggctgctgcggaccctgcggcccctgcgggtcatcagccgggcccctggcctgaagctggtggtggagaccctcatcagcagcctgaagcccatcggcaacatcgtgctgatctgctgtgccttcttcatcatcttcggcatcctgggcgtgcagctgttcaagggcaagttctaccactgcctgggcgtggacaccaggaacatcaccaacagaagtgactgcatggccgccaactaccgctgggtgcaccacaagtacaactttgacaacctgggccaggccctgatgagcctgtttgtgctggccagcaaggatggctgggtgaacatcatgtacaacggcctggatgctgtggccgtggaccagcagcctgtgaccaaccacaacccctggatgctgctgtacttcatctccttcctgctgattgtgtccttctttgtgctgaacatgtttgtgggcgtggtggtggagaacttccacaagtgccggcagcaccaggaggccgaggaggcccggcggcgggaggagaagaggctgcggcggctggagaagaagaggaggaaggcccagaggctgccctactatgccacctactgccacacccggctgctgatccacagcatgtgcaccagccactacctggacatcttcatcaccttcatcatctgcctgaatgtggtgaccatgagcctggagcactacaaccagcccaccagcctggagacagccctgaagtactgcaactacatgttcaccaccgtgtttgtgctggaggccgtgctgaagctggtggccttcggcctgcggcgcttcttcaaggaccgctggaaccagctggacctggccatcgtgctgctgtctgtgatgggcatcaccctggaggagattgagatcaatgctgccctgcccatcaaccccaccatcatccgcatcatgagggtgctgcgcatcgcccgggtgctgaagctgctgaagatggccaccggcatgagggccctgctggacacagtggtgcaggccctgccccaggtgggcaacctgggcctgctcttcatgctgctcttcttcatctatgctgccctgggcgtggagctgtttgggaagctggtgtgcaatgatgagaacccctgtgagggcatgagcagacatgccacctttgagaactttggcatggccttcctgaccctcttccaggtgtccactggagacaactggaatggcatcatgaaggacaccctgcgggactgcacccatgatgagaggagctgcctgagcagcctgcagtttgtgagccccctgtactttgtgtcctttgtgctgacagcccagtttgtgctgatcaacgtggtggtggccgtgctgatgaagcacctggatgacagcaacaaggaggcccaggaggatgctgagatggatgctgagctggagctggagatggcccacggcctgggccctggcccccggctgcccaccggcagccctggggcccctggccggggccctgggggcgccggcggcggcggggacacagaaggaggcctgtgccgccgctgctacagccctgcccaggagaacctgtggctggacagcgtgtccctcatcatcaaggacagcctggagggggagctgaccatcatcgacaacctgagcggcagcatcttccaccactacagcagccctgctggctgcaagaagtgccaccacgacaagcaggaggtgcagctggccgagacagaggccttcagcctgaacagcgacaggagcagcagcatcctgctgggagatgacctgagcctggaggaccccacagcctgccccccaggcaggaaggacagcaagggggagctggaccccccagagcccatgagggtgggggacctgggggagtgcttcttccccctgagcagcacagctgtgtccccagaccctgagaacttcctgtgtgagatggaggagatccccttcaaccctgtgcgctcctggctgaagcatgacagcagccaggccccacccagccccttctccccagatgccagcagccccctgctgcccatgcctgctgagttcttccaccctgctgtgtctgccagccagaagggccctgagaagggcaccggcaccggcaccctgcccaagatcgccctgcagggctcctgggccagcctgcggagcccccgggtgaactgcaccctgctgcggcaggccactggaagtgacaccagcctggatgccagccccagcagcagcgctggcagcctgcagaccaccctggaggacagcctgaccctgagtgacagcccccggcgggccctgggccccccagccccagcccctggccccagggctggcctgagccctgctgcccggcggcggctgagcctgcggggccggggcctcttcagcctgcggggcctgcgggcccaccagaggagccacagcagcggcggcagcaccagccctggctgcacccaccacgacagcatggaccccagtgatgaggagggccggggcggggccggcggcggcggggccggcagcgagcacagcgagaccctgagcagcctgagcctgaccagcctcttctgccccccacctcctcctccagcccctggcctgaccccagccaggaagttcagcagcaccagcagcctggccgcccctggccggccccatgctgctgccctggcccacggcctggcccggagccccagctgggccgctgacaggagcaaggaccccccaggccgggcccccctgcccatgggcctgggccccctggcccccccaccccagcccctgcctggagagctggagcctggagatgctgccagcaagaggaagaggtag

SEQ ID NO: 207464 - DNA, 6051 bp, Artificial Sequence
  derived and/or modified sequence
atggccgagagcgccagcccccccagcagcagcgctgctgccccagctgctgagcccggggtgaccacagagcagcccggccccaggagcccccccagcagccccccaggcctggaggagcccctggatggagctgacccccacgtgccccacccagacctggcccccatcgccttcttctgcctgcggcagaccaccagccccaggaactggtgcatcaagatggtgtgcaacccctggtttgaatgtgtgtccatgctggtgatcctgctgaactgtgtgaccctgggcatgtaccagccctgtgatgacatggactgcctgagtgaccgctgcaagatcctgcaggtgtttgatgacttcatcttcatcttctttgccatggagatggtgctgaagatggtggccctgggcatctttgggaagaagtgctacctgggggacacctggaaccggctggacttcttcatcgtgatggccggcatggtggagtacagcctggacctgcagaacatcaacctgagcgccatcagaacagtgcgggtgctgcggcccctgaaggccatcaacagagtgcccagcatgaggatcctggtgaacctgctgctggacaccctgcccatgctgggcaatgtgctgctgctgtgcttctttgtgttcttcatcttcggcatcatcggcgtgcagctgtgggccggcctgctgaggaaccgctgcttcctggaggagaacttcaccatccagggagatgtggccctgcccccctactaccagccagaagaagatgatgagatgcccttcatctgcagcctgagcggggacaatggcatcatgggctgccacgagatcccccccctgaaggagcagggccgggagtgctgcctgagcaaggatgatgtgtatgactttggagctggccggcaggacctgaatgccagcggcctgtgtgtgaactggaaccgctactacaacgtgtgcaggacaggcagcgccaacccccacaagggggccatcaactttgacaacatcggctacgcctggatcgtcatcttccaggtgatcaccctggagggctgggtggagatcatgtactacgtgatggatgcccacagcttctacaacttcatctacttcatcctgctgatcatcgtgggcagcttcttcatgatcaacctgtgcctggtggtgattgccacccagttcagcgagaccaagcagcgggagcaccggctgatgctggagcagaggcagcgctacctgagcagcagcacagtggccagctatgcagagcccggggactgctatgaggagatcttccagtatgtgtgccacatcctgaggaaggccaagagaagagccctgggcctgtaccaggccctgcagagccggcggcaggccctgggccctgaggccccagccccagccaagccaggcccccacgccaaggagcccaggcactaccacggcaagaccaagggccagggagatgagggccgccacctgggcagccgccactgccagaccctgcacggccctgccagccctggaaatgaccacagcggccgggagctgtgcccccagcacagccccctggatgccaccccccacaccctggtgcagcccatcccagccaccctggccagtgaccctgccagctgcccctgctgccagcatgaagatggccggcggcccagcggcctgggcagcacagacagcggccaggagggcagcggcagcggcagcagcgctggaggagaagatgaagcagatggagatggagcccggagcagtgaagatggagccagcagcgagctgggcaaggaggaggaggaggaggagcaggctgatggagctgtgtggctgtgtggagatgtgtggagggagacccgggccaagctgcggggcatcgtggacagcaagtacttcaacagaggcatcatgatggccatcctggtgaacacagtgtccatgggcatcgagcaccacgagcagcctgaggagctgaccaacatcctggagatctgcaatgtggtgttcacctccatgtttgccctggagatgatcctgaagctggccgccttcggcctgtttgactacctgaggaacccctacaacatctttgacagcatcatcgtcatcatcagcatctgggagatcgtgggccaggctgatggcggcctgtctgtgctgcggaccttccggctgctgcgggtgctgaagctggtgcgcttcatgcctgccctgcggcggcagctggtggtgctgatgaagaccatggacaacgtggccaccttctgcatgctgctgatgctgttcatcttcatcttcagcatcctgggcatgcacatcttcggctgcaagttcagcctgaggacagacaccggggacacagtgcctgacaggaagaactttgacagcctgctgtgggccatcgtgacagtgttccagatcctgacccaggaggactggaatgtggtgctgtacaacggcatggccagcaccagcccctgggccagcctgtactttgtggccctgatgaccttcggcaactacgtgctcttcaacctgctggtggccatcctggtggagggcttccaggccgagggagatgccaacagaagctacagtgatgaggaccagagcagcagcaacatcgaggagtttgacaagctgcaggagggcctggacagcagcggggaccccaagctgtgccccatccccatgaccccaaatggccacctggaccccagcctgcccctgggcggccacctgggccctgctggagctgctggccctgccccccggctgagcctgcagcctgaccccatgctggtggccctgggcagcaggaagagctctgtgatgagcctgggccgcatgtcctatgaccagaggagcctgagcagcagccgcagcagctactacggcccctggggccgctctgctgcctgggccagcagaagaagctcctggaacagcctgaagcacaagccacccagcgctgagcacgagagcctgctgtctgctgagcggggcggcggggcccgggtgtgtgaggtggccgcagatgagggcccccccagggctgcccccctgcacaccccccacgcccaccacatccaccacggcccccacctggcccaccgccaccgccaccacaggaggaccctgagcctggacaacagagacagcgtggacctggccgagctggtgcctgctgtgggcgcccacccccgggccgcctggagggctgctggccctgcccctggccacgaggactgcaatggaaggatgcccagcatcgccaaggatgtgttcaccaagatgggagacagaggagacagaggagaagatgaggaggagattgactacaccctgtgcttccgggtgaggaagatgattgatgtgtacaagccagactggtgtgaggtgcgggaggactggagcgtgtacctgttcagccctgagaaccgcttccgggtgctgtgccagaccatcatcgcccacaagctgtttgattatgtggtgctggccttcatcttcctgaactgcatcaccatcgccctggagcggccccagatcgaggccggcagcacagagcgcatcttcctgactgtgagcaactacatcttcaccgccatctttgtgggggagatgaccctgaaggtggtgtccctgggcctgtactttggagagcaggcctacctgcggagctcctggaatgtgctggatggcttcctggtgtttgtgtccatcattgatattgtggtgtccctggccagcgctgggggcgccaagatcctgggcgtgctgcgggtgctgcggctgctgcggaccctgcggcccctgcgggtcatcagccgggcccctggcctgaagctggtggtggagaccctcatcagcagcctgaagcccatcggcaacatcgtgctgatctgctgtgccttcttcatcatcttcggcatcctgggcgtgcagctgttcaagggcaagttctaccactgcctgggcgtggacaccaggaacatcaccaacagaagtgactgcatggccgccaactaccgctgggtgcaccacaagtacaactttgacaacctgggccaggccctgatgagcctgtttgtgctggccagcaaggatggctgggtgaacatcatgtacaacggcctggatgctgtggccgtggaccagcagcctgtgaccaaccacaacccctggatgctgctgtacttcatctccttcctgctgattgtgtccttctttgtgctgaacatgtttgtgggcgtggtggtggagaacttccacaagtgccggcagcaccaggaggccgaggaggcccggcggcgggaggagaagaggctgcggcggctggagaagaagaggaggaaggcccagaggctgccctactatgccacctactgccacacccggctgctgatccacagcatgtgcaccagccactacctggacatcttcatcaccttcatcatctgcctgaatgtggtgaccatgagcctggagcactacaaccagcccaccagcctggagacagccctgaagtactgcaactacatgttcaccaccgtgtttgtgctggaggccgtgctgaagctggtggccttcggcctgcggcgcttcttcaaggaccgctggaaccagctggacctggccatcgtgctgctgtctgtgatgggcatcaccctggaggagattgagatcaatgctgccctgcccatcaaccccaccatcatccgcatcatgagggtgctgcgcatcgcccgggtgctgaagctgctgaagatggccaccggcatgagggccctgctggacacagtggtgcaggccctgccccaggtgggcaacctgggcctgctcttcatgctgctcttcttcatctatgctgccctgggcgtggagctgtttgggaagctggtgtgcaatgatgagaacccctgtgagggcatgagcagacatgccacctttgagaactttggcatggccttcctgaccctcttccaggtgtccactggagacaactggaatggcatcatgaaggacaccctgcgggactgcacccatgatgagaggagctgcctgagcagcctgcagtttgtgagccccctgtactttgtgtcctttgtgctgacagcccagtttgtgctgatcaacgtggtggtggccgtgctgatgaagcacctggatgacagcaacaaggaggcccaggaggatgctgagatggatgctgagctggagctggagatggcccacggcctgggccctggcccccggctgcccaccggcagccctggggcccctggccggggccctgggggcgccggcggcggcggggacacagaaggaggcctgtgccgccgctgctacagccctgcccaggagaacctgtggctggacagcgtgtccctcatcatcaaggacagcctggagggggagctgaccatcatcgacaacctgagcggcagcatcttccaccactacagcagccctgctggctgcaagaagtgccaccacgacaagcaggaggtgcagctggccgagacagaggccttcagcctgaacagcgacaggagcagcagcatcctgctgggagatgacctgagcctggaggaccccacagcctgccccccaggcaggaaggacagcaagggggagctggaccccccagagcccatgagggtgggggacctgggggagtgcttcttccccctgagcagcacagctgtgtccccagaccctgagaacttcctgtgtgagatggaggagatccccttcaaccctgtgcgctcctggctgaagcatgacagcagccaggccccacccagccccttctccccagatgccagcagccccctgctgcccatgcctgctgagttcttccaccctgctgtgtctgccagccagaagggccctgagaagggcaccggcaccggcaccctgcccaagatcgccctgcagggctcctgggccagcctgcggagcccccgggtgaactgcaccctgctgcggcaggtgcccaccccaccccggccctag

SEQ ID NO: 207465 - DNA, 6672 bp, Artificial Sequence
  derived and/or modified sequence
atggccgagagcgccagcccccccagcagcagcgctgctgccccagctgctgagcccggggtgaccacagagcagcccggccccaggagcccccccagcagccccccaggcctggaggagcccctggatggagctgacccccacgtgccccacccagacctggcccccatcgccttcttctgcctgcggcagaccaccagccccaggaactggtgcatcaagatggtgtgcaacccctggtttgaatgtgtgtccatgctggtgatcctgctgaactgtgtgaccctgggcatgtaccagccctgtgatgacatggactgcctgagtgaccgctgcaagatcctgcaggtgtttgatgacttcatcttcatcttctttgccatggagatggtgctgaagatggtggccctgggcatctttgggaagaagtgctacctgggggacacctggaaccggctggacttcttcatcgtgatggccggcatggtggagtacagcctggacctgcagaacatcaacctgagcgccatcagaacagtgcgggtgctgcggcccctgaaggccatcaacagagtgcccagcatgaggatcctggtgaacctgctgctggacaccctgcccatgctgggcaatgtgctgctgctgtgcttctttgtgttcttcatcttcggcatcatcggcgtgcagctgtgggccggcctgctgaggaaccgctgcttcctggaggagaacttcaccatccagggagatgtggccctgcccccctactaccagccagaagaagatgatgagatgcccttcatctgcagcctgagcggggacaatggcatcatgggctgccacgagatcccccccctgaaggagcagggccgggagtgctgcctgagcaaggatgatgtgtatgactttggagctggccggcaggacctgaatgccagcggcctgtgtgtgaactggaaccgctactacaacgtgtgcaggacaggcagcgccaacccccacaagggggccatcaactttgacaacatcggctacgcctggatcgtcatcttccaggtgatcaccctggagggctgggtggagatcatgtactacgtgatggatgcccacagcttctacaacttcatctacttcatcctgctgatcatcgtgggcagcttcttcatgatcaacctgtgcctggtggtgattgccacccagttcagcgagaccaagcagcgggagcaccggctgatgctggagcagaggcagcgctacctgagcagcagcacagtggccagctatgcagagcccggggactgctatgaggagatcttccagtatgtgtgccacatcctgaggaaggccaagagaagagccctgggcctgtaccaggccctgcagagccggcggcaggccctgggccctgaggccccagccccagccaagccaggcccccacgccaaggagcccaggcactaccacggcaagaccaagggccagggagatgagggccgccacctgggcagccgccactgccagaccctgcacggccctgccagccctggaaatgaccacagcggccgggagctgtgcccccagcacagccccctggatgccaccccccacaccctggtgcagcccatcccagccaccctggccagtgaccctgccagctgcccctgctgccagcatgaagatggccggcggcccagcggcctgggcagcacagacagcggccaggagggcagcggcagcggcagcagcgctggaggagaagatgaagcagatggagatggagcccggagcagtgaagatggagccagcagcgagctgggcaaggaggaggaggaggaggagcaggctgatggagctgtgtggctgtgtggagatgtgtggagggagacccgggccaagctgcggggcatcgtggacagcaagtacttcaacagaggcatcatgatggccatcctggtgaacacagtgtccatgggcatcgagcaccacgagcagcctgaggagctgaccaacatcctggagatctgcaatgtggtgttcacctccatgtttgccctggagatgatcctgaagctggccgccttcggcctgtttgactacctgaggaacccctacaacatctttgacagcatcatcgtcatcatcagcatctgggagatcgtgggccaggctgatggcggcctgtctgtgctgcggaccttccggctgctgcgggtgctgaagctggtgcgcttcatgcctgccctgcggcggcagctggtggtgctgatgaagaccatggacaacgtggccaccttctgcatgctgctgatgctgttcatcttcatcttcagcatcctgggcatgcacatcttcggctgcaagttcagcctgaggacagacaccggggacacagtgcctgacaggaagaactttgacagcctgctgtgggccatcgtgacagtgttccagatcctgacccaggaggactggaatgtggtgctgtacaacggcatggccagcaccagcccctgggccagcctgtactttgtggccctgatgaccttcggcaactacgtgctcttcaacctgctggtggccatcctggtggagggcttccaggccgagggagatgccaacagaagctacagtgatgaggaccagagcagcagcaacatcgaggagtttgacaagctgcaggagggcctggacagcagcggggaccccaagctgtgccccatccccatgaccccaaatggccacctggaccccagcctgcccctgggcggccacctgggccctgctggagctgctggccctgccccccggctgagcctgcagcctgaccccatgctggtggccctgggcagcaggaagagctctgtgatgagcctgggccgcatgtcctatgaccagaggagcctgagcagcagccgcagcagctactacggcccctggggccgctctgctgcctgggccagcagaagaagctcctggaacagcctgaagcacaagccacccagcgctgagcacgagagcctgctgtctgctgagcggggcggcggggcccgggtgtgtgaggtggccgcagatgagggcccccccagggctgcccccctgcacaccccccacgcccaccacatccaccacggcccccacctggcccaccgccaccgccaccacaggaggaccctgagcctggacaacagagacagcgtggacctggccgagctggtgcctgctgtgggcgcccacccccgggccgcctggagggctgctggccctgcccctggccacgaggactgcaatggaaggatgcccagcatcgccaaggatgtgttcaccaagatgggagacagaggagacagaggagaagatgaggaggagattgactacaccctgtgcttccgggtgaggaagatgattgatgtgtacaagccagactggtgtgaggtgcgggaggactggagcgtgtacctgttcagccctgagaaccgcttccgggtgctgtgccagaccatcatcgcccacaagctgtttgattatgtggtgctggccttcatcttcctgaactgcatcaccatcgccctggagcggccccagatcgaggccggcagcacagagcgcatcttcctgactgtgagcaactacatcttcaccgccatctttgtgggggagatgaccctgaaggtggtgtccctgggcctgtactttggagagcaggcctacctgcggagctcctggaatgtgctggatggcttcctggtgtttgtgtccatcattgatattgtggtgtccctggccagcgctgggggcgccaagatcctgggcgtgctgcgggtgctgcggctgctgcggaccctgcggcccctgcgggtcatcagccgggcccctggcctgaagctggtggtggagaccctcatcagcagcctgaagcccatcggcaacatcgtgctgatctgctgtgccttcttcatcatcttcggcatcctgggcgtgcagctgttcaagggcaagttctaccactgcctgggcgtggacaccaggaacatcaccaacagaagtgactgcatggccgccaactaccgctgggtgcaccacaagtacaactttgacaacctgggccaggccctgatgagcctgtttgtgctggccagcaaggatggctgggtgaacatcatgtacaacggcctggatgctgtggccgtggaccagcagcctgtgaccaaccacaacccctggatgctgctgtacttcatctccttcctgctgattgtgtccttctttgtgctgaacatgtttgtgggcgtggtggtggagaacttccacaagtgccggcagcaccaggaggccgaggaggcccggcggcgggaggagaagaggctgcggcggctggagaagaagaggaggaaggcccagaggctgccctactatgccacctactgccacacccggctgctgatccacagcatgtgcaccagccactacctggacatcttcatcaccttcatcatctgcctgaatgtggtgaccatgagcctggagcactacaaccagcccaccagcctggagacagccctgaagtactgcaactacatgttcaccaccgtgtttgtgctggaggccgtgctgaagctggtggccttcggcctgcggcgcttcttcaaggaccgctggaaccagctggacctggccatcgtgctgctgtctgtgatgggcatcaccctggaggagattgagatcaatgctgccctgcccatcaaccccaccatcatccgcatcatgagggtgctgcgcatcgcccgggtgctgaagctgctgaagatggccaccggcatgagggccctgctggacacagtggtgcaggccctgccccaggtgggcaacctgggcctgctcttcatgctgctcttcttcatctatgctgccctgggcgtggagctgtttgggaagctggtgtgcaatgatgagaacccctgtgagggcatgagcagacatgccacctttgagaactttggcatggccttcctgaccctcttccaggtgtccactggagacaactggaatggcatcatgaaggacaccctgcgggactgcacccatgatgagaggagctgcctgagcagcctgcagtttgtgagccccctgtactttgtgtcctttgtgctgacagcccagtttgtgctgatcaacgtggtggtggccgtgctgatgaagcacctggatgacagcaacaaggaggcccaggaggatgctgagatggatgctgagctggagctggagatggcccacggcctgggccctggcccccggctgcccaccggcagccctggggcccctggccggggccctgggggcgccggcggcggcggggacacagaaggaggcctgtgccgccgctgctacagccctgcccaggagaacctgtggctggacagcgtgtccctcatcatcaaggacagcctggagggggagctgaccatcatcgacaacctgagcggcagcatcttccaccactacagcagccctgctggctgcaagaagtgccaccacgacaagcaggaggtgcagctggccgagacagaggccttcagcctgaacagcgacaggagcagcagcatcctgctgggagatgacctgagcctggaggaccccacagcctgccccccaggcaggaaggacagcaagggggagctggaccccccagagcccatgagggtgggggacctgggggagtgcttcttccccctgagcagcacagctgtgtccccagaccctgagaacttcctgtgtgagatggaggagatccccttcaaccctgtgcgctcctggctgaagcatgacagcagccaggccccacccagccccttctccccagatgccagcagccccctgctgcccatgcctgctgagttcttccaccctgctgtgtctgccagccagaagggccctgagaagggcaccggcaccggcaccctgcccaagatcgccctgcagggctcctgggccagcctgcggagcccccgggtgaactgcaccctgctgcggcaggccactggaagtgacaccagcctggatgccagccccagcagcagcgctggcagcctgcagaccaccctggaggacagcctgaccctgagtgacagcccccggcgggccctgggccccccagccccagcccctggccccagggctggcctgagccctgctgcccggcggcggctgagcctgcggggccggggcctcttcagcctgcggggcctgcgggcccaccagaggagccacagcagcggcggcagcaccagccctggctgcacccaccacgacagcatggaccccagtgatgaggagggccggggcggggccggcggcggcggggccggcagcgagcacagcgagaccctgagcagcctgagcctgaccagcctcttctgccccccacctcctcctccagcccctggcctgaccccagccaggaagttcagcagcaccagcagcctggccgcccctggccggccccatgctgctgccctggcccacggcctggcccggagccccagctgggccgctgacaggagcaaggaccccccaggccgggcccccctgcccatgggcctgggccccctggcccccccaccccagcccctgcctggagagctggagcctggagatgctgccagcaagaggaagaggtag

SEQ ID NO: 207466 - DNA, 6690 bp, Artificial Sequence
  derived and/or modified sequence
atggccgagagcgccagcccccccagcagcagcgccgccgcccccgccgccgaacccggcgtgacaaccgaacagcctggtccccgttctcctccttcatcgccacctggcttggaggagccactcgatggtgcagatccacatgtgcctcatccggatcttgcacccatcgcatttttttgtctaaggcagacaacctcccccaggaattggtgtatcaaaatggcaacaggcccctggtggtggtgcctttgcatgcttgtgattctgctgaattgtgtcactttaggcatgtaccaaccttgtgatgatatggattgcctgagcgatcgctgcaaaatcctccaggtgtttgacgattttatttttattttctttgctatggagatggtgttaaaaatggtggccttgggcatctttggcaaaaaatgctacctgggcgacacctggaacaggctcgactttttcattgtgatggctggcatggtagaatactcgctggacctgcaaaatatcaacctgagcgccatacggactgtcagggtgctgcgccctttaaaggctataaatcgcgtcccctccatgcgcatccttgttaatcttttgctcgataccctcccgatgttgggtaatgtgctcctactgtgtttcttcgtgttttttatcttcggtattatcggcgtccagctctgggccggactgctgaggaaccggtgttttctcgaggagaattttacaatccagggcgatgtagccctccccccctactaccagccagaagaggatgatgaaatgccattcatctgcagtctgagtggagacaatggtatcatggggtgccacgagataccccccctcaaggagcaaggccgagaatgctgtctctccaaagacgatgtctacgacttcggcgctgggaggcaggacctgaacgcttcagggctgtgcgtcaactggaatcgatactacaacgtgtgccgtaccggtagtgcaaatccccacaagggcgctatcaacttcgataacatcggctacgcttggatcgtgatttttcaggtcattacactcgagggatgggtcgagatcatgtactacgtgatggatgcgcattccttttataactttatatactttattttgttgatcatcgtgggctctttcttcatgatcaatctctgtcttgtggttatagccactcagttcagtgaaaccaaacaacgggagcacaggctgatgctggagcagagacagcgttatctctccagctctacagtggcctcatatgctgaacccggggactgctatgaagagatctttcaatacgtgtgccacatattacgcaaagctaaacgccgggcactgggactgtaccaagcactgcagtccaggaggcaggccctggggccagaagcgccagccccagccaagcctggcccacatgccaaagagccacggcactaccatggcaaaaccaaagggcagggagatgagggacgccatctcgggagtcgacactgtcagacactgcacggtccagcatcgcccgggaatgatcacagtggccgcggaaagcccggtcctagagaactgtgcccccagcactccccattggacgctacaccacacactcttgtgcagcccatacccgctaccctggcaagtgacccagcgagctgcccttgctgtcagcacgaggatggccgtcggccaagcgggctgggttctaccgactccggacaagaaggtagcgggtcgggcagttctgccggcggagaggatgaggcagatggcgacggtgctagatcatctgaggacggggctagctccgagctgggtaaagaggaagaggaggaggaacaggcagacggagccgtgtggctgtgtggcgacgtgtggcgcgagacaagagctaaattgcgcggtatcgtggactctaagtacttcaaccgtggcataatgatggcaattcttgttaacacagtgagtatgggaattgagcaccacgagcaggctaacgaactgactaacatcctggaaatttgcaatgtcgtattcacttccatgtttgccctcgaaatgattctgaaactggccgcgttcggcctgttcgactacctacggaatccctacaatatctttgatagtattattgtgatcattagtatttgggagatcgtcgggcaagcagacggtgggctgagcgtcctcagaacctttcggctgctgagagtgctcaaactggtcaggtttatgccggcgctgagaagacagctggttgtcttaatgaagactatggacaatgtggccaccttctgcatgctactcatgctttttatctttatattcagcatccttggcatgcacatatttgggtgtaaattcagtctacggaccgatacaggtgacaccgtcccagatcgaaagaactttgattcactgttgtgggctattgtaaccgtgttccaaattcttacccaggaggactggaacgttgtcctctataacgggatggctagtacaagcccttgggcctccttgtatttcgtggcactgatgaccttcggtaattatgtgttattcaatctgcttgtggccatcctggtcgagggttttcaggctgaaggagatgcaaataggtcttactcagacgaagaccagagctcctcgaacatagaagagttcgataagcttcaggagggactcgatagcagcggcgatccgaagctgtgccccatccctatgacccctaacgggcaccttgacccttctctacctctgggtggacacctggggccagctggcgctgcggggccagccccgaggctctcattgcagcccgacccaatgttggtggctctcggttcgcgaaagtcctccgtgatgtctttgggcagaatgtcgtacgatcaaagatcgttgagtagttcacggagttcttactatgggccttgggggagatccgccgcatgggctagtcgtcggtcatcttggaattccctcaagcacaaacctccctcagccgagcatgagtcactcctgtctgcggagagggggggaggagcgagagtgtgtgaggtcgctgccgatgagggtccccctagggctgctccactgcatacgccccacgctcatcacatccatcatggcccgcatcttgctcacagacatagacatcatagacgtactctctccctggataacagggactctgtggatctggccgagttggtccccgcagttggtgcccatccaagggcagcatggcgggccgccggccccgctcccggccatgaagactgcaacggcaggatgcccagcattgcaaaagacgtttttaccaagatgggggaccgaggcgaccgcggagaggatgaagaagagatcgactataccctttgctttagagtgagaaagatgattgatgtatacaaaccagactggtgcgaggttcgggaagattggagcgtgtacttattcagccctgagaacagatttagggtgctgtgccagaccattatagctcacaagctgttcgattacgtggtcctcgcttttatttttctgaattgcattacaatcgcactcgagcgtccacagatcgaggctgggagcactgaaagaatctttctgactgtgtccaactatatctttacagctatctttgtgggtgagatgacactgaaagtcgtctccttgggtctctatttcggagagcaggcatatcttcggagctcatggaatgtgctcgacggctttctcgtgttcgtctcaatcatcgatattgtggtgtcccttgcatcggcaggcggcgccaagatcctgggagtgctccgagtactccggcttttacggactcttcgcccgcttagggtaatttccagggcacccgggttgaagcttgtagtagagacgttaatctctagtctgaagcctataggaaacatcgtgttaatatgctgtgctttcttcattattttcgggatactcggagtgcagttgtttaagggcaagttttatcactgcctcggcgttgataccaggaatatcaccaacaggtcagattgcatggctgccaactatcgctgggtgcatcataaatataacttcgacaacctgggccaggccctgatgtcactgtttgtactcgcttctaaagatggatgggttaacatcatgtacaacggtctagatgccgtggccgtggatcagcagcctgtgacaaaccacaacccttggatgctcctttatttcatctcattcctgctgatcgtgagctttttcgtcctgaatatgttcgtgggcgttgtggttgaaaatttccataaatgtcggcagcaccaagaggccgaggaagcacgtcgccgcgaagagaagcgcctgagacgtctcgagaagaagagacgcaaggctcagcgcctcccctactatgccacttattgtcacactagacttcttattcactccatgtgcacctcccactacctggacatcttcataacgttcataatttgcttaaacgtggttaccatgtccctggagcactacaatcagcctacaagcttggaaaccgctctgaaatattgtaattatatgttcaccacagttttcgttctcgaagcggtgttgaaactcgtggccttcggactgagacggtttttcaaggaccggtggaaccagttggacttggcaatcgtgttgctgagtgttatgggcataaccctcgaggagatcgagataaatgctgcactcccaatcaacccgaccatcatccggatcatgcgcgtcttacggatcgccagagtcctcaagttactcaaaatggccacgggtatgcgtgcattactggacacggttgtgcaagctctgcctcaagtgggaaatctggggctcttatttatgctgctttttttcatctacgctgccctcggcgtggagttattcggcaagctggtctgcaatgatgagaacccctgtgaaggcatgtcccgtcacgctacattcgaaaactttggcatggcgttcctgactctgtttcaggtgagcaccggggacaattggaatgggatcatgaaggataccttgcgcgactgtactcatgatgagcgctcctgcctctctagcctgcagttcgtcagtccactctattttgtatccttcgtgttaacggctcagtttgttctaatcaatgtagtcgtggcggttttaatgaagcatctcgatgattccaataaagaagcacaggaagacgccgaaatggatgccgagcttgaactggagatggctcacggtctggggccagggccccgcctgcctaccggcagccctggcgctccaggtagggggcccggcggtgccgggggggggggagatactgagggagggctgtgcaggagatgttattcccccgcacaggaaaacctctggcttgactccgtgagtctgataattaaggatagcctggaaggggaactgaccatcattgacaatctgtccggctcaattttccatcactactcatctcctgctggatgcaaaaaatgccatcacgacaagcaagaagtgcagctggcagagactgaggcattttcactcaacagcgaccgatctagctccatactgctgggcgatgacctctccctcgaagacccgacagcctgtcctcccgggaggaaagatagcaagggagagctggaccccccagagcctatgcgagtgggcgacctcggggaatgttttttcccccttagcagtactgccgtaagccctgaccctgagaactttctttgtgagatggaggagattcccttcaaccctgtgagaagttggctcaaacatgacagttcccaggcgcccccttcaccattttcaccagacgcctccagccctcttctcccgatgcctgctgagttttttcacccagcagtttccgcctcgcagaaggggcctgaaaaaggcaccggcactggaacgcttcctaaaattgctttgcaggggagctgggcttccctccggagccctcgggtcaattgcactttgctgcggcaggctaccggctcagacacatccctggatgcttcacctagttcttctgctggctcattgcagactaccttagaagactctctcaccctgtccgattcccccaggagagccctcggcccacccgcaccagctcctgggccaagagccgggctgtccccagctgcaagacgccgactctcacttagaggccgtggccttttttccctcagggggttgagagcccatcagagatcccacagtagcggaggaagtacctcgcccgggtgcacccatcacgattctatggacccttctgatgaagaaggcagagggggggcggggggtggcggggcgggctccgagcacagtgaaacactttctagtctgtctcttacctcgttattttgcccacccccgccgccacccgctcccgggttaactcccgctcggaaattttcaagcacttcaagcctcgctgctccaggccggccccatgccgctgccctggcccacggcctcgcgcgctctccttcctgggcagcagataggtcaaaggacccgcctggcagggctccacttcccatgggcctcggccctctggcaccccctccccagccactgccaggtgaattggaaccaggagatgcggcatcaaaacgcaagagatag

SEQ ID NO: 207467 - DNA, 6051 bp, Artificial Sequence
  derived and/or modified sequence
atggccgagagcgccagcccccccagcagcagcgccgccgcccccgccgccgagcctggggttacaacagaacagcccggcccgcgctccccaccaagctcccccccaggccttgaagagccactggatggggctgatcctcacgttccacaccccgacctcgcccctatcgctttcttctgcctgaggcagacaacttctccaagaaattggtgcatcaagatggtgtgtaacccttggtttgagtgcgtctcaatgctcgtgatcctgctcaactgcgttactctcgggatgtaccaaccttgtgacgacatggattgtctatccgacaggtgtaaaattcttcaagtgtttgacgactttatcttcatcttctttgccatggagatggttctcaaaatggttgcactgggaatctttgggaagaagtgttatctcggtgatacctggaacaggctggacttcttcattgtgatggccggcatggtggagtatagcctggacctgcagaatatcaatctgagtgctatacgaacggtaagggttctgcggcctcttaaggcaattaaccgtgttcctagtatgagaattctggtgaatctcttactggacactctgccaatgcttggaaacgtgctgctgttgtgctttttcgtgtttttcattttcggcatcataggggtccagttatgggccgggctcctccgtaacaggtgcttcttggaagagaacttcacaatccagggggacgtcgcactgccaccctactatcaacctgaggaggatgatgagatgcccttcatctgcagtctgtctggagataacgggattatgggctgccatgaaatcccacccttgaaggagcaaggacgggagtgctgtctgagcaaggatgatgtttacgactttggcgctggacggcaggacctgaatgcaagtggcctctgtgtgaactggaaccggtactataacgtatgtcgtaccggcagtgctaacccacataaaggagcaatcaactttgataacatcggttacgcctggatagtgatctttcaggtgatcaccctcgagggttgggtcgagataatgtactacgtcatggatgcgcacagtttctacaattttatctacttcatcctgctgatcatagtgggatccttctttatgatcaacttatgcctggttgtgatcgcgactcaattctccgaaactaagcagagggaacacagactcatgctcgaacaacgtcagaggtacctgtcatcaagtactgtggcttcctacgccgagccgggagactgctacgaggaaattttccagtatgtgtgccacatcctgagaaaggccaagagaagagcccttggattgtatcaggcattgcagagcagacggcaggccctcgggccggaggccccagccccagccaaacccgggccacacgccaaggagccgagacactatcacggcaagacaaagggccaaggcgatgagggaaggcacctcggaagcagacactgccaaaccttgcatggacccgcatctcccggtaatgatcattctgggcgtgaattatgcccacagcactctccattggacgctactcctcacactctcgttcagcctattcctgcgacactggcttccgatcccgcatcttgcccatgctgccagcatgaggatggtcggcggccctcagggctcggttcgactgactctggtcaggagggtagcggctccggatcgagtgccggtggtgaggatgaggccgatggggatggggcaaggtccagcgaagatggagcgagcagcgagctgggcaaggaggaagaggaggaagaacaggccgatggggcggtttggttatgtggggatgtgtggcgcgagaccagagccaaattgcggggcatagtggattctaaatactttaatcgagggatcatgatggcaatcctcgtgaacacagtgtcgatgggaatcgaacatcacgagcagccagaggaactaactaatatcttggagatttgtaatgtggtgttcactagcatgttcgcgctggaaatgatcttgaagctggctgccttcgggctgtttgactacttgaggaatccttataatattttcgactcaattattgtgattatctctatatgggagatcgtgggccaagcagatggtgggctgtccgtattgaggacttttcgcttactgagggtgctcaaacttgtgcggttcatgcctgcactgagacgccagttggtggtgctcatgaagacaatggataacgtggcgaccttttgtatgctgcttatgctttttatctttatattttcaatcctggggatgcacatcttcggatgcaagttctccctgaggacggacactggggatacagttcccgaccgcaaaaatttcgatagcctcctgtgggcaatagtgaccgttttccagattctcacccaagaggattggaacgtggtactttataatggtatggcctcaacttccccttgggcctcactctacttcgttgccctaatgacatttgggaactatgtgctgtttaacttgcttgtggccatactcgttgaaggttttcaggcggaaggcgacgcaaacagaagctatagtgacgaagatcaatcgagtagcaatatcgaggagttcgacaagctgcaggagggcctcgacagcagtggagacccgaagctgtgtccaatccctatgactccaaacggccacctcgacccgtccctgccattaggaggacatctggggccagcaggagcagcgggtccggcaccaaggctgtcactgcaacctgaccccatgcttgtggcacttggatcgaggaaaagctccgtcatgtctctgggcagaatgtcctacgaccagcgaagcctaagctcgtccaggagcagttattacggcccttggggacgttcagcagcctgggcttcccgtcggtccagttggaacagcctaaagcacaagcccccctctgctgaacacgagagcctcctgagtgccgaaaggggtgggggtgcacgggtttgcgaagtcgctgcggacgaggggcctccacgagctgccccactacacactccccacgcccaccacatacaccatggtccacacttggcccacagacatcggcaccatagacgcactctgagtcttgataatagggactccgtggacttggccgagttggtgccggccgttggcgcccacccaagggccgcttggcgcgccgccgggcccgcacccggacatgaggattgcaatgggaggatgccaagcatcgctaaagacgtgtttactaaaatgggagacagaggggacaggggcgaagacgaggaggagatcgattacaccctgtgtttcagggtccgaaaaatgatcgatgtgtacaaacccgactggtgcgaagttcgcgaggactggtccgtctacctcttttccccagagaatagattcagagtcttgtgccaaaccataatagctcataaactgttcgattacgtggtgctggcctttattttccttaattgcattaccatcgctctggaacgcccccagatagaagcgggctccacagaacgcatctttctgacggtgtcaaactacatttttacagccatcttcgtaggagaaatgaccttgaaggtagtgtcattggggctttatttcggagagcaggcatatctgcgctcgagttggaatgtcttggacggcttcctggtcttcgtgtccatcatcgatatcgttgtcagcttggcatctgcaggtggcgccaagatcctcggcgttttaagagtgctcaggctgctgcgcactctgagacctcttagagtgataagcagggccccaggcttaaaattggtggttgaaacgttgatttcaagcctgaagcctatcgggaatattgttctaatctgctgcgcattttttattatttttggcattctgggtgttcagctcttcaagggcaagttctaccattgcctcggcgtggatacgcgaaacataaccaaccgcagtgattgcatggccgccaactaccgctgggtccaccacaagtacaattttgacaacctggggcaggcgcttatgtctcttttcgtccttgcatctaaggatggctgggtcaatatcatgtacaatggcctggacgctgtagccgttgatcaacagcctgtaactaaccataacccatggatgctactgtacttcataagtttcctgctgatcgtgtcttttttcgtgctaaacatgttcgtgggggtggtcgtagagaactttcacaaatgcagacaacaccaagaggctgaagaggctagaaggagggaagaaaagaggctccgcaggcttgaaaagaagcggcggaaagcgcagcgacttccatactatgcgacttactgccatacgaggctgcttatccactccatgtgtacaagccattacttggatatcttcattacttttatcatctgcctgaatgtggtcacaatgagtttggagcattataaccagcctactagcctcgagaccgcattgaagtactgcaattatatgttcactacagttttcgtcctggaagcagtgctgaagcttgtggcttttggtctgcgccggttttttaaggacagatggaaccagctggacctcgcaattgtgttactctccgtgatgggaatcactcttgaggagattgagataaacgccgctctccccatcaacccaacaataatccgaatcatgcgcgtgcttagaatagctagagtcttgaaactcttaaagatggctaccggaatgcgcgctctgttagatacagtagtacaggcacttccacaggtggggaacttaggcctcttgtttatgctgttgttcttcatttatgccgcactcggggtggaactttttgggaagctggtctgcaatgatgaaaacccatgcgaaggtatgtctcgtcatgcaacatttgagaacttcggaatggcctttctgacgctgtttcaggtaagtaccggggacaattggaatggcatcatgaaggacactctccgagactgcacacacgacgaaaggtcctgcttgtcatcactgcaattcgtatccccactctactttgtgtcttttgttttgacagcgcagtttgtacttattaatgtggtggtggctgtgctgatgaagcatctggatgattcaaacaaggaggcccaagaggatgctgagatggatgccgaactggagctcgaaatggcccacgggctggggcccggaccaagactcccaacaggctctccaggtgccccaggccggggcccgggcggtgccggcggcggcggagataccgagggaggtttgtgccggaggtgttacagccctgcgcaggaaaatctgtggttagattctgtctccctgatcattaaagattccttagagggagagctgacaatcatcgataacctatctggctccatattccatcactacagctcacccgcgggctgtaagaagtgccatcatgacaagcaagaagtccaactggccgagactgaagccttcagcctcaattctgatcgcagctccagtattttgctgggagacgacttgtcgcttgaggatcctaccgcgtgtcccccaggcagaaaagactctaagggggaactggaccccccagagccgatgcgagtgggcgacctgggtgaatgcttcttcccactgagttcgacggccgtgtcccctgaccccgagaatttcctctgcgagatggaggagatcccattcaaccccgtgcgatcatggttgaaacacgactcttcccaggccccaccttcccccttttcacccgacgcttcttctcctttgctgcctatgccggctgaattcttccacccagccgtctctgcctctcagaagggccctgagaaggggacagggacaggaaccctccccaagatcgcgcttcaggggtcttgggcttccctgcgctctcctagagtcaattgtacgttgctgaggcaggtacccacccccccacgaccatag

SEQ ID NO: 207468 - DNA, 6672 bp, Artificial Sequence
  derived and/or modified sequence
atggccgagagcgccagcccccccagcagcagcgccgccgcccccgctgctgagcctggagttaccaccgagcaacccggcccccggtcgccacccagctctcctccaggcctcgaggagccactggacggcgcagaccctcatgttcctcaccccgatctggcccctattgcctttttttgtctgagacagaccaccagtcctcggaactggtgcataaagatggtatgcaatccatggttcgaatgcgtcagtatgctcgttattttgctgaactgcgtgactctgggaatgtaccagccttgtgatgatatggattgtctttctgaccgttgcaagatcttgcaggtcttcgatgactttatattcattttcttcgccatggaaatggtcctcaagatggtggcgctcggaatctttggaaaaaagtgttatctgggcgacacctggaaccgactggacttctttatcgtgatggcagggatggtggaatattcgctggacctgcaaaacattaacctcagcgccattaggacggtgagagtgcttaggcccttaaaagcaatcaaccgtgtaccctcaatgcggattttggtaaatcttctcctggacacgctgcctatgttaggtaacgtcctgctcctgtgcttcttcgtcttctttatcttcggcattatcggagtgcaactttgggccggattacttagaaatcggtgttttttagaggagaactttacaatccagggcgacgttgctttgcccccatattaccagcctgaagaagacgacgagatgccctttatttgttccctttctggcgataacggaatcatgggatgtcatgagattccccccttgaaagaacagggacgggagtgctgtctgagtaaagacgacgtttatgattttggtgccggtcgtcaggacttgaacgcttctggcttgtgtgtaaattggaatcgttattacaacgtgtgtcgcaccggcagcgccaatccacacaaaggggctatcaatttcgacaatatcggatacgcgtggatagtgatattccaggtcatcacactagagggatgggtggagattatgtattacgtgatggacgcgcactctttttacaactttatctactttattctgctgatcattgtgggcagcttcttcatgataaacctttgcctggtcgtgatcgcaacccaattctctgagactaagcagcgggagcatagactcatgcttgagcaaagacagagatatctctcctctagtactgtagcctcttatgcggagcctggagattgttatgaggagattttccagtacgtttgccacattcttcgcaaggctaagagacgggcccttgggctatatcaggccttacaatccagacgccaagctcttggacccgaggccccagccccagcaaagccagggccgcacgctaaagaaccgcggcactaccacggaaaaacgaaaggccagggtgacgaaggcaggcacctggggtctaggcactgccaaaccttgcacggtccagctagtccaggcaacgaccactccggaagggaactgtgccctcagcacagcccgttggatgccaccccccacacccttgtgcagccaattcccgctacactagcctcagaccctgcctcctgtccttgctgccagcatgaagatggcagacgaccttccggccttgggtccaccgacagtggacaggagggcagtggttctgggagtagtgccggcggtgaggacgaggcagatggggatggtgctcggagtagtgaggatggtgctagttccgaactgggtaaagaagaggaggaagaggagcaggctgatggagcagtgtggctttgtggggacgtgtggcgcgaaacacgagccaagctgaggggaatcgttgactccaagtacttcaatcgggggatcatgatggctatcctggtgaacaccgttagtatgggcattgaacatcacgagcagcccgaggagctgacgaacatcctcgagatctgtaatgttgttttcacttccatgtttgcattagaaatgatcctgaagctggcggcatttggactcttcgactacctgcgaaatccatataacattttcgattccatcatcgttatcatctcaatttgggagattgtcgggcaggcagatgggggattgtcggttctgaggacgttccgtcttcttcgggtgctgaaattagtcaggttcatgcccgccctccggcgccagctcgtcgtcctgatgaaaaccatggacaatgttgcaaccttttgcatgctactcatgctgttcatttttattttttctattctgggtatgcacatttttggctgtaagttctcccttagaactgacactggcgatacggtccctgatagaaagaatttcgacagccttctgtgggccattgtcactgttttccagatactcacacaagaagactggaacgtggttctgtataacggcatggcatccaccagcccttgggcttctctctacttcgtcgccctgatgacatttggaaattacgtgctgttcaacctgctagtcgcaattttagtagagggttttcaggcggagggagacgcaaatcggtcttattccgatgaggatcagagttcgagtaatatcgaggagttcgacaagctccaggagggactggactcaagcggggatcccaagctgtgccccatcccaatgacacccaatgggcacttagaccccagccttcctctgggagggcatctggggcccgctggagcggcagggcccgcccctaggctatcacttcagcctgatcctatgttagtggctctggggagccgaaaatccagcgttatgtctcttggcaggatgtcttatgatcagcgcagtctcagctcaagcagatctagttattatggcccctggggtaggagtgctgcctgggcgagtcgcaggtcgagttggaattcgctgaagcacaaacccccatccgcagaacatgagtccctgctgagtgcagagcgaggaggaggtgcacgtgtgtgtgaagtcgccgccgacgaggggcccccaagggccgcgcccctacacacaccccacgcccaccacatccaccacggcccgcatctggcccataggcacaggcaccatcggagaacgctgtctttggataacagagacagtgttgacctggccgaactggttcctgcagtgggcgcacatcctcgggccgcctggcgggctgctggccccgcccctgggcacgaggactgcaatggccgcatgccatcgattgcgaaggacgttttcactaagatgggcgatagaggagacaggggcgaggatgaggaggaaattgactacacgctatgcttcagggttagaaagatgattgatgtgtacaagccagactggtgtgaagtccgcgaggactggagcgtgtacttgttttcaccagagaaccgctttcgggtgctgtgtcagaccatcattgcgcataagctgtttgactacgtggttctcgcatttattttcctgaattgcatcactatcgccctggagagaccccagatcgaagctggtagcaccgagcgtatttttcttaccgtaagtaactatatcttcacagcaatctttgtcggtgagatgacactgaaggttgtgtccctggggctgtactttggcgagcaagcataccttcgatcaagttggaacgtcttggacggcttcctggtgtttgtctctatcattgacatagtggttagcctggcatccgctggcggcgccaagattcttggcgtgttgcgggtcctgcgattgctgagaactctaagacccttgcgcgttatctccagggctcccggcttgaaattagtagtagaaacacttatcagctcgttgaagccaattggcaatatagtgcttatctgttgtgctttcttcattatctttgggattctcggcgttcagctgtttaaaggaaagttctaccactgcctgggagtggatacccggaatattacaaataggtccgattgcatggctgccaactatcgctgggtccatcacaagtacaatttcgacaatctggggcaagcccttatgagcctcttcgtgttggcttcaaaggacggatgggttaacattatgtataatggtctggatgccgtggcagtggatcagcaaccagtgacaaatcacaacccatggatgcttctgtactttataagttttttgctaatagtttcctttttcgtactgaatatgtttgttggagttgttgtggaaaatttccacaagtgtaggcagcaccaggaagctgaagaagcaagaagaagagaagaaaaacgactgcgccggcttgaaaagaaacggagaaaggcccaacgtctgccctactacgcgacctactgtcacacacgactgcttattcactcaatgtgcacatcacattatttggatatctttatcactttcattatctgtctgaatgtggttacaatgagcctggagcactataatcagcccacatccctagagacggctctgaaatactgtaattatatgtttaccacggtgttcgtgctcgaggccgtactcaagctggtcgcttttggtctgagaaggtttttcaaagatagatggaatcagctcgatttagctatcgtccttctgtcggttatgggtattacactagaagagatcgagataaacgcagccctgccaattaaccccaccattattaggattatgcgggtcctgcggattgcccgggtgctgaagttactcaagatggcaacaggtatgcgtgccctgctcgacactgtagtgcaagcgctcccccaggttggaaacttagggctgttgttcatgctgctctttttcatatacgccgcgcttggggttgaactcttcgggaaactagtgtgcaacgacgaaaacccatgtgaggggatgagtcggcatgcaacctttgagaatttcggcatggcatttcttactctctttcaagtgtcaacaggagataactggaacggaataatgaaggacaccctgagagattgcacacatgatgagcgctcttgtttatccagcctacagttcgtctctcccctgtatttcgtgagcttcgtgttgaccgcacagttcgtcctcatcaacgtggttgtagcagtcctcatgaaacacctggatgacagcaacaaggaagcccaagaggacgccgagatggacgctgaactggagttagaaatggcccatggactcgggccggggcctcgactccccacaggcagtcccggtgctcccggacggggccctgggggggctgggggcggtggtgacaccgagggcggactctgccgccggtgctacagtcctgcgcaggagaacctgtggttggactctgtgtccctgattataaaggactcactggagggcgagcttactattatcgacaacctgtccggtagcatatttcatcattacagctcaccagctggttgtaagaagtgtcatcatgataagcaggaagtccagctcgcagagaccgaggccttttctctcaactcagacaggtccagttcaatcttactgggtgacgacctaagcctagaagatcccactgcctgcccacccggacgtaaagattccaaaggcgaactcgaccctccagagcctatgcgggtgggcgacctcggtgagtgctttttcccactcagtagtaccgccgttagcccggatccagagaattttctgtgcgagatggaagagatcccatttaacccagtgaggagctggctgaagcatgactcaagccaggccccaccttcgccattcagtccagatgctagttcccccctcttgcccatgcctgccgagttcttccatcccgccgttagtgccagccagaaaggtcccgagaagggaacagggacaggcactctgcccaaaatagccctgcaagggtcatgggcatccctgcgttcacctcgtgtcaattgcactctgttaagacaggccaccggctcagatacaagtctggatgcctctcccagtagttcagccgggtctctgcaaaccacccttgaggactccctgactctcagcgattcccctcgtcgcgccttgggtccccccgcacccgctccgggcccgagggctggcctgtcacccgctgctagacggcgcctgagtcttagaggtaggggacttttcagccttcgcggactaagggcgcatcagaggagccatagttccgggggctctacatccccaggttgtacccaccatgactccatggacccatctgacgaagagggccggggaggcgctggaggtggaggcgcaggtagcgaacattctgagaccctctcttccctgtccctgacttcactgttctgtcccccgcctcctcccccggcccctggactgacacccgcgaggaaattctcaagcacgtcctctcttgcagccccaggaagaccacatgcggccgccctggctcatggactcgcaagaagcccatcgtgggctgccgaccggtcaaaggacccccccggccgcgcccccctgcctatggggctgggacctttagcccctccaccacaacctctgccgggagagctggaaccgggagatgccgcttcaaaaaggaaaaggtag

SEQ ID NO: 207469 - DNA, 6689 bp, Artificial Sequence
  derived and/or modified sequence
atggctgagtcggctagccctcccagttcctctgccgctgcgcctgcagccgagcctggggtgactactgagcagccgggaccacggagcccgccttctagtccgccaggccttgaagaaccacttgacggagccgacccccacgtgcctcatccagacttggccccaattgccttcttctgcctgcgccaaacgacatcacctaggaactggtgcatcaaaatggcgaccggcccttggtggtggtgtttgtgtatgctcgtaatccttctcaactgtgtaaccctgggcatgtatcaaccgtgcgatgatatggattgcctctctgatcggtgtaagatcctacaggtgttcgacgacttcatctttattttttttgcaatggaaatggttctgaagatggtagcgctcggcattttcggcaaaaagtgttacctaggagatacctggaatagactggacttcttcattgttatggctggtatggtcgagtatagcctggacctgcaaaatatcaacctcagcgccattcggaccgttagggtgctgaggcccctcaaagccataaacagagtcccctcaatgcgcatcctagtaaatctgctgctagataccttgccaatgctggggaatgtgctcctgctctgctttttcgtatttttcatcttcggaataattggcgtccaactgtgggcgggattactgagaaataggtgcttcctcgaggaaaatttcaccatccagggtgatgtcgcactccctccctactatcagcctgaggaggacgatgagatgccttttatctgctctctctccggggacaatggcatcatggggtgtcacgagattccacccttaaaagagcagggacgcgaatgttgtctgtctaaagatgatgtgtacgatttcggggcaggaaggcaggacctaaacgcctccggtctgtgtgtgaactggaacagatattacaacgtttgcaggactggtagcgccaacccacacaaaggagctatcaactttgataatataggatacgcctggattgtgattttccaagtcattactctggagggctgggttgagatcatgtactacgttatggacgctcacagtttctataacttcatctatttcatcctcctgattatagtgggaagctttttcatgattaacctctgtctggtggtgattgctacccagttcagtgagaccaaacaaagggagcatcggttaatgctggagcagagacagcggtatctgtccagtagcaccgtggccagttacgccgaacctggcgattgctacgaagagatattccagtatgtttgtcacatactgcggaaagcgaagcgccgagcacttgggctgtatcaagccctgcagtctcggaggcaggcactagggcctgaggccccagctcctgcgaagcctggcccacatgccaaagagccacgccactaccatggtaaaacaaaaggccagggagatgaaggacgacatcttggttccaggcactgtcagaccttgcatgggcctgcttccccaggcaacgaccactctgggcgtggaaagcctggccctagggaactttgtccgcagcactctccacttgatgccactccccatacgcttgtgcaacctatccctgcgaccctcgcgagcgatcccgcttcctgcccatgttgtcaacatgaagacggcaggaggcccagcggtcttggtagcaccgacagcgggcaagaaggatctggcagcgggagcagtgcgggtggggaggatgaggctgatggcgatggagcccgatcctcggaggatggagctagtagtgaactgggcaaggaagaagaagaggaggaacaggccgatggagcagtatggctatgcggcgatgtatggcgggagacgagggccaagttgcgcggaattgtggatagcaagtatttcaaccgcggtataatgatggccatactagtgaataccgtgtctatggggatcgaacaccacgagcaggctaacgaactcactaacattttagagatctgtaatgtggtgtttacatctatgtttgctcttgagatgatactcaaactggctgctttcggcctttttgactacctgcggaacccatacaatatcttcgattccatcattgttatcatcagtatctgggagatcgtcggccaagcagatggtggactgtccgtgctgaggacattccgacttcttcgcgtgttaaaactggtgcggtttatgccagcattaagacgacagttggttgttctgatgaaaacgatggataacgttgccacattttgtatgctgttgatgttgtttatattcatcttttcgatactaggcatgcatatcttcgggtgcaagttctcactgcggacagacactggtgacacggttccagaccgtaagaatttcgatagcttgctttgggcaattgtgactgtatttcaaatcctgacccaggaagattggaacgttgttctatataatggtatggccagcacctccccttgggcatctctgtatttcgtggcactcatgacatttggaaactatgtcctgtttaacctgttggtagcaatccttgtcgagggtttccaggccgaaggggacgccaataggtcctactctgacgaggaccagtctagcagtaatatagaggagttcgacaagctgcaggagggactagatagcagcggcgatccaaaactttgtcctatcccaatgacccctaacggccatctggacccttcacttcctctgggagggcacctcggcccagccggagccgcaggccctgctccaagattgtcacttcagccagacccgatgctggtggccctgggcagccggaaatcatccgttatgtctctaggacgaatgtcgtatgatcagcgcagcctgagcagcagcagatcatcctattatggaccgtggggccgaagcgccgcatgggcctctcgtcgttctagctggaactcactgaaacataagcccccttccgctgaacatgaatcactcctcagcgctgaacgtggtggtggcgctcgcgtgtgcgaagtggcggctgacgaaggccctccccgtgccgcaccgctccacacgccacatgcccaccatattcaccacggccctcacctggcccaccgtcaccgtcaccacaggcgtactctttcactcgataacagggacagtgtggaccttgccgagctcgttccagccgtcggggcacatccccgagcagcctggcgcgcagccggacctgcccctggacacgaggactgcaatggcaggatgcccagtatcgccaaagatgtcttcacaaagatgggggatagaggagacagaggggaggacgaagaagagatcgattacactctctgtttcagagtgagaaagatgatagatgtgtacaaaccagactggtgtgaggtacgagaagactggagtgtttatctattctctccagaaaatcggtttagagtgttatgccagaccatcatcgcccacaagttgtttgattatgttgtgctcgcttttattttcctcaactgtatcactatagcgttagagaggcctcagatagaagccggtagcaccgaaaggatattcttgactgtctccaattatatttttactgcaattttcgtgggggagatgaccctcaaggtcgtctcgctaggtctgtactttggcgaacaggcatacctgagaagctcgtggaatgtgctggacggctttctggtgtttgtttccatcattgacatcgtagtctctctggcaagcgctgggggagccaaaatcctgggtgttctcagggtgttgcgtctactccgtaccttacgacctctaagagtcattagcagggccccaggcctgaaactcgtggtggagacgctgatcagctccctgaagcctatcggaaatatagttcttatatgttgtgctttcttcattatctttgggatcctgggggttcagcttttcaaagggaaattctatcactgtctgggggtggacaccagaaacataacaaaccggagtgactgcatggccgctaattatagatgggtacaccacaagtacaacttcgataacctggggcaggccttaatgtccttatttgttctcgctagcaaagacgggtgggttaacatcatgtataatggcttggatgctgtggcagtcgatcagcagccagttacaaaccataacccctggatgctgctgtactttatttctttcctcttgattgtttcttttttcgtccttaatatgttcgtgggcgtggtggtggagaacttccataaatgccgacagcatcaggaagcagaagaagctcgccgtcgcgaagaaaagagactgcgcaggctcgaaaagaaaagaaggaaggcacaaaggttgccttactatgcaacctactgccatacgaggctcctaatccactctatgtgcaccagccattacctcgacatcttcattactttcatcatttgcctgaatgtggtgacgatgtcgttagaacattataaccagcctacaagcctcgagacagccctcaagtattgcaactacatgttcactaccgtgttcgtactggaagccgttctgaagttggtagctttcgggctccgaagattcttcaaggaccgatggaaccagctggatcttgcaattgtcctcctctccgtgatgggtataaccttggaagagatcgagatcaatgcggcattgccgatcaaccccaccattatcagaataatgagagtcctgagaatagccagggtgttgaagttactgaagatggctaccgggatgcgcgctctcctagacaccgttgtacaagccctaccacaggttgggaacctgggcctgctctttatgctgttattttttatctatgccgcactgggggtggaactcttcgggaagcttgtgtgtaacgacgagaatccatgtgaaggaatgagtcgccacgccacatttgagaactttggcatggcctttctgaccctcttccaggtgtcaacaggggataattggaatgggatcatgaaagacacacttcgggattgcactcatgacgagcgcagttgcttatcctcgctgcagttcgtgtccccattgtactttgtgtcatttgtgttgacagcgcaattcgtcctgataaatgtggtggtggccgtcctgatgaagcaccttgacgattccaataaggaggctcaggaagacgcagagatggacgccgaactcgagctggaaatggcacacggtctggggccaggcccaaggttgcctacgggatctccaggcgctcccggacggggtcctggaggggctgggggtggcggagataccgagggcggattgtgtagacggtgttactctccagcacaggaaaatctctggttggacagcgtttcactcatcatcaaggactctctggagggggaattgaccatcatcgacaacttgtcaggcagtatcttccatcactatagctctccggcaggttgtaaaaagtgccaccacgataagcaagaggttcagcttgctgagaccgaggcctttagcctgaactctgatcgctcaagctccatcctgctcggcgacgatctcagtctggaggacccgactgcatgcccacctgggcgaaaagactcaaagggcgagcttgacccaccggaacctatgcgcgtgggggatctgggcgaatgcttcttccctttaagctctactgctgtgtcacctgatcctgagaattttttatgcgaaatggaagagatccccttcaatcccgtgagaagctggctgaaacacgactcgtcgcaggcccctccaagcccattctcaccagacgcatcctctccactgctgcccatgcctgccgagttctttcatccagctgtttccgcttctcagaaaggaccagagaagggcacaggcaccggaactttaccgaagatcgccctgcaaggcagctgggccagcctacggtcaccacgagtcaattgtaccctcctcaggcaggccacggggagtgatacttcactagacgcttcgccctcaagctccgctggctcactacagactactttggaagactccttaacactctctgacagccccaggagggccctcgggccacctgctccggcacccggacctagggccggacttagtcccgcagcccgtaggcggctgagcctgcgagggcgaggtctctttagtttgaggggtcttcgtgcgcaccagagaagccactcctcggggggatctactagcccagggtgcacacaccacgattctatggacccatccgacgaggaggggcgaggaggcgctgggggaggcggagccggatccgagcacagtgaaactctgagctctctctctctaaccagccttttctgcccccctccgccacctccagctcccggattgactccagctagaaagttttcctccacttcaagcttggccgctcctggacgcccacatgctgcagccctggcccacggcctggctcggagtcccagctgggcagcggaccgcagcaaagatccaccgggtagagccccactccctatggggctcgggccactggctcccccaccgcaacctctgccaggggagctcgaacccggagacgcagcgtccaaacggaagagata

SEQ ID NO: 207470 - DNA, 6050 bp, Artificial Sequence
  derived and/or modified sequence
atggcggagagtgcttcacctccgtcaagtagtgctgctgccccagcagccgagccaggagttacgaccgagcaaccgggaccacggagtccccctagctctccaccaggcctggaagagcctctggacggggctgacccccatgttcctcaccccgacctagcccctatcgccttcttctgtcttagacagaccacctcccctcgaaactggtgtataaagatggtgtgcaacccttggtttgagtgcgtcagtatgctggtgatcctcctgaattgcgtgaccctaggtatgtaccagccctgtgatgatatggactgtctgtccgatcggtgtaagatactacaagtgtttgatgattttatattcatcttttttgccatggaaatggtgctaaaaatggtggcccttgggatttttggaaagaagtgttacttaggcgatacgtggaacaggctggattttttcattgtaatggccggaatggtagagtactcgctggatctgcaaaatattaatctgtctgccatcaggaccgttagggtgctgagaccactcaaagccatcaaccgggtacctagcatgcgtatactggttaatctgctcttagatacgttgcccatgctgggaaatgtgctgttactctgcttttttgtgttcttcatcttcggtattatcggtgtgcaactgtgggccggactgttgcgaaatcggtgcttcctagaggaaaactttacaattcagggggacgtcgccctgccgccttactatcaacctgaggaagatgatgagatgccattcatttgttcactctctggtgataatggcattatgggctgtcacgagatccccccattaaaagagcaggggcgtgaatgctgtttatccaaagacgatgtgtacgattttggcgctggccgtcaggatcttaatgcatctgggttgtgcgtcaactggaaccgatactacaatgtgtgcagaaccggctcagcaaacccccacaaaggagctatcaacttcgacaatattggatacgcatggatcgtgatcttccaggtgatcactttagaagggtgggttgagatcatgtactacgtcatggacgcgcattccttctataatttcatatatttcatcctgctgatcatcgttggttcattcttcatgatcaatctctgcctcgtggtcattgcaacacagttcagcgagacgaagcagcgagagcataggctgatgttggagcaaagacagagatatctttcatccagtactgtagcttcctatgccgaaccaggcgattgttacgaggagatctttcaatacgtctgccacattctgcgaaaagccaagagacgggcactgggactttaccaagcactccaaagtcggcgtcaggccctcgggccagaagcccctgctcctgctaagcctggccctcatgcgaaagagcctagacattaccacggaaaaaccaaaggacagggtgacgagggacgccacttaggcagtagacattgtcagacactacatgggccagccagccccggaaatgaccatagcggtagggaactctgcccacagcattcacccttggacgctactccacacaccctggtgcaacccatcccagctacactcgcgtcagatcctgccagctgcccttgctgtcaacatgaagatgggagaaggcccagtggcctgggcagcactgatagtggacaggaagggagtggttctgggagctccgccggaggcgaagacgaggccgacggcgatggggctaggtctagcgaagatggcgcatcttctgaattgggaaaggaggaggaggaggaggaacaggccgacggagctgtatggctctgcggcgatgtctggagagagacaagagccaagctgcgaggtatcgtagatagcaaatacttcaatcgcggaattatgatggcaatactggtaaataccgtgagcatgggcatcgagcatcacgagcaacccgaagaactcacaaacatcctggagatttgcaacgttgtgttcacatccatgtttgcgcttgagatgatcctgaaactcgctgccttcggccttttcgattacctgagaaatccgtacaatatcttcgacagtataatcgtgataatctctatttgggaaatcgtgggacaggcagacggagggctatccgtcctgaggacttttcgtttgctgcgggtgctcaaattggtccggttcatgcctgccctgaggagacagctggtggtgctgatgaaaacgatggacaacgtcgccaccttctgcatgctcctgatgttattcatctttatcttcagtatcctgggaatgcacattttcgggtgtaagttctcactccgcaccgataccggtgacactgtaccagatagaaaaaattttgatagtctgttgtgggccatcgtaactgtgttccaaattttaacacaagaagactggaacgtggtgctgtacaacggcatggcatcaacatccccatgggccagtctttatttcgtcgctcttatgacgtttgggaactacgtgctgttcaacctactggtggctatcctagtcgagggctttcaggccgagggcgatgcaaataggtcctacagcgatgaagaccagagtagcagcaatatagaggagtttgacaaattacaagaaggcctggactcgtccggagatcctaaactttgccctattcctatgacgcccaatggccacctggatccctcgttgccgctgggcggacacttaggacccgctggagcagcaggcccagcgcctcggctctcactgcagcccgaccccatgctcgtggccctaggaagtcggaaatcatcagtgatgtctctgggcagaatgagttacgatcagcggtctctgtcaagctctaggtcttcctactatgggccatggggcagatctgcagcttgggcaagccgtaggagcagctggaactctctgaagcacaaaccccctagcgctgaacacgagtctctgttgtccgctgaacgaggaggcggtgcaagggtatgcgaagtggccgcagacgaaggtccaccacgcgctgcgcctctccatactccccatgcccatcatattcatcatggtccccacctggcacatcgacatcgacaccatcgcaggaccctgtctctcgacaatagagactctgtcgaccttgctgaattagtgcctgccgtcggcgctcatccaagagctgcatggagagccgcaggacccgcacccggtcacgaggactgcaatggccgtatgccaagtatcgccaaggacgtcttcacaaagatgggagacagaggcgatcgaggggaagatgaagaagaaattgattatacattatgtttcagggtcaggaagatgattgatgtgtacaaacctgactggtgcgaggtcagggaagactggagcgtttacttgttttcccctgagaatcgatttcgggtcctgtgtcagactattatagctcataagctgtttgattacgtcgttttagcgttcattttcctgaattgtatcactatcgccttagaaaggcctcagatcgaggccggatccacagaacgcatttttctgacagttagtaactacatcttcacagctattttcgttggtgaaatgacactgaaggtggtcagtctgggcctgtatttcggtgagcaggcatacctgcggagctcttggaacgtcctggatggctttctagtgtttgtgtcaattatcgacattgtggtgtctttagcttctgccggaggtgccaagattctcggcgtgcttcgggtgcttagactactgcggactttgcggccattacgagtgatttcccgggctcctggcctgaaactcgttgtggagacactgatctcctctcttaaacccattgggaatattgtcttaatatgctgcgcttttttcattatctttggcattctgggtgtccagctgtttaagggcaagttctaccactgcctcggggttgacactaggaatatcacaaatagaagcgactgtatggccgctaattacagatgggtccatcacaagtacaacttcgacaacttaggacaggccctgatgagcctgttcgtcctcgctagcaaggacggctgggtaaacataatgtataatggcttggatgcagttgccgtcgaccagcaacccgtcaccaatcacaatccttggatgctgttgtattttatcagtttcctgctgattgtgtccttcttcgtgctgaatatgttcgttggagtggttgtggaaaattttcacaaatgccgacagcaccaggaggcagaagaagctcgcaggcgagaggaaaagagattgagacggcttgagaaaaagcgtaggaaagcccagagactgccctattacgccacgtactgccataccaggctgttgatacactccatgtgcacatctcattacctcgacattttcataaccttcattatttgcctgaacgtagtaacaatgagccttgagcattacaaccagccgacaagcctcgaaacagcactgaaatattgtaattatatgtttactactgtgttcgtacttgaggccgtgctgaaactcgtggctttcggcctgagacggttcttcaaggaccgatggaaccagctcgatttggcaatagttcttctgagtgtgatgggtatcacccttgaggagattgaaatcaatgctgctctgcctatcaatccaacaatcataagaatcatgcgggtgctccgtattgccagggttcttaaattgctcaagatggcaaccgggatgagggccctgttggacaccgtagtgcaagccttgccacaggtgggcaacctgggcctgttgtttatgttgctgttctttatttacgctgcgctgggggtggaactgttcggcaaacttgtttgcaatgacgagaatccctgtgaggggatgtccagacatgccacctttgagaatttcggtatggccttcctcacactgttccaggtttctacaggagacaactggaatggtatcatgaaggataccttaagggactgtacccacgacgagcggagctgcctgagctcccttcagtttgtgtcgcccctgtatttcgtgtcttttgtcctgacagctcaattcgtgcttataaatgtggtcgtagcagttctcatgaagcacctagacgatagcaacaaagaggcccaagaagacgcagaaatggacgctgagctcgaactggaaatggcacatggactgggccctggtcccaggttgccaactggcagtcccggagcgccaggtcgaggaccagggggagcaggaggtggtggagataccgagggtggcttatgccgacgctgctattctccagcccaagaaaacttatggctagacagtgtaagtcttattattaaggactctttggagggtgagctcaccatcatcgacaacctgagtggaagcatcttccaccactacagctcaccagctggctgcaagaaatgtcatcacgacaaacaggaggttcagttggcggagaccgaggctttcagtctgaactcagaccgcagttcgtcaatcctgctgggagacgacctgagccttgaggacccaaccgcctgcccaccaggacggaaggactccaagggggagttagacccacccgagccaatgcgcgttggtgatctgggggagtgctttttcccactatcctcaaccgccgtgagtcccgatcccgaaaacttcctctgtgagatggaggaaatcccatttaaccccgtgcgcagttggctgaagcacgactcctctcaagctccgcctagccccttttcccctgatgcctctagcccactgctacccatgccggctgagtttttccaccctgcggtgtccgctagtcagaagggcccagagaaagggaccggcaccggcacattgcccaagatagccctccaggggtcctgggcttccctacgaagccccagggtcaactgcacacttcttcggcaggttccgaccccgccaagaccata

SEQ ID NO: 207471 - DNA, 6671 bp, Artificial Sequence
  derived and/or modified sequence
atggcggagtctgccagccccccaagctccagtgccgctgctccggcagcagaaccaggagtgacaacagagcagcccggaccgcgaagtccaccaagctcccctcccggactggaggagcctttggatggcgctgatccacatgtaccacatccggacttagcccctatcgcatttttttgcctccggcaaacaacgagtccacgcaattggtgcataaagatggtgtgtaacccctggtttgaatgtgtgtctatgctagtcatcctgctcaattgtgtaaccctaggcatgtaccagccatgtgacgatatggattgcctctccgatagatgtaaaattctacaggtcttcgacgactttatcttcatcttttttgcgatggagatggtgctcaagatggtagcacttggcatatttggcaagaagtgctatcttggagacacctggaacaggctcgatttctttattgtaatggcgggaatggtggagtacagcctcgacctgcagaacataaacctctctgccatccggacagtcagggttcttcgtcccctcaaagcaatcaatcgagtgccttccatgcggatactggtgaaccttctgctggacacccttcccatgctcggcaatgtgctactactttgcttcttcgtgttcttcatatttggcattattggcgtacagctttgggctggcttgctcaggaatagatgcttcctggaagaaaacttcaccatccagggggacgtggccctgccaccgtactatcaacccgaagaagacgacgaaatgcctttcatctgctcgctgtcaggagataacggtattatgggctgccacgaaatacccccactgaaagaacagggacgagagtgctgcctcagtaaggatgacgtgtatgatttcggggctggacgacaggaccttaacgcttccggcttgtgcgtaaattggaacaggtactataatgtctgccgtacagggtccgccaatccacacaagggcgctataaattttgataacatcgggtacgcttggatcgtcatctttcaagtaattacccttgagggctgggtcgagataatgtattatgtaatggatgcacatagcttctacaactttatctatttcatcttgctgattattgttgggtctttcttcatgatcaatttatgcttggtggttatcgccacacagtttagcgaaaccaaacagcgggagcacagactcatgctcgagcagagacagagatacctctctagctccacagtggcctcatacgcagaaccaggcgactgttatgaagaaatcttccagtacgtgtgccatatcctccggaaggccaagcgacgagccttgggtctgtaccaagcattacagagtaggaggcaggccctggggcctgaagccccagcgcctgccaaacccggaccacatgccaaggagcctcgtcactatcacggaaaaacaaaggggcaaggtgatgagggcagacatcttggcagcaggcactgtcaaacactgcatgggccagcttcgcccggaaacgaccactcgggtagggagctgtgcccgcagcacagtccgctggacgccacacctcatacactggtgcaacccattccagccactcttgcctcagatcccgcttcttgcccctgctgccaacatgaggatggccgacgccctagcgggttagggtctactgatagcggacaggagggcagtggctcaggaagtagcgccggtggagaggacgaggcagacggcgacggcgcaagaagttccgaagacggcgctagttcagagctcggaaaggaggaagaagaggaggaacaagcagacggggctgtatggctgtgcggggatgtatggcgggaaacccgagccaaactgaggggaattgtcgattctaagtatttcaatagaggaattatgatggctatactggtgaacaccgtgtctatgggcattgagcaccacgaacaaccagaggagttaactaatatccttgaaatatgtaacgtggtcttcactagtatgttcgcgcttgaaatgatcttaaagctggctgcattcggactgtttgattaccttcggaacccctataatatattcgattccatcatcgttatcatcagcatctgggagattgtgggacaggccgatggaggtttgagcgttctccgaacgtttagattactcagggtgctgaagcttgtccgcttcatgcccgctctgagaagacagttggtggtgctgatgaaaactatggataatgtggctacgttttgtatgctcctgatgctcttcatcttcattttttccattctggggatgcacatcttcggctgcaagttcagtctcaggacggacaccggagacaccgtccccgacagaaagaacttcgactccctgctatgggctattgtgaccgttttccagatcctcactcaggaagattggaacgtcgtcttatataacggcatggccagtacctcaccttgggctagcctttatttcgttgcacttatgaccttcggtaattatgtgctttttaatttgcttgtcgccatcttagtcgaaggctttcaagccgagggcgatgcaaaccggtcctatagtgatgaagatcagtcctcttccaacattgaggaatttgacaagcttcaggaagggctggattcctctggagatcctaagctatgccccattcctatgacacctaatggtcatctggacccatcccttcctctggggggacacttggggccagcaggtgctgccggacccgcaccacggctttcactgcagccggatccaatgttggtggctctgggaagccgcaaaagcagcgtgatgtcactgggccgtatgtcctacgatcagagatccctgagttccagccggagttcctactatggcccttggggcaggagtgcagcgtgggcaagtcgtcggtcttcctggaattccctgaaacacaaaccaccctccgcggaacacgaatccctcttgtccgccgaacgcggagggggagcgagggtgtgcgaagtggccgctgacgaagggcctccgagagccgcaccattgcataccccacacgcccaccatatccatcatgggccacacctggcgcacagacaccgccaccatcggcgaaccttgagcctagacaacagagattccgtggatctcgccgagctggtgcccgctgtgggggctcaccccagagccgcatggagggcagccggtcctgctccaggccatgaggattgcaacggtagaatgccttcgatcgcaaaggacgtgttcacaaagatgggggacaggggcgatcggggtgaagacgaagaagagatcgattacaccctctgttttcgcgtacggaagatgatcgacgtctataaacctgactggtgcgaggttcgcgaagactggtccgtctatcttttctcccccgagaataggtttagggttctgtgccaaacgatcattgctcataagcttttcgactacgttgtgctggcatttatcttccttaactgcattacaatagcactggagcggccacagatcgaagccggaagcacagagcgcattttccttactgtatcaaactatatcttcaccgctattttcgtgggcgaaatgactcttaaggtggtctctctggggctctattttggcgagcaggcatacctgaggtcttcttggaacgtactggacggctttctagtgttcgtgtccatcatcgacatcgtagtctcactggcatcagccggtggggctaagatactgggtgtgctccgtgtgctccggttattgcggacccttcggccactgagggtgattagccgggctccgggattgaaacttgtcgtcgaaacactgatatcctccctcaaaccgattggcaatatcgtgttgatttgttgtgcattcttcatcatcttcggaatccttggagttcagctgtttaaggggaagttttaccactgtttgggagtcgataccagaaacattaccaaccggtctgactgtatggctgcaaactacagatgggtgcaccataagtacaactttgataatctgggccaggcacttatgagcttgtttgtgctagcttcaaaagatggttgggtgaatatcatgtacaatggcctggatgcagtggcagtcgaccaacagccagtgactaatcacaacccctggatgcttctctattttatcagtttcttgctgattgtttcctttttcgtgctcaatatgttcgtcggggtggtcgtggagaatttccataagtgccgacagcatcaggaggctgaggaagccagaaggcgtgaggaaaaacggctacgaaggctggagaagaaaagaagaaaggcacagagactgccatattacgcaacatactgtcacacacgcttgctgattcattcaatgtgcacaagccactacctcgacatcttcattacattcatcatctgtctcaatgtggttacaatgagcctcgagcactacaatcagcccaccagccttgagacagcgctgaagtattgcaactatatgttcacgaccgtcttcgtcctggaagctgtgctgaaactagtggcctttggcctgcggcgattcttcaaagatcgttggaatcaacttgatctggctatcgtcctgctttctgtgatgggtataacgctcgaagagatcgaaataaatgcagccctgccaataaaccccacgatcattaggattatgcgagttctgagaatcgctcgggtgttaaaattgttgaagatggctacagggatgagggcactgctggacaccgtggtgcaggccctgccacaggtggggaacttgggcctactgtttatgctcctgttctttatctacgctgctctcggcgtggagctctttggtaagttagtttgcaacgatgagaacccgtgcgaagggatgtcacggcacgctacctttgaaaatttcgggatggcttttttgacattgttccaggtgagcactggagacaattggaatggcatcatgaaggacacattacgtgattgcacacatgatgagcgatcatgcctgtcatcactgcagttcgtctctccgttatactttgtgtcgttcgtcctgacagcccaatttgtactcatcaatgtggtggtggctgtgcttatgaaacacttggatgattctaataaggaagcacaggaagatgctgagatggacgccgagctggagttagagatggcacacggtctggggcctggaccacgactgccgactgggtcccccggagctcctggcagaggcccaggtggagctgggggaggcggtgacactgaaggcggactgtgcagaagatgttacagccccgctcaggagaatctgtggcttgattcagtgtcactaatcattaaggactccctagagggagaattaaccatcattgataatctgtcggggtccatcttccaccactattcatccccagcgggatgtaagaagtgccatcacgataagcaggaagtgcaactcgccgaaacggaggcattcagcctcaactccgacaggtcctccagcattttgctgggcgatgatctcagcctcgaggaccccacggcatgccctcctggcagaaaagattcgaagggagagctggacccccctgaaccaatgcgggttggggatctgggggagtgcttctttcccctttcttccacggcagtctcacccgatcctgaaaacttcctgtgcgagatggaggaaataccattcaatcccgtacgatcctggctgaagcatgatagtagccaggcgcctccaagtccttttagtcccgacgccagtagcccactgctcccaatgcccgcagagtttttccacccggctgtgtcagcttcccaaaagggccctgagaaaggtacgggcaccggtacattaccaaaaatcgcccttcagggcagctgggctagcctcagaagtcctagagtcaactgtacattgctaaggcaggccaccggttcagacaccagcctcgacgcaagcccatcaagctctgcaggtagcttgcaaaccacgcttgaagattctctcaccctgagcgatagccccagacgagcccttggccctccagcacctgcacccggtccacgcgctggactcagtccagctgctcgcagacgattgtcactaagaggtagaggactgttctccctaagaggacttcgtgcacatcagcggtcacactcatcggggggttccaccagtccgggatgtactcaccatgactccatggatcctagcgatgaggaaggcagaggcggtgccggagggggaggcgcagggtccgagcatagcgaaacacttagcagcctgagcctcacctctctgttctgcccgcctccccctcctcctgcacccggactgacacccgcaagaaagttctctagcacctcttcccttgcagcaccaggcagaccccacgcggcagcacttgctcacggacttgctcgaagcccatcctgggcagcagatcgcagtaaggaccctccgggtagagccccattgcccatggggctggggcctctggctccaccccctcagcccctgcccggtgagctcgaacctggggatgccgcaagcaagaggaagaggta

SEQ ID NO: 207472 - DNA, 10015 bp, Artificial Sequence
  derived and/or modified sequence
atggctgagagcgcctccccgccctcctcatctgcagcagccccagccgctgagccaggagtcaccacggagcagcccggaccccggagccccccatcctccccgccaggcctggaggagcctctggatggagctgatcctcatgtcccacacccagacctggcgcctattgccttcttctgcctgcgacagaccaccagcccccggaactggtgcatcaagatggccactgggccttggtggtggtgcctgtgcatgctggtgatcctgctgaactgcgtgacacttggcatgtaccagccgtgcgacgacatggactgcctgtccgaccgctgcaagatcctgcaggtctttgatgacttcatctttatcttctttgccatggagatggtgctcaagatggtggccctggggatttttggcaagaagtgctacctcggggacacatggaaccgcctggatttcttcatcgtcatggcagggatggtcgagtactccctggaccttcagaacatcaacctgtcagccatccgcaccgtgcgcgtcctgaggcccctcaaagccatcaaccgcgtgcccagtatgcggatcctggtgaacctgctcctggacacactgcccatgctggggaatgtcctgctgctctgcttctttgtcttcttcatctttggcatcataggtgtgcagctctgggcgggcctgctgcgtaaccgctgcttcctggaggagaacttcaccatacaaggggatgtggccttgcccccatactaccagccggaggaggatgatgagatgcccttcatctgctccctgtcgggcgacaatgggataatgggctgccatgagatccccccgctcaaggagcagggccgtgagtgctgcctgtccaaggacgacgtctacgactttggggcggggcgccaggacctcaatgccagcggcctctgtgtcaactggaaccgttactacaatgtgtgccgcacgggcagcgccaacccccacaagggtgccatcaactttgacaacatcggttatgcttggattgtcatcttccaggtgatcactctggaaggctgggtggagatcatgtactacgtgatggatgctcactccttctacaacttcatctacttcatcctgcttatcatagtgggctccttcttcatgatcaacctgtgcctcgttgtcatagcgacccagttctcggagaccaagcaacgggagcaccggctgatgctggagcagcggcagcgctacctgtcctccagcacggtggccagctacgccgagcctggcgactgctacgaggagatcttccagtatgtctgccacatcctgcgcaaggccaagcgccgcgccctgggcctctaccaggccctgcagagccggcgccaggccctgggcccggaggccccggcccccgccaaacctgggccccacgccaaggagccccggcactaccatgggaagactaagggtcagggagatgaagggagacatctcggaagccggcattgccagactttgcatgggcctgcctcccctggaaatgatcactcgggaagaggcaagccagggccacgggagctgtgcccgcaacatagccccctggatgcgacgccccacaccctggtgcagcccatccccgccacgctggcttccgatcccgccagctgcccttgctgccagcatgaggacggccggcggccctcgggcctgggcagcaccgactcgggccaggagggctcgggctccgggagctccgctggtggcgaggacgaggcggatggggacggggcccggagcagcgaggacggagcctcctcagaactggggaaggaggaggaggaggaggagcaggcggatggggcggtctggctgtgcggggatgtgtggcgggagacgcgagccaagctgcgcggcatcgtggacagcaagtacttcaaccggggcatcatgatggccatcctggtcaacaccgtcagcatgggcatcgagcaccacgagcaggccaatgagctgaccaacatcctggagatctgcaatgtggtcttcaccagcatgtttgccctggagatgatcctgaagctggctgcatttgggctcttcgactacctgcgtaacccctacaacatcttcgacagcatcattgtcatcatcagcatctgggagattgtggggcaggcggacggtgggctgtcggtgctgcggaccttccggctgctgcgcgtgctgaaactggtgcgcttcatgcctgccctgcggcgccagctcgtggtgctcatgaagaccatggacaacgtggccaccttctgcatgctgctcatgctcttcatcttcatcttcagcatccttgggatgcatatttttggctgcaagttcagcctccgcacggacactggagacacggtgcccgacaggaagaacttcgactccctgctgtgggccatcgtcactgtgttccagatcctcacccaggaggactggaacgtcgttctctacaatggcatggcctccacttctccctgggcctccctctactttgtcgccctcatgaccttcggcaactatgtgctcttcaacctgctggtggccatcctggtggagggcttccaggcggagggtgacgccaatcgctcctactcggacgaggaccagagctcatccaacatagaagagtttgataagctccaggaaggcctggacagcagcggagatcccaagctctgcccaatccccatgacccccaatgggcacctggaccccagtctcccactgggtgggcacctaggtcctgctggggctgcgggacctgccccccgactctcactgcagccggaccccatgctggtggccctgggctcccgaaagagcagtgtcatgtctctagggaggatgagctatgaccagcgctccctgtccagctcccggagctcctactacgggccatggggccgcagcgcggcctgggccagccgtcgctccagctggaacagcctcaagcacaagccgccgtcggcggagcatgagtccctgctctctgcggagcgcggcggcggcgcccgggtctgcgaggttgccgcggacgaggggccgccgcgggccgcacccctgcacaccccacacgcccaccacattcatcacgggccccatctggcgcaccgccaccgccaccaccgccggacgctgtccctcgacaacagggactcggtggacctggccgagctggtgcccgcggtgggcgcccacccccgggccgcctggagggcggcaggcccggcccccgggcatgaggactgcaatggcaggatgcccagcatcgccaaagacgtcttcaccaagatgggcgaccgcggggatcgcggggaggatgaggaggaaatcgactacaccctgtgcttccgcgtccgcaagatgatcgacgtctataagcccgactggtgcgaggtccgcgaagactggtctgtctacctcttctctcccgagaacaggttccgggtcctgtgtcagaccattattgcccacaaactcttcgactacgtcgtcctggccttcatctttctcaactgcatcaccatcgccctggagcggcctcagatcgaggccggcagcaccgaacgcatctttctcaccgtgtccaactacatcttcacggccatcttcgtgggcgagatgacattgaaggtagtctcgctgggcctgtacttcggcgagcaggcgtacctacgcagcagctggaacgtgctggatggctttcttgtcttcgtgtccatcatcgacatcgtggtgtccctggcctcagccgggggagccaagatcttgggggtcctccgagtcttgcggctcctgcgcaccctacgccccctgcgtgtcatcagccgggcgccgggcctgaagctggtggtggagacactcatctcctccctcaagcccatcggcaacatcgtgctcatctgctgtgccttcttcatcatctttggcatcctgggagtgcagctcttcaagggcaagttctaccactgtctgggcgtggacacccgcaacatcaccaaccgctcggactgcatggccgccaactaccgctgggtccatcacaaatacaacttcgacaacctgggccaggctctgatgtccctctttgtcctggcatccaaggatggttgggtgaacatcatgtacaatggactggatgctgttgctgtggaccagcagcctgtgaccaaccacaacccctggatgctgctgtacttcatctccttcctgctcatcgtcagcttctttgtgctcaacatgtttgtgggtgtcgtggtggagaacttccacaagtgccggcagcaccaggaggctgaagaggcacggcggcgtgaggagaagcggctgcggcgcctggagaagaagcgccggaaggcccagcggctgccctactatgccacctattgtcacacccggctgctcatccactccatgtgcaccagccactacctggacatcttcatcaccttcatcatctgcctcaacgtggtcaccatgtccctggagcactacaatcagcccacgtccctggagacagccctcaagtactgcaactatatgttcaccactgtctttgtgctggaggctgtgctgaagctggtggcatttggtctgaggcgcttcttcaaggaccgatggaaccagctggacctggccattgtgctactgtcagtcatgggcatcaccctggaggagatcgagatcaatgcggccctgcccatcaatcccaccatcatccgcatcatgagggttctgcgcattgcccgagtgctgaagctgttgaagatggccacaggaatgcgggccctgctggacacggtggtgcaagctttgccccaggtgggcaacctgggcctcctcttcatgctgctcttcttcatctatgctgctctcggggtggagctctttgggaagctggtctgcaacgacgagaacccgtgcgagggcatgagccggcatgccaccttcgagaacttcggcatggccttcctcacactcttccaggtctccacgggtgacaactggaacgggatcatgaaggacacgctgcgggactgcacccacgacgagcgcagctgcctgagcagcctgcagtttgtgtcgccgctgtacttcgtgagcttcgtgctcaccgcgcagttcgtgctcatcaacgtggtggtggctgtgctcatgaagcacctggacgacagcaacaaggaggcgcaggaggacgccgagatggatgccgagctcgagctggagatggcccatggcctgggccctggcccgaggctgcctaccggctccccgggcgcccctggccgagggccgggaggggcgggcggcgggggcgacaccgagggcggcttgtgccggcgctgctactcgcctgcccaggagaacctgtggctggacagcgtctctttaatcatcaaggactccttggagggggagctgaccatcatcgacaacctgtcgggctccatcttccaccactactcctcgcctgccggctgcaagaagtgtcaccacgacaagcaagaggtgcagctggctgagacggaggccttctccctgaactcagacaggtcctcgtccatcctgctgggtgacgacctgagtctcgaggaccccacagcctgcccacctggccgcaaagacagcaagggtgagctggacccacctgagcccatgcgtgtgggagacctgggcgaatgcttcttccccttgtcctctacggccgtctcgccggatccagagaacttcctgtgtgagatggaggagatcccattcaaccctgtccggtcctggctgaaacatgacagcagtcaagcacccccaagtcccttctccccggatgcctccagccctctcctgcccatgccagccgagttcttccaccctgcagtgtctgccagccagaaaggcccagaaaagggcactggcactggaaccctccccaagattgcgctgcagggctcctgggcatctctgcggtcaccaagggtcaactgtaccctcctccggcaggccaccgggagcgacacgtcgctggacgccagccccagcagctccgcgggcagcctgcagaccacgctcgaggacagcctgaccctgagcgacagcccccggcgtgccctggggccgcccgcgcctgctccaggaccccgggccggcctgtcccccgccgctcgccgccgcctgagcctgcgcggccggggcctcttcagcctgcgggggctgcgggcgcatcagcgcagccacagcagcgggggctccaccagcccgggctgcacccaccacgactccatggacccctcggacgaggagggccgcggtggcgcgggcggcgggggcgcgggcagcgagcactcggagaccctcagcagcctctcgctcacctccctcttctgcccgccgcccccgccgccagcccccggcctcacgcccgccaggaagttcagcagcaccagcagcctggccgcccccggccgcccccacgccgccgccctggcccacggcctggcccggagcccctcgtgggccgcggaccgcagcaaggacccccccggccgggcaccgctgcccatgggcctgggccccttggcgcccccgccgcaaccgctccccggagagctggagccgggagacgccgccagcaagaggaagagatgagggtcgcaggggcccccggccgcccaccgcccgccccgtctcaccttctttacctcaggagccaggagcagacagcaatacttcgtccacacctgggatcgcgcagggcccgcagggcacaggcgcccgacagccgggctgagcggagtctgggttagccaggcctgcgtggcccatggtggcccttccagtgcatatacatacatatatatatatatatgcatatatatatatatatatatatatatgtgtatacacacacacatagacagacatatatatatatatttattttttttactgagagcttatgacttccagaaagtgctaaaggtgggaggtgggccagggcctggacggggcttttgtctgatgctctgggattctggccagacccaccccagggcacatgtcctgcgggggcgtcccagctgtgttttttgatgtctcctccctggttaagagtagcttggagaggaccctcaggcctctgagggcaccaggccctggagaagaggtgcaattcagggtgtgtgtgtgttttttttcctttaaagaagaaacgctgctaagatcccacgtggctcccacgtgtcggggtgtctgtcctgtcatcctgactgtctcgttattgtgaagtctttcgtagacaccccagagcacacacatccccttagtccaccggttagatgtctctctttagaaaaatcaggggtgagtagctgtgtttccttaggcctggggtaggggatggagagcagctccaaggctgagctggggctctggccccaggtgaggtccccagctcctgagcacttctgagggggtgggttccacccccaggagggcgggggtgggtggagcaggagtggaggcagcctgcagaggaagggtgcgggagactgagccggcagtggcttgcttggaggggctagggtacccgcctggtctcggctggctccagctgccctgcaggtgcccctgggctcaggtagttagttgttcagccactaatgccttttatcccccatatgggcgctgagctgtggctgttcctggacactgtgctgtccccgtcctgagcaactatgcccccgccccagtaggttcaaggcaaagcagctctgaccgaattctaggcaggggtgggggcacctgcctgggccctgggtccagccgcatccccatgcccagcctttcgcgtcacctggaggccacatcttcccaccccacctgccagcccctgtctctcctccccgctgcccctaactgcagctcagctttcactatagcagtgcttcccaaacgggttctagacttgggtgtttgatttgaagagttacgcatttatttcactatttattgggaaaaaaatgcattgaacccgtgatttcacagacattttgcttaggtcaaggctactttttaaaaagggagtgactttcatgaagtcagtttgaagaaggaggttgggagcatgttggtggcagtgatctggagaggctgcaggggccacgagtttgcagatgctgtacttcagcaataaccttgcctttgctaagaccccctccgagggcttcaggggggcctgccaagggggggccttgttcttgttcccaaactctgacttggaagaactcagcttgtggccgggctggtgagggtgtggggtgcgcccttcccttttgggctgagggagagggggccgggaggggttgtcaagcccacccgggaaactgagccctggagaggggaagcagccagcccaggatgcttcagggccctggcagcaaagaagctggggtggtgtggagggccctactccacaccctagagctgtgatgctgagcaaggtgcctgtggcggaaggaactgcccagtcctccctgggggcaggtagacctgtggggatggctcggtccaagcccaacactgcccgctccagagagcctcagccctgcctccctttccacagaggtggttttatgtggaacgaggtaccttgtctggggaagaagtggagctgggcaggcttgactgctcctggctgaccctgagctctcgcagttggagggaagcagacagacttgactttttgcaagtccgcgtgttgctggagggacacgtgtattggagcccagaagaggggctgtgtggcctgggaataccatgtggaaggttgggcttcaagttaacaggatcagacaccagtcaagcagcctcaggtcatcttgcgactccactgagcagcctttcctgttgtcacatgggttcagagcagctgagcagggaacacgtcctaggcaggtctgacgtgaaacctccccttaccctgaaccgtgtgactctgcaagcagacacctcgaggcaggtgttctaggcaaagggatgggcatgagcgaaggctccagggtccacagagcagggagtgtggagaaggtggaagagctgagctcagaggcagagaagctccttgcagggagcactgggagatggcctggcccgtcccaggctcctggaggccccacctgccgatcccaggcacttgaccttgttcctgtgggtgacagagatgagaaccagggaagctgtgatccactggccaggacaagtcaacatgggtgagggttgggcaaagggcccttccttcctccccaaccctgtggtctggggccatggcctcaggcttgtgtctatcacaaaagcacaaacttgccctaacccacatgggcctggctgtggggaaagtggggacccaggtccctgagctgtctgctgggctccgtagagcggtggtgggcaggcaccttggcatctgtgcagagacggcccagtctggccaaatcctcttcctctcccctgctctaccttctccggcaccaggcagccccttaaaggaggacaaagtgtgtaaagcccgtctgctgtcttcccccaaatcctcagctcagagccttccgcttccagggccaaccccagccccgtttgctgcgttgtgtaagggcttggggtcttagaagctgctctttagcccagatacacatactcttttttgtctttgtgcaataatcagtgttcctggcagagcctgggccaagctgcagcctactgaggaggcagaggccacctcctccagaaagccctcggcctgggccgccgccgtgactctagcactctcagtcgctgtacagtttctatggtgtgaatgaacttccctcctagttgctgatggcgctggtacctgctggcccatggcccgggtgtagagaaaccaagcggcagccaccaccagtgttgttttgaataaaagcccagaagcctattt

SEQ ID NO: 207473 - DNA, 6740 bp, Artificial Sequence
  derived and/or modified sequence
atggctgagagcgcctccccgccctcctcatctgcagcagccccagccgctgagccaggagtcaccacggagcagcccggaccccggagccccccatcctccccgccaggcctggaggagcctctggatggagctgatcctcatgtcccacacccagacctggcgcctattgccttcttctgcctgcgacagaccaccagcccccggaactggtgcatcaagatggtgtgcaacccgtggtttgaatgtgtcagcatgctggtgatcctgctgaactgcgtgacacttggcatgtaccagccgtgcgacgacatggactgcctgtccgaccgctgcaagatcctgcaggtctttgatgacttcatctttatcttctttgccatggagatggtgctcaagatggtggccctggggatttttggcaagaagtgctacctcggggacacatggaaccgcctggatttcttcatcgtcatggcagggatggtcgagtactccctggaccttcagaacatcaacctgtcagccatccgcaccgtgcgcgtcctgaggcccctcaaagccatcaaccgcgtgcccagtatgcggatcctggtgaacctgctcctggacacactgcccatgctggggaatgtcctgctgctctgcttctttgtcttcttcatctttggcatcataggtgtgcagctctgggcgggcctgctgcgtaaccgctgcttcctggaggagaacttcaccatacaaggggatgtggccttgcccccatactaccagccggaggaggatgatgagatgcccttcatctgctccctgtcgggcgacaatgggataatgggctgccatgagatccccccgctcaaggagcagggccgtgagtgctgcctgtccaaggacgacgtctacgactttggggcggggcgccaggacctcaatgccagcggcctctgtgtcaactggaaccgttactacaatgtgtgccgcacgggcagcgccaacccccacaagggtgccatcaactttgacaacatcggttatgcttggattgtcatcttccaggtgatcactctggaaggctgggtggagatcatgtactacgtgatggatgctcactccttctacaacttcatctacttcatcctgcttatcatagtgggctccttcttcatgatcaacctgtgcctcgttgtcatagcgacccagttctcggagaccaagcaacgggagcaccggctgatgctggagcagcggcagcgctacctgtcctccagcacggtggccagctacgccgagcctggcgactgctacgaggagatcttccagtatgtctgccacatcctgcgcaaggccaagcgccgcgccctgggcctctaccaggccctgcagagccggcgccaggccctgggcccggaggccccggcccccgccaaacctgggccccacgccaaggagccccggcactaccatgggaagactaagggtcagggagatgaagggagacatctcggaagccggcattgccagactttgcatgggcctgcctcccctggaaatgatcactcgggaagagagctgtgcccgcaacatagccccctggatgcgacgccccacaccctggtgcagcccatccccgccacgctggcttccgatcccgccagctgcccttgctgccagcatgaggacggccggcggccctcgggcctgggcagcaccgactcgggccaggagggctcgggctccgggagctccgctggtggcgaggacgaggcggatggggacggggcccggagcagcgaggacggagcctcctcagaactggggaaggaggaggaggaggaggagcaggcggatggggcggtctggctgtgcggggatgtgtggcgggagacgcgagccaagctgcgcggcatcgtggacagcaagtacttcaaccggggcatcatgatggccatcctggtcaacaccgtcagcatgggcatcgagcaccacgagcagccggaggagctgaccaacatcctggagatctgcaatgtggtcttcaccagcatgtttgccctggagatgatcctgaagctggctgcatttgggctcttcgactacctgcgtaacccctacaacatcttcgacagcatcattgtcatcatcagcatctgggagattgtggggcaggcggacggtgggctgtcggtgctgcggaccttccggctgctgcgcgtgctgaaactggtgcgcttcatgcctgccctgcggcgccagctcgtggtgctcatgaagaccatggacaacgtggccaccttctgcatgctgctcatgctcttcatcttcatcttcagcatccttgggatgcatatttttggctgcaagttcagcctccgcacggacactggagacacggtgcccgacaggaagaacttcgactccctgctgtgggccatcgtcactgtgttccagatcctcacccaggaggactggaacgtcgttctctacaatggcatggcctccacttctccctgggcctccctctactttgtcgccctcatgaccttcggcaactatgtgctcttcaacctgctggtggccatcctggtggagggcttccaggcggagggtgacgccaatcgctcctactcggacgaggaccagagctcatccaacatagaagagtttgataagctccaggaaggcctggacagcagcggagatcccaagctctgcccaatccccatgacccccaatgggcacctggaccccagtctcccactgggtgggcacctaggtcctgctggggctgcgggacctgccccccgactctcactgcagccggaccccatgctggtggccctgggctcccgaaagagcagtgtcatgtctctagggaggatgagctatgaccagcgctccctgtccagctcccggagctcctactacgggccatggggccgcagcgcggcctgggccagccgtcgctccagctggaacagcctcaagcacaagccgccgtcggcggagcatgagtccctgctctctgcggagcgcggcggcggcgcccgggtctgcgaggttgccgcggacgaggggccgccgcgggccgcacccctgcacaccccacacgcccaccacattcatcacgggccccatctggcgcaccgccaccgccaccaccgccggacgctgtccctcgacaacagggactcggtggacctggccgagctggtgcccgcggtgggcgcccacccccgggccgcctggagggcggcaggcccggcccccgggcatgaggactgcaatggcaggatgcccagcatcgccaaagacgtcttcaccaagatgggcgaccgcggggatcgcggggaggatgaggaggaaatcgactacaccctgtgcttccgcgtccgcaagatgatcgacgtctataagcccgactggtgcgaggtccgcgaagactggtctgtctacctcttctctcccgagaacaggttccgggtcctgtgtcagaccattattgcccacaaactcttcgactacgtcgtcctggccttcatctttctcaactgcatcaccatcgccctggagcggcctcagatcgaggccggcagcaccgaacgcatctttctcaccgtgtccaactacatcttcacggccatcttcgtgggcgagatgacattgaaggtagtctcgctgggcctgtacttcggcgagcaggcgtacctacgcagcagctggaacgtgctggatggctttcttgtcttcgtgtccatcatcgacatcgtggtgtccctggcctcagccgggggagccaagatcttgggggtcctccgagtcttgcggctcctgcgcaccctacgccccctgcgtgtcatcagccgggcgccgggcctgaagctggtggtggagacactcatctcctccctcaagcccatcggcaacatcgtgctcatctgctgtgccttcttcatcatctttggcatcctgggagtgcagctcttcaagggcaagttctaccactgtctgggcgtggacacccgcaacatcaccaaccgctcggactgcatggccgccaactaccgctgggtccatcacaaatacaacttcgacaacctgggccaggctctgatgtccctctttgtcctggcatccaaggatggttgggtgaacatcatgtacaatggactggatgctgttgctgtggaccagcagcctgtgaccaaccacaacccctggatgctgctgtacttcatctccttcctgctcatcgtcagcttctttgtgctcaacatgtttgtgggtgtcgtggtggagaacttccacaagtgccggcagcaccaggaggctgaagaggcacggcggcgtgaggagaagcggctgcggcgcctggagaagaagcgccggaaggcccagcggctgccctactatgccacctattgtcacacccggctgctcatccactccatgtgcaccagccactacctggacatcttcatcaccttcatcatctgcctcaacgtggtcaccatgtccctggagcactacaatcagcccacgtccctggagacagccctcaagtactgcaactatatgttcaccactgtctttgtgctggaggctgtgctgaagctggtggcatttggtctgaggcgcttcttcaaggaccgatggaaccagctggacctggccattgtgctactgtcagtcatgggcatcaccctggaggagatcgagatcaatgcggccctgcccatcaatcccaccatcatccgcatcatgagggttctgcgcattgcccgagtgctgaagctgttgaagatggccacaggaatgcgggccctgctggacacggtggtgcaagctttgccccaggtgggcaacctgggcctcctcttcatgctgctcttcttcatctatgctgctctcggggtggagctctttgggaagctggtctgcaacgacgagaacccgtgcgagggcatgagccggcatgccaccttcgagaacttcggcatggccttcctcacactcttccaggtctccacgggtgacaactggaacgggatcatgaaggacacgctgcgggactgcacccacgacgagcgcagctgcctgagcagcctgcagtttgtgtcgccgctgtacttcgtgagcttcgtgctcaccgcgcagttcgtgctcatcaacgtggtggtggctgtgctcatgaagcacctggacgacagcaacaaggaggcgcaggaggacgccgagatggatgccgagctcgagctggagatggcccatggcctgggccctggcccgaggctgcctaccggctccccgggcgcccctggccgagggccgggaggggcgggcggcgggggcgacaccgagggcggcttgtgccggcgctgctactcgcctgcccaggagaacctgtggctggacagcgtctctttaatcatcaaggactccttggagggggagctgaccatcatcgacaacctgtcgggctccatcttccaccactactcctcgcctgccggctgcaagaagtgtcaccacgacaagcaagaggtgcagctggctgagacggaggccttctccctgaactcagacaggtcctcgtccatcctgctgggtgacgacctgagtctcgaggaccccacagcctgcccacctggccgcaaagacagcaagggtgagctggacccacctgagcccatgcgtgtgggagacctgggcgaatgcttcttccccttgtcctctacggccgtctcgccggatccagagaacttcctgtgtgagatggaggagatcccattcaaccctgtccggtcctggctgaaacatgacagcagtcaagcacccccaagtcccttctccccggatgcctccagccctctcctgcccatgccagccgagttcttccaccctgcagtgtctgccagccagaaaggcccagaaaagggcactggcactggaaccctccccaagattgcgctgcagggctcctgggcatctctgcggtcaccaagggtcaactgtaccctcctccggcaggtaccgacacctcccaggccctagagcactggtctgtgggcaaggggcaggatctaagccaggcctggaagtccaagggactgggaggggaaggacccaaccaaaggccgagggcaccaccgtgcaagggggtttgggaacgctggggtgacgctgagactggagggggaggtggcactggggcggatggagtgggcggggctgggtcctggggacagcagagtgtggggaggaccccaaggcgggtctggaagaggcctgtgatccctagcttgaggggaggggaggagaggaggaggagtactggaggttttgcagggtggcggggtgctggcagtggggaggacaccctgggtgctctgggtgggtgtgagtgggggcttgattactaggaatggaggtgggagggcgggtctggtggatgagaagcctcgggctgcagggtcccccgtactggattggccagggccacagccctcctacccacgggcacacagaggtctgaagcactgagggctccgctgtgggggtggggaaatggggccgggccggctcccacagtgagtgcagttgattcactgggtgactgtctgacccgtcacaccaggctgtgtgctctggcgggcaggacacaaactccctgcctgccgggctcactgtttagtgctgagagtgagctgcctgggtgcaggagggatgataaccaaaataaa

SEQ ID NO: 207474 - DNA, 10004 bp, Artificial Sequence
  derived and/or modified sequence
atggctgagagcgcctccccgccctcctcatctgcagcagccccagccgctgagccaggagtcaccacggagcagcccggaccccggagccccccatcctccccgccaggcctggaggagcctctggatggagctgatcctcatgtcccacacccagacctggcgcctattgccttcttctgcctgcgacagaccaccagcccccggaactggtgcatcaagatggtgtgcaacccgtggtttgaatgtgtcagcatgctggtgatcctgctgaactgcgtgacacttggcatgtaccagccgtgcgacgacatggactgcctgtccgaccgctgcaagatcctgcaggtctttgatgacttcatctttatcttctttgccatggagatggtgctcaagatggtggccctggggatttttggcaagaagtgctacctcggggacacatggaaccgcctggatttcttcatcgtcatggcagggatggtcgagtactccctggaccttcagaacatcaacctgtcagccatccgcaccgtgcgcgtcctgaggcccctcaaagccatcaaccgcgtgcccagtatgcggatcctggtgaacctgctcctggacacactgcccatgctggggaatgtcctgctgctctgcttctttgtcttcttcatctttggcatcataggtgtgcagctctgggcgggcctgctgcgtaaccgctgcttcctggaggagaacttcaccatacaaggggatgtggccttgcccccatactaccagccggaggaggatgatgagatgcccttcatctgctccctgtcgggcgacaatgggataatgggctgccatgagatccccccgctcaaggagcagggccgtgagtgctgcctgtccaaggacgacgtctacgactttggggcggggcgccaggacctcaatgccagcggcctctgtgtcaactggaaccgttactacaatgtgtgccgcacgggcagcgccaacccccacaagggtgccatcaactttgacaacatcggttatgcttggattgtcatcttccaggtgatcactctggaaggctgggtggagatcatgtactacgtgatggatgctcactccttctacaacttcatctacttcatcctgcttatcatagtgggctccttcttcatgatcaacctgtgcctcgttgtcatagcgacccagttctcggagaccaagcaacgggagcaccggctgatgctggagcagcggcagcgctacctgtcctccagcacggtggccagctacgccgagcctggcgactgctacgaggagatcttccagtatgtctgccacatcctgcgcaaggccaagcgccgcgccctgggcctctaccaggccctgcagagccggcgccaggccctgggcccggaggccccggcccccgccaaacctgggccccacgccaaggagccccggcactaccatgggaagactaagggtcagggagatgaagggagacatctcggaagccggcattgccagactttgcatgggcctgcctcccctggaaatgatcactcgggaagagagctgtgcccgcaacatagccccctggatgcgacgccccacaccctggtgcagcccatccccgccacgctggcttccgatcccgccagctgcccttgctgccagcatgaggacggccggcggccctcgggcctgggcagcaccgactcgggccaggagggctcgggctccgggagctccgctggtggcgaggacgaggcggatggggacggggcccggagcagcgaggacggagcctcctcagaactggggaaggaggaggaggaggaggagcaggcggatggggcggtctggctgtgcggggatgtgtggcgggagacgcgagccaagctgcgcggcatcgtggacagcaagtacttcaaccggggcatcatgatggccatcctggtcaacaccgtcagcatgggcatcgagcaccacgagcagccggaggagctgaccaacatcctggagatctgcaatgtggtcttcaccagcatgtttgccctggagatgatcctgaagctggctgcatttgggctcttcgactacctgcgtaacccctacaacatcttcgacagcatcattgtcatcatcagcatctgggagattgtggggcaggcggacggtgggctgtcggtgctgcggaccttccggctgctgcgcgtgctgaaactggtgcgcttcatgcctgccctgcggcgccagctcgtggtgctcatgaagaccatggacaacgtggccaccttctgcatgctgctcatgctcttcatcttcatcttcagcatccttgggatgcatatttttggctgcaagttcagcctccgcacggacactggagacacggtgcccgacaggaagaacttcgactccctgctgtgggccatcgtcactgtgttccagatcctcacccaggaggactggaacgtcgttctctacaatggcatggcctccacttctccctgggcctccctctactttgtcgccctcatgaccttcggcaactatgtgctcttcaacctgctggtggccatcctggtggagggcttccaggcggagggtgacgccaatcgctcctactcggacgaggaccagagctcatccaacatagaagagtttgataagctccaggaaggcctggacagcagcggagatcccaagctctgcccaatccccatgacccccaatgggcacctggaccccagtctcccactgggtgggcacctaggtcctgctggggctgcgggacctgccccccgactctcactgcagccggaccccatgctggtggccctgggctcccgaaagagcagtgtcatgtctctagggaggatgagctatgaccagcgctccctgtccagctcccggagctcctactacgggccatggggccgcagcgcggcctgggccagccgtcgctccagctggaacagcctcaagcacaagccgccgtcggcggagcatgagtccctgctctctgcggagcgcggcggcggcgcccgggtctgcgaggttgccgcggacgaggggccgccgcgggccgcacccctgcacaccccacacgcccaccacattcatcacgggccccatctggcgcaccgccaccgccaccaccgccggacgctgtccctcgacaacagggactcggtggacctggccgagctggtgcccgcggtgggcgcccacccccgggccgcctggagggcggcaggcccggcccccgggcatgaggactgcaatggcaggatgcccagcatcgccaaagacgtcttcaccaagatgggcgaccgcggggatcgcggggaggatgaggaggaaatcgactacaccctgtgcttccgcgtccgcaagatgatcgacgtctataagcccgactggtgcgaggtccgcgaagactggtctgtctacctcttctctcccgagaacaggttccgggtcctgtgtcagaccattattgcccacaaactcttcgactacgtcgtcctggccttcatctttctcaactgcatcaccatcgccctggagcggcctcagatcgaggccggcagcaccgaacgcatctttctcaccgtgtccaactacatcttcacggccatcttcgtgggcgagatgacattgaaggtagtctcgctgggcctgtacttcggcgagcaggcgtacctacgcagcagctggaacgtgctggatggctttcttgtcttcgtgtccatcatcgacatcgtggtgtccctggcctcagccgggggagccaagatcttgggggtcctccgagtcttgcggctcctgcgcaccctacgccccctgcgtgtcatcagccgggcgccgggcctgaagctggtggtggagacactcatctcctccctcaagcccatcggcaacatcgtgctcatctgctgtgccttcttcatcatctttggcatcctgggagtgcagctcttcaagggcaagttctaccactgtctgggcgtggacacccgcaacatcaccaaccgctcggactgcatggccgccaactaccgctgggtccatcacaaatacaacttcgacaacctgggccaggctctgatgtccctctttgtcctggcatccaaggatggttgggtgaacatcatgtacaatggactggatgctgttgctgtggaccagcagcctgtgaccaaccacaacccctggatgctgctgtacttcatctccttcctgctcatcgtcagcttctttgtgctcaacatgtttgtgggtgtcgtggtggagaacttccacaagtgccggcagcaccaggaggctgaagaggcacggcggcgtgaggagaagcggctgcggcgcctggagaagaagcgccggaaggcccagcggctgccctactatgccacctattgtcacacccggctgctcatccactccatgtgcaccagccactacctggacatcttcatcaccttcatcatctgcctcaacgtggtcaccatgtccctggagcactacaatcagcccacgtccctggagacagccctcaagtactgcaactatatgttcaccactgtctttgtgctggaggctgtgctgaagctggtggcatttggtctgaggcgcttcttcaaggaccgatggaaccagctggacctggccattgtgctactgtcagtcatgggcatcaccctggaggagatcgagatcaatgcggccctgcccatcaatcccaccatcatccgcatcatgagggttctgcgcattgcccgagtgctgaagctgttgaagatggccacaggaatgcgggccctgctggacacggtggtgcaagctttgccccaggtgggcaacctgggcctcctcttcatgctgctcttcttcatctatgctgctctcggggtggagctctttgggaagctggtctgcaacgacgagaacccgtgcgagggcatgagccggcatgccaccttcgagaacttcggcatggccttcctcacactcttccaggtctccacgggtgacaactggaacgggatcatgaaggacacgctgcgggactgcacccacgacgagcgcagctgcctgagcagcctgcagtttgtgtcgccgctgtacttcgtgagcttcgtgctcaccgcgcagttcgtgctcatcaacgtggtggtggctgtgctcatgaagcacctggacgacagcaacaaggaggcgcaggaggacgccgagatggatgccgagctcgagctggagatggcccatggcctgggccctggcccgaggctgcctaccggctccccgggcgcccctggccgagggccgggaggggcgggcggcgggggcgacaccgagggcggcttgtgccggcgctgctactcgcctgcccaggagaacctgtggctggacagcgtctctttaatcatcaaggactccttggagggggagctgaccatcatcgacaacctgtcgggctccatcttccaccactactcctcgcctgccggctgcaagaagtgtcaccacgacaagcaagaggtgcagctggctgagacggaggccttctccctgaactcagacaggtcctcgtccatcctgctgggtgacgacctgagtctcgaggaccccacagcctgcccacctggccgcaaagacagcaagggtgagctggacccacctgagcccatgcgtgtgggagacctgggcgaatgcttcttccccttgtcctctacggccgtctcgccggatccagagaacttcctgtgtgagatggaggagatcccattcaaccctgtccggtcctggctgaaacatgacagcagtcaagcacccccaagtcccttctccccggatgcctccagccctctcctgcccatgccagccgagttcttccaccctgcagtgtctgccagccagaaaggcccagaaaagggcactggcactggaaccctccccaagattgcgctgcagggctcctgggcatctctgcggtcaccaagggtcaactgtaccctcctccggcaggccaccgggagcgacacgtcgctggacgccagccccagcagctccgcgggcagcctgcagaccacgctcgaggacagcctgaccctgagcgacagcccccggcgtgccctggggccgcccgcgcctgctccaggaccccgggccggcctgtcccccgccgctcgccgccgcctgagcctgcgcggccggggcctcttcagcctgcgggggctgcgggcgcatcagcgcagccacagcagcgggggctccaccagcccgggctgcacccaccacgactccatggacccctcggacgaggagggccgcggtggcgcgggcggcgggggcgcgggcagcgagcactcggagaccctcagcagcctctcgctcacctccctcttctgcccgccgcccccgccgccagcccccggcctcacgcccgccaggaagttcagcagcaccagcagcctggccgcccccggccgcccccacgccgccgccctggcccacggcctggcccggagcccctcgtgggccgcggaccgcagcaaggacccccccggccgggcaccgctgcccatgggcctgggccccttggcgcccccgccgcaaccgctccccggagagctggagccgggagacgccgccagcaagaggaagagatgagggtcgcaggggcccccggccgcccaccgcccgccccgtctcaccttctttacctcaggagccaggagcagacagcaatacttcgtccacacctgggatcgcgcagggcccgcagggcacaggcgcccgacagccgggctgagcggagtctgggttagccaggcctgcgtggcccatggtggcccttccagtgcatatacatacatatatatatatatatgcatatatatatatatatatatatatatgtgtatacacacacacatagacagacatatatatatatatttattttttttactgagagcttatgacttccagaaagtgctaaaggtgggaggtgggccagggcctggacggggcttttgtctgatgctctgggattctggccagacccaccccagggcacatgtcctgcgggggcgtcccagctgtgttttttgatgtctcctccctggttaagagtagcttggagaggaccctcaggcctctgagggcaccaggccctggagaagaggtgcaattcagggtgtgtgtgtgttttttttcctttaaagaagaaacgctgctaagatcccacgtggctcccacgtgtcggggtgtctgtcctgtcatcctgactgtctcgttattgtgaagtctttcgtagacaccccagagcacacacatccccttagtccaccggttagatgtctctctttagaaaaatcaggggtgagtagctgtgtttccttaggcctggggtaggggatggagagcagctccaaggctgagctggggctctggccccaggtgaggtccccagctcctgagcacttctgagggggtgggttccacccccaggagggcgggggtgggtggagcaggagtggaggcagcctgcagaggaagggtgcgggagactgagccggcagtggcttgcttggaggggctagggtacccgcctggtctcggctggctccagctgccctgcaggtgcccctgggctcaggtagttagttgttcagccactaatgccttttatcccccatatgggcgctgagctgtggctgttcctggacactgtgctgtccccgtcctgagcaactatgcccccgccccagtaggttcaaggcaaagcagctctgaccgaattctaggcaggggtgggggcacctgcctgggccctgggtccagccgcatccccatgcccagcctttcgcgtcacctggaggccacatcttcccaccccacctgccagcccctgtctctcctccccgctgcccctaactgcagctcagctttcactatagcagtgcttcccaaacgggttctagacttgggtgtttgatttgaagagttacgcatttatttcactatttattgggaaaaaaatgcattgaacccgtgatttcacagacattttgcttaggtcaaggctactttttaaaaagggagtgactttcatgaagtcagtttgaagaaggaggttgggagcatgttggtggcagtgatctggagaggctgcaggggccacgagtttgcagatgctgtacttcagcaataaccttgcctttgctaagaccccctccgagggcttcaggggggcctgccaagggggggccttgttcttgttcccaaactctgacttggaagaactcagcttgtggccgggctggtgagggtgtggggtgcgcccttcccttttgggctgagggagagggggccgggaggggttgtcaagcccacccgggaaactgagccctggagaggggaagcagccagcccaggatgcttcagggccctggcagcaaagaagctggggtggtgtggagggccctactccacaccctagagctgtgatgctgagcaaggtgcctgtggcggaaggaactgcccagtcctccctgggggcaggtagacctgtggggatggctcggtccaagcccaacactgcccgctccagagagcctcagccctgcctccctttccacagaggtggttttatgtggaacgaggtaccttgtctggggaagaagtggagctgggcaggcttgactgctcctggctgaccctgagctctcgcagttggagggaagcagacagacttgactttttgcaagtccgcgtgttgctggagggacacgtgtattggagcccagaagaggggctgtgtggcctgggaataccatgtggaaggttgggcttcaagttaacaggatcagacaccagtcaagcagcctcaggtcatcttgcgactccactgagcagcctttcctgttgtcacatgggttcagagcagctgagcagggaacacgtcctaggcaggtctgacgtgaaacctccccttaccctgaaccgtgtgactctgcaagcagacacctcgaggcaggtgttctaggcaaagggatgggcatgagcgaaggctccagggtccacagagcagggagtgtggagaaggtggaagagctgagctcagaggcagagaagctccttgcagggagcactgggagatggcctggcccgtcccaggctcctggaggccccacctgccgatcccaggcacttgaccttgttcctgtgggtgacagagatgagaaccagggaagctgtgatccactggccaggacaagtcaacatgggtgagggttgggcaaagggcccttccttcctccccaaccctgtggtctggggccatggcctcaggcttgtgtctatcacaaaagcacaaacttgccctaacccacatgggcctggctgtggggaaagtggggacccaggtccctgagctgtctgctgggctccgtagagcggtggtgggcaggcaccttggcatctgtgcagagacggcccagtctggccaaatcctcttcctctcccctgctctaccttctccggcaccaggcagccccttaaaggaggacaaagtgtgtaaagcccgtctgctgtcttcccccaaatcctcagctcagagccttccgcttccagggccaaccccagccccgtttgctgcgttgtgtaagggcttggggtcttagaagctgctctttagcccagatacacatactcttttttgtctttgtgcaataatcagtgttcctggcagagcctgggccaagctgcagcctactgaggaggcagaggccacctcctccagaaagccctcggcctgggccgccgccgtgactctagcactctcagtcgctgtacagtttctatggtgtgaatgaacttccctcctagttgctgatggcgctggtacctgctggcccatggcccgggtgtagagaaaccaagcggcagccaccaccagtgttgttttgaataaaagcccagaagcctatttaagaatt

SEQ ID NO: 207475 - DNA, 6690 bp, Artificial Sequence
  derived and/or modified sequence
atggccgagagcgccagcccccccagcagcagcgccgccgcccccgccgccgagcccggcgtgaccaccgagcagcccggccccagaagcccccccagcagcccccccggcctggaggagcccctggacggcgccgacccccacgtgccccaccccgacctggcccccatcgccttcttctgcctgagacagaccaccagccccagaaactggtgcatcaagatggccaccggcccctggtggtggtgcctgtgcatgctggtgatcctgctgaactgcgtgaccctgggcatgtaccagccctgcgacgacatggactgcctgagcgacagatgcaagatcctgcaggtgttcgacgacttcatcttcatcttcttcgccatggagatggtgctgaagatggtggccctgggcatcttcggcaagaagtgctacctgggcgacacctggaacagactggacttcttcatcgtgatggccggcatggtggagtacagcctggacctgcagaacatcaacctgagcgccatcagaaccgtgagagtgctgagacccctgaaggccatcaacagagtgcccagcatgagaatcctggtgaacctgctgctggacaccctgcccatgctgggcaacgtgctgctgctgtgcttcttcgtgttcttcatcttcggcatcatcggcgtgcagctgtgggccggcctgctgagaaacagatgcttcctggaggagaacttcaccatccagggcgacgtggccctgcccccctactaccagcccgaggaggacgacgagatgcccttcatctgcagcctgagcggcgacaacggcatcatgggctgccacgagatcccccccctgaaggagcagggcagagagtgctgcctgagcaaggacgacgtgtacgacttcggcgccggcagacaggacctgaacgccagcggcctgtgcgtgaactggaacagatactacaacgtgtgcagaaccggcagcgccaacccccacaagggcgccatcaacttcgacaacatcggctacgcctggatcgtgatcttccaggtgatcaccctggagggctgggtggagatcatgtactacgtgatggacgcccacagcttctacaacttcatctacttcatcctgctgatcatcgtgggcagcttcttcatgatcaacctgtgcctggtggtgatcgccacccagttcagcgagaccaagcagagagagcacagactgatgctggagcagagacagagatacctgagcagcagcaccgtggccagctacgccgagcccggcgactgctacgaggagatcttccagtacgtgtgccacatcctgagaaaggccaagagaagagccctgggcctgtaccaggccctgcagagcagaagacaggccctgggccccgaggcccccgcccccgccaagcccggcccccacgccaaggagcccagacactaccacggcaagaccaagggccagggcgacgagggcagacacctgggcagcagacactgccagaccctgcacggccccgccagccccggcaacgaccacagcggcagaggcaagcccggccccagagagctgtgcccccagcacagccccctggacgccaccccccacaccctggtgcagcccatccccgccaccctggccagcgaccccgccagctgcccctgctgccagcacgaggacggcagaagacccagcggcctgggcagcaccgacagcggccaggagggcagcggcagcggcagcagcgccggcggcgaggacgaggccgacggcgacggcgccagaagcagcgaggacggcgccagcagcgagctgggcaaggaggaggaggaggaggagcaggccgacggcgccgtgtggctgtgcggcgacgtgtggagagagaccagagccaagctgagaggcatcgtggacagcaagtacttcaacagaggcatcatgatggccatcctggtgaacaccgtgagcatgggcatcgagcaccacgagcaggccaacgagctgaccaacatcctggagatctgcaacgtggtgttcaccagcatgttcgccctggagatgatcctgaagctggccgccttcggcctgttcgactacctgagaaacccctacaacatcttcgacagcatcatcgtgatcatcagcatctgggagatcgtgggccaggccgacggcggcctgagcgtgctgagaaccttcagactgctgagagtgctgaagctggtgagattcatgcccgccctgagaagacagctggtggtgctgatgaagaccatggacaacgtggccaccttctgcatgctgctgatgctgttcatcttcatcttcagcatcctgggcatgcacatcttcggctgcaagttcagcctgagaaccgacaccggcgacaccgtgcccgacagaaagaacttcgacagcctgctgtgggccatcgtgaccgtgttccagatcctgacccaggaggactggaacgtggtgctgtacaacggcatggccagcaccagcccctgggccagcctgtacttcgtggccctgatgaccttcggcaactacgtgctgttcaacctgctggtggccatcctggtggagggcttccaggccgagggcgacgccaacagaagctacagcgacgaggaccagagcagcagcaacatcgaggagttcgacaagctgcaggagggcctggacagcagcggcgaccccaagctgtgccccatccccatgacccccaacggccacctggaccccagcctgcccctgggcggccacctgggccccgccggcgccgccggccccgcccccagactgagcctgcagcccgaccccatgctggtggccctgggcagcagaaagagcagcgtgatgagcctgggcagaatgagctacgaccagagaagcctgagcagcagcagaagcagctactacggcccctggggcagaagcgccgcctgggccagcagaagaagcagctggaacagcctgaagcacaagccccccagcgccgagcacgagagcctgctgagcgccgagagaggcggcggcgccagagtgtgcgaggtggccgccgacgagggcccccccagagccgcccccctgcacaccccccacgcccaccacatccaccacggcccccacctggcccacagacacagacaccacagaagaaccctgagcctggacaacagagacagcgtggacctggccgagctggtgcccgccgtgggcgcccaccccagagccgcctggagagccgccggccccgcccccggccacgaggactgcaacggcagaatgcccagcatcgccaaggacgtgttcaccaagatgggcgacagaggcgacagaggcgaggacgaggaggagatcgactacaccctgtgcttcagagtgagaaagatgatcgacgtgtacaagcccgactggtgcgaggtgagagaggactggagcgtgtacctgttcagccccgagaacagattcagagtgctgtgccagaccatcatcgcccacaagctgttcgactacgtggtgctggccttcatcttcctgaactgcatcaccatcgccctggagagaccccagatcgaggccggcagcaccgagagaatcttcctgaccgtgagcaactacatcttcaccgccatcttcgtgggcgagatgaccctgaaggtggtgagcctgggcctgtacttcggcgagcaggcctacctgagaagcagctggaacgtgctggacggcttcctggtgttcgtgagcatcatcgacatcgtggtgagcctggccagcgccggcggcgccaagatcctgggcgtgctgagagtgctgagactgctgagaaccctgagacccctgagagtgatcagcagagcccccggcctgaagctggtggtggagaccctgatcagcagcctgaagcccatcggcaacatcgtgctgatctgctgcgccttcttcatcatcttcggcatcctgggcgtgcagctgttcaagggcaagttctaccactgcctgggcgtggacaccagaaacatcaccaacagaagcgactgcatggccgccaactacagatgggtgcaccacaagtacaacttcgacaacctgggccaggccctgatgagcctgttcgtgctggccagcaaggacggctgggtgaacatcatgtacaacggcctggacgccgtggccgtggaccagcagcccgtgaccaaccacaacccctggatgctgctgtacttcatcagcttcctgctgatcgtgagcttcttcgtgctgaacatgttcgtgggcgtggtggtggagaacttccacaagtgcagacagcaccaggaggccgaggaggccagaagaagagaggagaagagactgagaagactggagaagaagagaagaaaggcccagagactgccctactacgccacctactgccacaccagactgctgatccacagcatgtgcaccagccactacctggacatcttcatcaccttcatcatctgcctgaacgtggtgaccatgagcctggagcactacaaccagcccaccagcctggagaccgccctgaagtactgcaactacatgttcaccaccgtgttcgtgctggaggccgtgctgaagctggtggccttcggcctgagaagattcttcaaggacagatggaaccagctggacctggccatcgtgctgctgagcgtgatgggcatcaccctggaggagatcgagatcaacgccgccctgcccatcaaccccaccatcatcagaatcatgagagtgctgagaatcgccagagtgctgaagctgctgaagatggccaccggcatgagagccctgctggacaccgtggtgcaggccctgccccaggtgggcaacctgggcctgctgttcatgctgctgttcttcatctacgccgccctgggcgtggagctgttcggcaagctggtgtgcaacgacgagaacccctgcgagggcatgagcagacacgccaccttcgagaacttcggcatggccttcctgaccctgttccaggtgagcaccggcgacaactggaacggcatcatgaaggacaccctgagagactgcacccacgacgagagaagctgcctgagcagcctgcagttcgtgagccccctgtacttcgtgagcttcgtgctgaccgcccagttcgtgctgatcaacgtggtggtggccgtgctgatgaagcacctggacgacagcaacaaggaggcccaggaggacgccgagatggacgccgagctggagctggagatggcccacggcctgggccccggccccagactgcccaccggcagccccggcgcccccggcagaggccccggcggcgccggcggcggcggcgacaccgagggcggcctgtgcagaagatgctacagccccgcccaggagaacctgtggctggacagcgtgagcctgatcatcaaggacagcctggagggcgagctgaccatcatcgacaacctgagcggcagcatcttccaccactacagcagccccgccggctgcaagaagtgccaccacgacaagcaggaggtgcagctggccgagaccgaggccttcagcctgaacagcgacagaagcagcagcatcctgctgggcgacgacctgagcctggaggaccccaccgcctgcccccccggcagaaaggacagcaagggcgagctggacccccccgagcccatgagagtgggcgacctgggcgagtgcttcttccccctgagcagcaccgccgtgagccccgaccccgagaacttcctgtgcgagatggaggagatccccttcaaccccgtgagaagctggctgaagcacgacagcagccaggccccccccagccccttcagccccgacgccagcagccccctgctgcccatgcccgccgagttcttccaccccgccgtgagcgccagccagaagggccccgagaagggcaccggcaccggcaccctgcccaagatcgccctgcagggcagctgggccagcctgagaagccccagagtgaactgcaccctgctgagacaggccaccggcagcgacaccagcctggacgccagccccagcagcagcgccggcagcctgcagaccaccctggaggacagcctgaccctgagcgacagccccagaagagccctgggcccccccgcccccgcccccggccccagagccggcctgagccccgccgccagaagaagactgagcctgagaggcagaggcctgttcagcctgagaggcctgagagcccaccagagaagccacagcagcggcggcagcaccagccccggctgcacccaccacgacagcatggaccccagcgacgaggagggcagaggcggcgccggcggcggcggcgccggcagcgagcacagcgagaccctgagcagcctgagcctgaccagcctgttctgcccccccccccccccccccgcccccggcctgacccccgccagaaagttcagcagcaccagcagcctggccgcccccggcagaccccacgccgccgccctggcccacggcctggccagaagccccagctgggccgccgacagaagcaaggacccccccggcagagcccccctgcccatgggcctgggccccctggccccccccccccagcccctgcccggcgagctggagcccggcgacgccgccagcaagagaaagagatag

SEQ ID NO: 207476 - DNA, 6051 bp, Artificial Sequence
  derived and/or modified sequence
atggccgagagcgccagcccccccagcagcagcgccgccgcccccgccgccgagcccggcgtgaccaccgagcagcccggccccagaagcccccccagcagcccccccggcctggaggagcccctggacggcgccgacccccacgtgccccaccccgacctggcccccatcgccttcttctgcctgagacagaccaccagccccagaaactggtgcatcaagatggtgtgcaacccctggttcgagtgcgtgagcatgctggtgatcctgctgaactgcgtgaccctgggcatgtaccagccctgcgacgacatggactgcctgagcgacagatgcaagatcctgcaggtgttcgacgacttcatcttcatcttcttcgccatggagatggtgctgaagatggtggccctgggcatcttcggcaagaagtgctacctgggcgacacctggaacagactggacttcttcatcgtgatggccggcatggtggagtacagcctggacctgcagaacatcaacctgagcgccatcagaaccgtgagagtgctgagacccctgaaggccatcaacagagtgcccagcatgagaatcctggtgaacctgctgctggacaccctgcccatgctgggcaacgtgctgctgctgtgcttcttcgtgttcttcatcttcggcatcatcggcgtgcagctgtgggccggcctgctgagaaacagatgcttcctggaggagaacttcaccatccagggcgacgtggccctgcccccctactaccagcccgaggaggacgacgagatgcccttcatctgcagcctgagcggcgacaacggcatcatgggctgccacgagatcccccccctgaaggagcagggcagagagtgctgcctgagcaaggacgacgtgtacgacttcggcgccggcagacaggacctgaacgccagcggcctgtgcgtgaactggaacagatactacaacgtgtgcagaaccggcagcgccaacccccacaagggcgccatcaacttcgacaacatcggctacgcctggatcgtgatcttccaggtgatcaccctggagggctgggtggagatcatgtactacgtgatggacgcccacagcttctacaacttcatctacttcatcctgctgatcatcgtgggcagcttcttcatgatcaacctgtgcctggtggtgatcgccacccagttcagcgagaccaagcagagagagcacagactgatgctggagcagagacagagatacctgagcagcagcaccgtggccagctacgccgagcccggcgactgctacgaggagatcttccagtacgtgtgccacatcctgagaaaggccaagagaagagccctgggcctgtaccaggccctgcagagcagaagacaggccctgggccccgaggcccccgcccccgccaagcccggcccccacgccaaggagcccagacactaccacggcaagaccaagggccagggcgacgagggcagacacctgggcagcagacactgccagaccctgcacggccccgccagccccggcaacgaccacagcggcagagagctgtgcccccagcacagccccctggacgccaccccccacaccctggtgcagcccatccccgccaccctggccagcgaccccgccagctgcccctgctgccagcacgaggacggcagaagacccagcggcctgggcagcaccgacagcggccaggagggcagcggcagcggcagcagcgccggcggcgaggacgaggccgacggcgacggcgccagaagcagcgaggacggcgccagcagcgagctgggcaaggaggaggaggaggaggagcaggccgacggcgccgtgtggctgtgcggcgacgtgtggagagagaccagagccaagctgagaggcatcgtggacagcaagtacttcaacagaggcatcatgatggccatcctggtgaacaccgtgagcatgggcatcgagcaccacgagcagcccgaggagctgaccaacatcctggagatctgcaacgtggtgttcaccagcatgttcgccctggagatgatcctgaagctggccgccttcggcctgttcgactacctgagaaacccctacaacatcttcgacagcatcatcgtgatcatcagcatctgggagatcgtgggccaggccgacggcggcctgagcgtgctgagaaccttcagactgctgagagtgctgaagctggtgagattcatgcccgccctgagaagacagctggtggtgctgatgaagaccatggacaacgtggccaccttctgcatgctgctgatgctgttcatcttcatcttcagcatcctgggcatgcacatcttcggctgcaagttcagcctgagaaccgacaccggcgacaccgtgcccgacagaaagaacttcgacagcctgctgtgggccatcgtgaccgtgttccagatcctgacccaggaggactggaacgtggtgctgtacaacggcatggccagcaccagcccctgggccagcctgtacttcgtggccctgatgaccttcggcaactacgtgctgttcaacctgctggtggccatcctggtggagggcttccaggccgagggcgacgccaacagaagctacagcgacgaggaccagagcagcagcaacatcgaggagttcgacaagctgcaggagggcctggacagcagcggcgaccccaagctgtgccccatccccatgacccccaacggccacctggaccccagcctgcccctgggcggccacctgggccccgccggcgccgccggccccgcccccagactgagcctgcagcccgaccccatgctggtggccctgggcagcagaaagagcagcgtgatgagcctgggcagaatgagctacgaccagagaagcctgagcagcagcagaagcagctactacggcccctggggcagaagcgccgcctgggccagcagaagaagcagctggaacagcctgaagcacaagccccccagcgccgagcacgagagcctgctgagcgccgagagaggcggcggcgccagagtgtgcgaggtggccgccgacgagggcccccccagagccgcccccctgcacaccccccacgcccaccacatccaccacggcccccacctggcccacagacacagacaccacagaagaaccctgagcctggacaacagagacagcgtggacctggccgagctggtgcccgccgtgggcgcccaccccagagccgcctggagagccgccggccccgcccccggccacgaggactgcaacggcagaatgcccagcatcgccaaggacgtgttcaccaagatgggcgacagaggcgacagaggcgaggacgaggaggagatcgactacaccctgtgcttcagagtgagaaagatgatcgacgtgtacaagcccgactggtgcgaggtgagagaggactggagcgtgtacctgttcagccccgagaacagattcagagtgctgtgccagaccatcatcgcccacaagctgttcgactacgtggtgctggccttcatcttcctgaactgcatcaccatcgccctggagagaccccagatcgaggccggcagcaccgagagaatcttcctgaccgtgagcaactacatcttcaccgccatcttcgtgggcgagatgaccctgaaggtggtgagcctgggcctgtacttcggcgagcaggcctacctgagaagcagctggaacgtgctggacggcttcctggtgttcgtgagcatcatcgacatcgtggtgagcctggccagcgccggcggcgccaagatcctgggcgtgctgagagtgctgagactgctgagaaccctgagacccctgagagtgatcagcagagcccccggcctgaagctggtggtggagaccctgatcagcagcctgaagcccatcggcaacatcgtgctgatctgctgcgccttcttcatcatcttcggcatcctgggcgtgcagctgttcaagggcaagttctaccactgcctgggcgtggacaccagaaacatcaccaacagaagcgactgcatggccgccaactacagatgggtgcaccacaagtacaacttcgacaacctgggccaggccctgatgagcctgttcgtgctggccagcaaggacggctgggtgaacatcatgtacaacggcctggacgccgtggccgtggaccagcagcccgtgaccaaccacaacccctggatgctgctgtacttcatcagcttcctgctgatcgtgagcttcttcgtgctgaacatgttcgtgggcgtggtggtggagaacttccacaagtgcagacagcaccaggaggccgaggaggccagaagaagagaggagaagagactgagaagactggagaagaagagaagaaaggcccagagactgccctactacgccacctactgccacaccagactgctgatccacagcatgtgcaccagccactacctggacatcttcatcaccttcatcatctgcctgaacgtggtgaccatgagcctggagcactacaaccagcccaccagcctggagaccgccctgaagtactgcaactacatgttcaccaccgtgttcgtgctggaggccgtgctgaagctggtggccttcggcctgagaagattcttcaaggacagatggaaccagctggacctggccatcgtgctgctgagcgtgatgggcatcaccctggaggagatcgagatcaacgccgccctgcccatcaaccccaccatcatcagaatcatgagagtgctgagaatcgccagagtgctgaagctgctgaagatggccaccggcatgagagccctgctggacaccgtggtgcaggccctgccccaggtgggcaacctgggcctgctgttcatgctgctgttcttcatctacgccgccctgggcgtggagctgttcggcaagctggtgtgcaacgacgagaacccctgcgagggcatgagcagacacgccaccttcgagaacttcggcatggccttcctgaccctgttccaggtgagcaccggcgacaactggaacggcatcatgaaggacaccctgagagactgcacccacgacgagagaagctgcctgagcagcctgcagttcgtgagccccctgtacttcgtgagcttcgtgctgaccgcccagttcgtgctgatcaacgtggtggtggccgtgctgatgaagcacctggacgacagcaacaaggaggcccaggaggacgccgagatggacgccgagctggagctggagatggcccacggcctgggccccggccccagactgcccaccggcagccccggcgcccccggcagaggccccggcggcgccggcggcggcggcgacaccgagggcggcctgtgcagaagatgctacagccccgcccaggagaacctgtggctggacagcgtgagcctgatcatcaaggacagcctggagggcgagctgaccatcatcgacaacctgagcggcagcatcttccaccactacagcagccccgccggctgcaagaagtgccaccacgacaagcaggaggtgcagctggccgagaccgaggccttcagcctgaacagcgacagaagcagcagcatcctgctgggcgacgacctgagcctggaggaccccaccgcctgcccccccggcagaaaggacagcaagggcgagctggacccccccgagcccatgagagtgggcgacctgggcgagtgcttcttccccctgagcagcaccgccgtgagccccgaccccgagaacttcctgtgcgagatggaggagatccccttcaaccccgtgagaagctggctgaagcacgacagcagccaggccccccccagccccttcagccccgacgccagcagccccctgctgcccatgcccgccgagttcttccaccccgccgtgagcgccagccagaagggccccgagaagggcaccggcaccggcaccctgcccaagatcgccctgcagggcagctgggccagcctgagaagccccagagtgaactgcaccctgctgagacaggtgcccaccccccccagaccctag

SEQ ID NO: 207477 - DNA, 6672 bp, Artificial Sequence
  derived and/or modified sequence
atggccgagagcgccagcccccccagcagcagcgccgccgcccccgccgccgagcccggcgtgaccaccgagcagcccggccccagaagcccccccagcagcccccccggcctggaggagcccctggacggcgccgacccccacgtgccccaccccgacctggcccccatcgccttcttctgcctgagacagaccaccagccccagaaactggtgcatcaagatggtgtgcaacccctggttcgagtgcgtgagcatgctggtgatcctgctgaactgcgtgaccctgggcatgtaccagccctgcgacgacatggactgcctgagcgacagatgcaagatcctgcaggtgttcgacgacttcatcttcatcttcttcgccatggagatggtgctgaagatggtggccctgggcatcttcggcaagaagtgctacctgggcgacacctggaacagactggacttcttcatcgtgatggccggcatggtggagtacagcctggacctgcagaacatcaacctgagcgccatcagaaccgtgagagtgctgagacccctgaaggccatcaacagagtgcccagcatgagaatcctggtgaacctgctgctggacaccctgcccatgctgggcaacgtgctgctgctgtgcttcttcgtgttcttcatcttcggcatcatcggcgtgcagctgtgggccggcctgctgagaaacagatgcttcctggaggagaacttcaccatccagggcgacgtggccctgcccccctactaccagcccgaggaggacgacgagatgcccttcatctgcagcctgagcggcgacaacggcatcatgggctgccacgagatcccccccctgaaggagcagggcagagagtgctgcctgagcaaggacgacgtgtacgacttcggcgccggcagacaggacctgaacgccagcggcctgtgcgtgaactggaacagatactacaacgtgtgcagaaccggcagcgccaacccccacaagggcgccatcaacttcgacaacatcggctacgcctggatcgtgatcttccaggtgatcaccctggagggctgggtggagatcatgtactacgtgatggacgcccacagcttctacaacttcatctacttcatcctgctgatcatcgtgggcagcttcttcatgatcaacctgtgcctggtggtgatcgccacccagttcagcgagaccaagcagagagagcacagactgatgctggagcagagacagagatacctgagcagcagcaccgtggccagctacgccgagcccggcgactgctacgaggagatcttccagtacgtgtgccacatcctgagaaaggccaagagaagagccctgggcctgtaccaggccctgcagagcagaagacaggccctgggccccgaggcccccgcccccgccaagcccggcccccacgccaaggagcccagacactaccacggcaagaccaagggccagggcgacgagggcagacacctgggcagcagacactgccagaccctgcacggccccgccagccccggcaacgaccacagcggcagagagctgtgcccccagcacagccccctggacgccaccccccacaccctggtgcagcccatccccgccaccctggccagcgaccccgccagctgcccctgctgccagcacgaggacggcagaagacccagcggcctgggcagcaccgacagcggccaggagggcagcggcagcggcagcagcgccggcggcgaggacgaggccgacggcgacggcgccagaagcagcgaggacggcgccagcagcgagctgggcaaggaggaggaggaggaggagcaggccgacggcgccgtgtggctgtgcggcgacgtgtggagagagaccagagccaagctgagaggcatcgtggacagcaagtacttcaacagaggcatcatgatggccatcctggtgaacaccgtgagcatgggcatcgagcaccacgagcagcccgaggagctgaccaacatcctggagatctgcaacgtggtgttcaccagcatgttcgccctggagatgatcctgaagctggccgccttcggcctgttcgactacctgagaaacccctacaacatcttcgacagcatcatcgtgatcatcagcatctgggagatcgtgggccaggccgacggcggcctgagcgtgctgagaaccttcagactgctgagagtgctgaagctggtgagattcatgcccgccctgagaagacagctggtggtgctgatgaagaccatggacaacgtggccaccttctgcatgctgctgatgctgttcatcttcatcttcagcatcctgggcatgcacatcttcggctgcaagttcagcctgagaaccgacaccggcgacaccgtgcccgacagaaagaacttcgacagcctgctgtgggccatcgtgaccgtgttccagatcctgacccaggaggactggaacgtggtgctgtacaacggcatggccagcaccagcccctgggccagcctgtacttcgtggccctgatgaccttcggcaactacgtgctgttcaacctgctggtggccatcctggtggagggcttccaggccgagggcgacgccaacagaagctacagcgacgaggaccagagcagcagcaacatcgaggagttcgacaagctgcaggagggcctggacagcagcggcgaccccaagctgtgccccatccccatgacccccaacggccacctggaccccagcctgcccctgggcggccacctgggccccgccggcgccgccggccccgcccccagactgagcctgcagcccgaccccatgctggtggccctgggcagcagaaagagcagcgtgatgagcctgggcagaatgagctacgaccagagaagcctgagcagcagcagaagcagctactacggcccctggggcagaagcgccgcctgggccagcagaagaagcagctggaacagcctgaagcacaagccccccagcgccgagcacgagagcctgctgagcgccgagagaggcggcggcgccagagtgtgcgaggtggccgccgacgagggcccccccagagccgcccccctgcacaccccccacgcccaccacatccaccacggcccccacctggcccacagacacagacaccacagaagaaccctgagcctggacaacagagacagcgtggacctggccgagctggtgcccgccgtgggcgcccaccccagagccgcctggagagccgccggccccgcccccggccacgaggactgcaacggcagaatgcccagcatcgccaaggacgtgttcaccaagatgggcgacagaggcgacagaggcgaggacgaggaggagatcgactacaccctgtgcttcagagtgagaaagatgatcgacgtgtacaagcccgactggtgcgaggtgagagaggactggagcgtgtacctgttcagccccgagaacagattcagagtgctgtgccagaccatcatcgcccacaagctgttcgactacgtggtgctggccttcatcttcctgaactgcatcaccatcgccctggagagaccccagatcgaggccggcagcaccgagagaatcttcctgaccgtgagcaactacatcttcaccgccatcttcgtgggcgagatgaccctgaaggtggtgagcctgggcctgtacttcggcgagcaggcctacctgagaagcagctggaacgtgctggacggcttcctggtgttcgtgagcatcatcgacatcgtggtgagcctggccagcgccggcggcgccaagatcctgggcgtgctgagagtgctgagactgctgagaaccctgagacccctgagagtgatcagcagagcccccggcctgaagctggtggtggagaccctgatcagcagcctgaagcccatcggcaacatcgtgctgatctgctgcgccttcttcatcatcttcggcatcctgggcgtgcagctgttcaagggcaagttctaccactgcctgggcgtggacaccagaaacatcaccaacagaagcgactgcatggccgccaactacagatgggtgcaccacaagtacaacttcgacaacctgggccaggccctgatgagcctgttcgtgctggccagcaaggacggctgggtgaacatcatgtacaacggcctggacgccgtggccgtggaccagcagcccgtgaccaaccacaacccctggatgctgctgtacttcatcagcttcctgctgatcgtgagcttcttcgtgctgaacatgttcgtgggcgtggtggtggagaacttccacaagtgcagacagcaccaggaggccgaggaggccagaagaagagaggagaagagactgagaagactggagaagaagagaagaaaggcccagagactgccctactacgccacctactgccacaccagactgctgatccacagcatgtgcaccagccactacctggacatcttcatcaccttcatcatctgcctgaacgtggtgaccatgagcctggagcactacaaccagcccaccagcctggagaccgccctgaagtactgcaactacatgttcaccaccgtgttcgtgctggaggccgtgctgaagctggtggccttcggcctgagaagattcttcaaggacagatggaaccagctggacctggccatcgtgctgctgagcgtgatgggcatcaccctggaggagatcgagatcaacgccgccctgcccatcaaccccaccatcatcagaatcatgagagtgctgagaatcgccagagtgctgaagctgctgaagatggccaccggcatgagagccctgctggacaccgtggtgcaggccctgccccaggtgggcaacctgggcctgctgttcatgctgctgttcttcatctacgccgccctgggcgtggagctgttcggcaagctggtgtgcaacgacgagaacccctgcgagggcatgagcagacacgccaccttcgagaacttcggcatggccttcctgaccctgttccaggtgagcaccggcgacaactggaacggcatcatgaaggacaccctgagagactgcacccacgacgagagaagctgcctgagcagcctgcagttcgtgagccccctgtacttcgtgagcttcgtgctgaccgcccagttcgtgctgatcaacgtggtggtggccgtgctgatgaagcacctggacgacagcaacaaggaggcccaggaggacgccgagatggacgccgagctggagctggagatggcccacggcctgggccccggccccagactgcccaccggcagccccggcgcccccggcagaggccccggcggcgccggcggcggcggcgacaccgagggcggcctgtgcagaagatgctacagccccgcccaggagaacctgtggctggacagcgtgagcctgatcatcaaggacagcctggagggcgagctgaccatcatcgacaacctgagcggcagcatcttccaccactacagcagccccgccggctgcaagaagtgccaccacgacaagcaggaggtgcagctggccgagaccgaggccttcagcctgaacagcgacagaagcagcagcatcctgctgggcgacgacctgagcctggaggaccccaccgcctgcccccccggcagaaaggacagcaagggcgagctggacccccccgagcccatgagagtgggcgacctgggcgagtgcttcttccccctgagcagcaccgccgtgagccccgaccccgagaacttcctgtgcgagatggaggagatccccttcaaccccgtgagaagctggctgaagcacgacagcagccaggccccccccagccccttcagccccgacgccagcagccccctgctgcccatgcccgccgagttcttccaccccgccgtgagcgccagccagaagggccccgagaagggcaccggcaccggcaccctgcccaagatcgccctgcagggcagctgggccagcctgagaagccccagagtgaactgcaccctgctgagacaggccaccggcagcgacaccagcctggacgccagccccagcagcagcgccggcagcctgcagaccaccctggaggacagcctgaccctgagcgacagccccagaagagccctgggcccccccgcccccgcccccggccccagagccggcctgagccccgccgccagaagaagactgagcctgagaggcagaggcctgttcagcctgagaggcctgagagcccaccagagaagccacagcagcggcggcagcaccagccccggctgcacccaccacgacagcatggaccccagcgacgaggagggcagaggcggcgccggcggcggcggcgccggcagcgagcacagcgagaccctgagcagcctgagcctgaccagcctgttctgcccccccccccccccccccgcccccggcctgacccccgccagaaagttcagcagcaccagcagcctggccgcccccggcagaccccacgccgccgccctggcccacggcctggccagaagccccagctgggccgccgacagaagcaaggacccccccggcagagcccccctgcccatgggcctgggccccctggccccccccccccagcccctgcccggcgagctggagcccggcgacgccgccagcaagagaaagagatag

SEQ ID NO: 207478 - protein, 2353 aa, Artificial Sequence
  derived and/or modified sequence
MTEGARAADEVRVPLGAPPPGPAALVGASPESPGAPGREAERGSELGVSPSESPAAERGAELGADEEQRVPYPALAATVFFCLGQTTRPRSWCLRLVCNPWFEHVSMLVIMLNCVTLGMFRPCEDVECGSERCNILEAFDAFIFAFFAVEMVIKMVALGLFGQKCYLGDTWNRLDFFIVVAGMMEYSLDGHNVSLSAIRTVRVLRPLRAINRVPSMRILVTLLLDTLPMLGNVLLLCFFVFFIFGIVGVQLWAGLLRNRCFLDSAFVRNNNLTFLRPYYQTEEGEENPFICSSRRDNGMQKCSHIPGRRELRMPCTLGWEAYTQPQAEGVGAARNACINWNQYYNVCRSGDSNPHNGAINFDNIGYAWIAIFQVITLEGWVDIMYYVMDAHSFYNFIYFILLIIVGSFFMINLCLVVIATQFSETKQRESQLMREQRARHLSNDSTLASFSEPGSCYEELLKYVGHIFRKVKRRSLRLYARWQSRWRKKVDPSAVQGQGPGHRQRRAGRHTASVHHLVYHHHHHHHHHYHFSHGSPRRPGPEPGACDTRLVRAGAPPSPPSPGRGPPDAESVHSIYHADCHIEGPQERARVAHAAATAAASLRLATGLGTMNYPTILPSGVGSGKGSTSPGPKGKWAGGPPGTGGHGPLSLNSPDPYEKIPHVVGEHGLGQAPGHLSGLSVPCPLPSPPAGTLTCELKSCPYCTRALEDPEGELSGSESGDSDGRGVYEFTQDVRHGDRWDPTRPPRATDTPGPGPGSPQRRAQQRAAPGEPGWMGRLWVTFSGKLRRIVDSKYFSRGIMMAILVNTLSMGVEYHEQPEELTNALEISNIVFTSMFALEMLLKLLACGPLGYIRNPYNIFDGIIVVISVWEIVGQADGGLSVLRTFRLLRVLKLVRFLPALRRQLVVLVKTMDNVATFCTLLMLFIFIFSILGMHLFGCKFSLKTDTGDTVPDRKNFDSLLWAIVTVFQILTQEDWNVVLYNGMASTSSWAALYFVALMTFGNYVLFNLLVAILVEGFQAEGDANRSDTDEDKTSVHFEEDFHKLRELQTTELKMCSLAVTPNGHLEGRGSLSPPLIMCTAATPMPTPKSSPFLDAAPSLPDSRRGSSSSGDPPLGDQKPPASLRSSPCAPWGPSGAWSSRRSSWSSLGRAPSLKRRGQCGERESLLSGEGKGSTDDEAEDGRAAPGPRATPLRRAESLDPRPLRPAALPPTKCRDRDGQVVALPSDFFLRIDSHREDAAELDDDSEDSCCLRLHKVLEPYKPQWCRSREAWALYLFSPQNRFRVSCQKVITHKMFDHVVLVFIFLNCVTIALERPDIDPGSTERVFLSVSNYIFTAIFVAEMMVKVVALGLLSGEHAYLQSSWNLLDGLLVLVSLVDIVVAMASAGGAKILGVLRVLRLLRTLRPLRVISRAPGLKLVVETLISSLRPIGNIVLICCAFFIIFGILGVQLFKGKFYYCEGPDTRNISTKAQCRAAHYRWVRRKYNFDNLGQALMSLFVLSSKDGWVNIMYDGLDAVGVDQQPVQNHNPWMLLYFISFLLIVSFFVLNMFVGVVVENFHKCRQHQEAEEARRREEKRLRRLERRRRSTFPSPEAQRRPYYADYSPTRRSIHSLCTSHYLDLFITFIICVNVITMSMEHYNQPKSLDEALKYCNYVFTIVFVFEAALKLVAFGFRRFFKDRWNQLDLAIVLLSLMGITLEEIEMSAALPINPTIIRIMRVLRIARVLKLLKMATGMRALLDTVVQALPQVGNLGLLFMLLFFIYAALGVELFGRLECSEDNPCEGLSRHATFSNFGMAFLTLFRVSTGDNWNGIMKDTLRECSREDKHCLSYLPALSPVYFVTFVLVAQFVLVNVVVAVLMKHLEESNKEAREDAELDAEIELEMAQGPGSARRVDADRPPLPQESPGARDAPNLVARKVSVSRMLSLPNDSYMFRPVVPASAPHPRPLQEVEMETYGAGTPLGSVASVHSPPAESCASLQIPLAVSSPARSGEPLHALSPRGTARSPSLSRLLCRQEAVHTDSLEGKIDSPRDTLDPAEPGEKTPVRPVTQGGSLQSPPRSPRPASVRTRKHTFGQRCVSSRPAAPGGEEAEASDPADEEVSHITSSACPWQPTAEPHGPEASPVAGGERDLRRLYSVDAQGFLDKPGRADEQWRPSAELGSGEPGEAKAWGPEAEPALGARRKKKMSPPCISVEPPAEDEGSARPSAAEGGSTTLRRRTPSCEATPHRDSLEPTEGSGAGGDPAAKGERWGQASCRAEHLTVPSFAFEPLDLGVPSGDPFLDGSHSVTPESRASSSGAIVPLEPPESEPPMPVGDPPEKRRGLYLTVPQCPLEKPGSPSATPAPGGGADDPV

SEQ ID NO: 207479 - DNA, 7062 bp, Artificial Sequence
  derived and/or modified sequence
atgaccgagggcgccagggccgctgatgaagtccgtgttcccttaggcgcaccaccgcccggacctgccgccctggtgggagcatctcccgaaagccccggtgccccaggcagagaggctgagagaggcagtgagctcggggtcagtccgagtgagagtcccgcagctgaaaggggagctgaactgggtgccgatgaagaacagcgggtgccctatccagcattggctgctaccgtatttttctgtctcggccagacaactcgaccccggtcatggtgcctacggcttgtgtgcaacccttggttcgagcatgtatctatgctggtgatcatgctcaactgcgtgaccttaggcatgttcaggccttgtgaggatgttgaatgcggcagcgagcggtgtaacatcctggaagcattcgacgctttcatttttgcgttctttgctgtggaaatggtgattaagatggtcgcccttggtttgttcggccagaagtgctatctcggtgatacctggaatagattagatttctttattgtggtagccgggatgatggaatatagcttagacgggcacaatgtatccctgagtgctatcagaacagtgcgcgttctgagacctctgagggccatcaatcgggtcccgtctatgcggattctggtaacacttctgttggacaccttgccaatgctgggtaatgttctactgctctgcttttttgtgttctttatctttgggatcgtgggagtgcagctctgggctggactgctgaggaatagatgctttctagatagcgctttcgtcagaaataacaaccttactttcctccgcccatactaccagacagaggagggggaggaaaatccatttatttgttccagtcggagggataatggtatgcaaaagtgtagccatatcccaggtcgaagggaactccggatgccatgtactctgggctgggaggcttacacacagcctcaggcggaaggggtcggtgctgctagaaatgcctgtataaactggaaccagtattacaatgtttgccggtctggggattctaatcctcacaatggcgcaatcaattttgataacattgggtacgcctggatagccattttccaggttatcactctcgaagggtgggtagacatcatgtactacgttatggacgcacactccttctacaattttatctatttcattcttctgatcattgttgggtcgtttttcatgatcaacttgtgcctggtagtaatagcaactcagttttccgagactaagcaacgcgaatcccagctgatgcgggagcagcgtgccagacacttgagcaacgattctactcttgcctccttttccgagcccggctcatgttacgaagaactgctcaaatatgtgggacacatctttaggaaggttaagcggcggtcgctgcgcctgtatgcaaggtggcagtctcggtggaggaagaaagtggaccccagtgcagttcagggacaggggcccggccacaggcagagacgcgcggggcgccacaccgcatcagtgcaccatctggtataccatcatcaccatcaccaccatcaccattaccattttagccacggaagcccgcgcagacctggaccagagcccggcgcatgcgacacaaggcttgtgcgtgccggagcgcctccctcccctccttcccccggacgcgggccacctgacgcagaatctgtgcattcaatctaccacgcggattgtcacatcgaggggccacaggaaagagccagagtggctcacgctgcagccaccgcagcagcctcccttagattggcaactggcctgggcactatgaactaccctaccatactcccttcgggggttgggtccgggaaaggcagtaccagcccaggccctaaaggcaagtgggccggtggcccgcctggtacaggcgggcacggacctctttcgcttaactctccggatccctatgagaaaattccccacgtggtcggagagcacgggctaggccaagcccctgggcacctgtcgggtctaagtgtgccatgcccactgcccagccctccagcaggtactttaacatgcgaattaaaatcttgtccttactgtacgcgtgcgcttgaggaccccgagggggaactgtccggatccgagtccggcgactcggatgggcggggcgtgtacgagttcactcaggacgttaggcatggtgatcggtgggaccctacccggccaccgagagccaccgacaccccgggtcccggccctgggtcacctcagaggagggctcaacagagagcggctcctggcgaacctggatggatgggtcgcttgtgggttaccttcagtggcaaactgagaaggatagtggactctaagtacttctctcgggggatcatgatggcgatccttgtcaacacactgtctatgggggtagagtaccacgagcagcctgaggaacttacaaatgccctcgaaataagtaacattgtttttacctctatgttcgctcttgagatgttattaaaactcctggcctgtggccctctgggctacatacgtaacccctataacatttttgacgggataatcgtagtcatcagcgtatgggaaattgtcggccaggcagacggcggtctgtctgtccttcgcacttttaggctgcttagggtgcttaagcttgtccgctttctgcccgccttacgacgccagctggtggtgctagtgaagaccatggacaatgtcgctacattctgcacacttctgatgctgttcatcttcatcttttcaattctgggcatgcatctatttggctgtaaattttctctcaagacagatacaggcgacactgttcccgacaggaagaatttcgattcacttctgtgggctatcgtaactgtattccaaatcctgacccaggaagattggaacgtggtgctgtataatggcatggcaagtacgtcaagctgggcagccctctatttcgtagccctcatgaccttcgggaattatgtgttatttaatctgctggtggcaatcctcgtggaaggattccaggcagagggggacgccaaccgctctgacacagacgaagataaaacaagtgttcattttgaggaagattttcataagctgagggaactgcaaacaactgagttgaagatgtgtagccttgccgtcactcccaatggccaccttgagggcagagggtccctgagtcctcctttaattatgtgcaccgccgccacccctatgcctacgccaaagtccagcccgttcttggacgccgccccttccctgcccgacagcagacgagggtcgagtagcagtggcgatccacccctgggggatcagaaaccacccgcttctctgcgctcttccccctgtgccccctggggcccctctggagcatggagctcccgtcgcagcagctggtcatccctgggaagggcgccttccttgaaaagaagaggccagtgcggggaacgggaatctttactgtccggggagggaaaaggatcaactgacgacgaggccgaagacggcagagccgctcccggccccagggccaccccactgcgcagagccgaatccctggacccacggccccttcgacctgcggcgctgccccctacaaagtgcagggacagggacggccaagtggtggccctgcctagcgacttttttctgaggatcgatagtcatcgagaggatgctgcagagctcgatgatgactctgaggatagctgctgcctcaggctccataaagtcctcgagccttataaaccccagtggtgtcggtcgcgggaggcctgggccctctacctgttttcgccccagaacaggttccgcgtctcatgtcaaaaggtgattacccacaaaatgtttgaccatgtcgtgttggtgtttatctttctgaattgtgttacaatcgcactcgaacgcccagacatcgaccccggctccaccgaacgagtatttctctccgtgtccaattatatttttactgccatttttgtggctgagatgatggtcaaggtcgttgctttaggactgttgtccggcgagcacgcttatctgcaatcatcctggaacttgctcgacggactgcttgtactggtcagcctggtggacattgtcgtggccatggcatctgctgggggagcaaaaatacttggcgtgttgcgggtattgcgattgctcaggacattgcgacccctgagagtcattagtcgggcccccggcttgaagcttgtggtggagaccctgatctctagcttgcggcctatcgggaatattgtcttgatctgctgtgccttttttatcatctttggaatactgggagtacagctgtttaaaggtaaattttattattgcgaaggaccagacactaggaatatatctactaaggcacagtgcagagcagcccattatcggtgggtgagaagaaaatacaactttgacaacctcggtcaagccctgatgagtctgttcgttctaagttctaaggatggctgggtgaacatcatgtatgatggcttggatgccgtcggcgttgaccagcagccagtacaaaatcacaacccgtggatgctgctgtatttcataagctttttgctgatagtctcattttttgtgcttaacatgtttgttggcgttgtggtggagaatttccacaagtgccggcaacaccaggaggccgaggaggccagacggcgggaggagaaacgtctgaggcgtctggaaaggcggagacgaagcaccttcccaagtccggaagcccagaggaggccctattacgcggactattcccctaccaggcgcagtatacattcactgtgcactagccactatctggacctctttatcactttcataatttgtgtgaacgtgattacaatgtccatggagcattacaaccagcctaaatccctggacgaggcccttaagtattgcaactatgtctttacaatcgtgtttgtttttgaggccgcactgaagttggttgcattcggattccgcaggtttttcaaggatcgatggaatcagctcgacctggcaatcgtgctcctgagcttgatgggcatcaccctggaggagatcgaaatgtctgccgctctgcctatcaaccccactataatccgaatcatgagagtcctgcggatcgctcgcgtcctgaaactgctgaagatggcaacaggaatgagggccctcctggacacagtggtgcaggcgttacctcaggtaggcaacctgggcttgctgttcatgctgctcttcttcatttacgctgctctaggagtggagctgttcggaagattagagtgctctgaagataacccctgtgaaggtctttctcgccacgcaaccttttctaactttggaatggccttcctgacacttttcagggtctcgactggagacaactggaatggcattatgaaggacacgctacgagaatgctccagagaagacaaacactgtctctcttatctgcctgccctctcgccggtgtactttgtgacattcgtgctggttgctcaattcgtgctggtgaatgtggtcgtggcggtcttaatgaaacacctcgaagagtcaaacaaggaagcgagggaggacgctgaactcgacgcagagatcgaactagagatggcccagggtccagggagcgcaagacgggtagatgccgatcgaccccctctcccgcaggaatctccgggggcgcgcgatgctcctaatcttgtggcgcgtaaagtgagcgtttctaggatgctgtctctgcccaatgattcatacatgtttagacccgtcgtgcctgctagcgcccctcatccaagacctttgcaggaagtggaaatggagacttatggtgcaggcactccactaggatcggtggcatctgtgcatagcccccccgccgaatcatgtgctagcctgcaaattcccctggccgtatctagtccggctagaagcggcgagccgctgcatgccctgtcccccagggggactgctcgaagccccagtctatcccggttgctgtgtagacaggaggctgtgcacacagactcattggaggggaagattgatagccccagagacaccctagaccccgctgaaccgggcgagaagacgcctgtaagaccggtaacccagggcgggtctttacagagtccaccccgaagcccccgccccgcttccgtccgcaccagaaagcatacttttggacagcgctgcgtttccagccgtcccgctgcacccggtggcgaagaggctgaggcttctgatccagctgacgaggaggtctctcatattacctcgtctgcttgcccctggcagcctacggccgagccgcacggtcccgaggcatcaccggttgccggcggagaaagggatcttagacggctttatagcgttgacgcccaaggtttcctggataagcccggccgggccgatgaacaatggaggcccagtgcggagttaggcagtggggagccgggagaagccaaagcgtgggggcccgaggcagaaccagctctgggagcgcgccgtaaaaaaaagatgagtccaccctgtataagcgtggaacccccagccgaagacgaaggatccgcacggccttcagctgccgagggaggctcaactacgctcagacgcaggacgccttcgtgtgaagcaactcctcacagagattccctcgagcctaccgagggtagtggcgctggcggtgaccctgccgccaagggtgaacgttggggacaggcctcctgcagggctgagcacctgaccgtcccctcatttgcatttgaacccttggatctcggcgtgcccagcggcgatccattcctcgatggcagccattctgtcacccccgagtcacgcgcaagctccagtggagccatcgtgccactggaaccccccgagagcgagcctcccatgcctgtaggtgatcctccagagaagaggagagggctttacctcaccgtccctcaatgcccgcttgagaaaccaggcagccctagcgccacaccagctccgggtggcggagctgacgacccggtgtag

SEQ ID NO: 207480 - DNA, 7062 bp, Artificial Sequence
  derived and/or modified sequence
atgacagagggcgcccgggcagcagatgaggtgcgggtgcccctgggcgcccctcctcctggccctgctgccctggtgggcgccagccctgagagccctggggcccctggccgggaggccgagcggggcagcgagctgggcgtgagccccagcgagagccctgctgctgagagaggagctgagctgggcgcagatgaggagcagagggtgccctacccagccctggccgccaccgtcttcttctgcctgggccagaccacccggcccaggtcctggtgcctgcggctggtgtgcaacccctggtttgagcacgtgtccatgctggtgatcatgctgaactgtgtgaccctgggcatgttccggccctgtgaagatgtggagtgtggcagcgagcgctgcaacatcctggaggcctttgatgccttcatctttgccttctttgctgtggagatggtgatcaagatggtggccctgggcctgtttggccagaagtgctacctgggggacacctggaaccggctggacttcttcatcgtggtggccggcatgatggagtacagcctggatggccacaacgtgtccctgagcgccatcagaacagtgcgggtgctgcggcccctgcgggccatcaacagagtgcccagcatgaggatcctggtgaccctgctgctggacaccctgcccatgctgggcaatgtgctgctgctgtgcttctttgtgttcttcatcttcggcatcgtgggcgtgcagctgtgggccggcctgctgaggaaccgctgcttcctggacagcgcctttgtgaggaacaacaacctgaccttcctgcggccctactaccagacagaggagggggaggagaaccccttcatctgcagcagccggcgggacaatggcatgcagaagtgcagccacatccctggccggcgggagctgaggatgccctgcaccctgggctgggaggcctacacccagccccaggccgagggcgtgggcgccgccagaaatgcctgcatcaactggaaccagtactacaacgtgtgccgcagcggggacagcaacccccacaacggggccatcaactttgacaacatcggctacgcctggatcgccatcttccaggtgatcaccctggagggctgggtggacatcatgtactacgtgatggatgcccacagcttctacaacttcatctacttcatcctgctgatcatcgtgggcagcttcttcatgatcaacctgtgcctggtggtgattgccacccagttcagcgagaccaagcagcgggagagccagctgatgagggagcagagggcccggcacctgagcaatgacagcaccctggccagcttcagcgagcccggcagctgctatgaggagctgctgaagtatgtgggccacatcttcaggaaggtgaagagaagaagcctgcggctgtatgcccgctggcagagccgctggaggaagaaggtggaccccagcgctgtgcagggccagggccctggccaccggcagaggagagctggccgccacacagcctctgtgcaccacctggtgtaccaccaccaccaccaccaccaccaccactaccacttcagccacggcagccccaggaggcctggccctgagcccggggcctgtgacacccggctggtgcgggccggggccccacccagcccccccagccctggccggggccccccagatgctgagagcgtgcacagcatctaccacgccgactgccacatcgagggcccccaggagcgggcccgggtggcccacgccgccgccacagctgctgccagcctgcggctggccaccggcctgggcaccatgaactaccccaccatcctgcccagcggcgtgggcagcggcaagggcagcaccagccctggccccaagggcaagtgggccggcggccccccaggcactggaggccacggccccctgagcctgaacagcccagacccctatgagaagatcccccacgtggtgggggagcacggcctgggccaggcccctggccacctgagcggcctgtctgtgccctgccccctgcccagccccccagctggcaccctgacctgtgagctgaagagctgcccctactgcacccgggccctggaggaccctgagggggagctgagcggcagcgagagcggggacagtgatggccggggcgtgtatgagttcacccaggatgtgcgccacggggaccgctgggaccccaccaggcctccccgggccacagacaccccaggccctggccctggcagcccccagaggcgggcccagcagagagctgcccctggagagcccggctggatgggccgcctgtgggtgaccttcagcggcaagctgcggagaattgtggacagcaagtacttcagccggggcatcatgatggccatcctggtgaacaccctgtccatgggcgtggagtaccacgagcagcctgaggagctgaccaatgccctggagatcagcaacatcgtgttcacctccatgtttgccctggagatgctgctgaagctgctggcctgtggccccctgggctacatccggaacccctacaacatctttgatggcatcatcgtggtgatctctgtgtgggagatcgtgggccaggctgatggcggcctgtctgtgctgcggaccttccggctgctgcgggtgctgaagctggtgcgcttcctgcctgccctgcggcggcagctggtggtgctggtgaagaccatggacaacgtggccaccttctgcaccctgctgatgctgttcatcttcatcttcagcatcctgggcatgcacctgtttggctgcaagttcagcctgaagacagacacaggagacacagtgcctgacaggaagaactttgacagcctgctgtgggccatcgtgaccgtcttccagatcctgacccaggaggactggaatgtggtgctgtacaacggcatggccagcaccagctcctgggccgccctgtactttgtggccctgatgacctttggaaactacgtgctcttcaacctgctggtggccatcctggtggagggcttccaggccgagggagatgccaacagaagtgacacagatgaggacaagacctctgtgcactttgaggaggacttccacaagctgcgggagctgcagaccacagagctgaagatgtgcagcctggccgtgaccccaaatggccacctggagggccggggcagcctgagccccccactcatcatgtgcacagctgccacccccatgcccacccccaagagcagccccttcctggatgctgcccccagcctgcctgacagccggcggggcagcagcagcagcggggacccccccctgggggaccagaagcccccagccagcctgcggagcagcccctgtgccccctggggccccagcggggcctggagcagcagaagaagctcctggagcagcctgggccgggcccccagcctgaagaggcggggccagtgtggggagcgggagagcctgctgagcggggagggcaagggcagcacagatgatgaagcagaagatggccgggccgcccctggcccccgggccacccccctgcggcgggcagagagcctggacccccggcccctgcggcctgctgccctgccccccaccaagtgccgggacagagatggccaggtggtggccctgcccagcgacttcttcctgagaattgacagccacagagaagatgctgctgagctggatgatgacagcgaggacagctgctgcctgcggctgcacaaggtgctggagccctacaagccccagtggtgccgcagccgggaggcctgggccctgtacctgttcagcccccagaaccgcttccgggtgtcctgccagaaggtgatcacccacaagatgtttgaccacgtggtgctggtgttcatcttcctgaactgtgtgaccatcgccctggagaggccagacatcgaccccggcagcacagagagggtcttcctgtctgtgagcaactacatcttcaccgccatctttgtggccgagatgatggtgaaggtggtggccctgggcctgctgagcggggagcacgcctacctgcagagctcctggaacctgctggatggcctgctggtgctggtgtccctggtggacatcgtggtggccatggccagcgctgggggcgccaagatcctgggcgtgctgcgggtgctgcggctgctgcggaccctgcggcccctgcgggtcatcagccgggcccctggcctgaagctggtggtggagaccctcatcagcagcctgcggcccatcggcaacatcgtgctgatctgctgtgccttcttcatcatcttcggcatcctgggcgtgcagctgttcaagggcaagttctactactgtgagggccctgacaccaggaacatcagcaccaaggcccagtgcagagctgcccactaccgctgggtgcggaggaagtacaactttgacaacctgggccaggccctgatgagcctgtttgtgctgagcagcaaggatggctgggtgaacatcatgtatgatggcctggatgctgtgggcgtggaccagcagcctgtgcagaaccacaacccctggatgctgctgtacttcatctccttcctgctgattgtgtccttctttgtgctgaacatgtttgtgggcgtggtggtggagaacttccacaagtgccggcagcaccaggaggccgaggaggcccggcggcgggaggagaagaggctgcggcggctggagaggagaagaagaagcaccttccccagccctgaggcccagaggcggccctactatgctgactacagccccaccaggaggagcatccacagcctgtgcaccagccactacctggacctcttcatcaccttcatcatctgtgtgaatgtcatcaccatgtccatggagcactacaaccagcccaagagcctggatgaggccctgaagtactgcaactacgtgttcaccatcgtgtttgtgtttgaggccgccctgaagctggtggccttcggcttccgccgcttcttcaaggaccgctggaaccagctggacctggccatcgtgctgctgagcctgatgggcatcaccctggaggagattgagatgtctgctgccctgcccatcaaccccaccatcatccgcatcatgagggtgctgcgcatcgcccgggtgctgaagctgctgaagatggccaccggcatgagggccctgctggacacagtggtgcaggccctgccccaggtgggcaacctgggcctgctcttcatgctgctcttcttcatctatgctgccctgggcgtggagctgtttggccgcctggagtgcagcgaggacaacccctgtgagggcctgagcagacatgccaccttcagcaactttggcatggccttcctgaccctcttccgggtgtccactggagacaactggaatggcatcatgaaggacaccctgcgggagtgcagccgggaggacaagcactgcctgagctacctgcctgccctgagccctgtgtactttgtgacctttgtgctggtggcccagtttgtgctggtgaatgtggtggtggccgtgctgatgaagcacctggaggagagcaacaaggaggcccgggaggatgctgagctggatgctgagattgagctggagatggcccagggccctggcagcgcccggcgggtggatgctgacaggcctcccctgccccaggagagccctggggccagagatgcccccaacctggtggccaggaaggtgtctgtgtccaggatgctgagcctgcccaatgacagctacatgttccggcctgtggtgcctgccagcgccccccacccccggcccctgcaggaggtggagatggagacctacggggccggcacccccctgggctctgtggcctctgtgcacagccccccagctgagagctgtgccagcctgcagatccccctggccgtgagcagccctgcccggtctggagagcccctgcacgccctgagcccccggggcacagcccggagccccagcctgagccggctgctgtgccggcaggaggccgtgcacacagacagcctggagggcaagattgacagcccccgggacaccctggaccctgctgagcccggggagaagacccctgtgcggcctgtgacccagggcggcagcctgcagagcccccccaggagccccaggcctgcctctgtgaggaccaggaagcacaccttcggccagagatgtgtgagcagcaggcctgctgcccctggaggagaggaggccgaggccagtgaccctgcagatgaggaggtgagccacatcaccagcagcgcctgcccctggcagcccacagctgagccccacggccctgaggccagccctgtggccggcggggagcgggacctgcggcggctgtacagcgtggatgcccagggcttcctggacaagccaggccgggcagatgagcagtggaggccttctgctgagctgggcagcggggagcctggagaggccaaggcctggggccctgaggccgagcccgccctgggcgcccggaggaagaagaagatgagccccccctgcatctctgtggagcccccagcagaagatgagggcagcgcccggcccagcgctgctgagggcggcagcaccaccctgcggcggaggacccccagctgtgaggccaccccccaccgggacagcctggagcccacagagggcagcggggccggcggggaccctgctgccaagggggagcgctggggccaggccagctgcagagctgagcacctgactgtgcccagctttgcctttgagcccctggacctgggcgtgcccagcggggaccccttcctggatggcagccacagcgtgaccccagagagccgggccagcagcagcggggccatcgtgcccctggagcccccagagagcgagccccccatgcctgtgggggaccccccagagaagagaagaggcctgtacctgactgtgccccagtgccccctggagaagccaggcagccccagcgccaccccagcccctgggggcggcgcagatgatcctgtgtag

SEQ ID NO: 207481 - DNA, 7062 bp, Artificial Sequence
  derived and/or modified sequence
atgaccgagggcgcccgggccgccgacgaggtgcgggtgcccctgggagccccccccccaggtccagccgccctggtgggggcttctccagaatccccgggcgcacccgggcgtgaggcggagcgtggcagtgagctgggggtgtctcctagcgagagtcccgcagccgaacgcggtgcagaactgggcgcagacgaggaacagagagttccgtatcccgctttagctgcaacggtctttttttgcctgggccagaccacaagaccaaggagctggtgcttacggcttgtgtgtaacccctggttcgagcacgtaagtatgctcgtcatcatgttgaactgtgtaactctgggaatgtttaggccttgtgaggacgtggagtgcggctcggaacgatgcaacatcttggaggcattcgatgcctttatcttcgccttttttgcagttgagatggtcataaaaatggttgctctgggcctgtttggacaaaaatgctacctgggcgacacctggaacagactagactttttcattgttgtggctggcatgatggagtactctctcgatgggcacaacgtcagtctcagcgcgattaggactgtgcgagtcctgcggcccctgcgggccattaatcgagtcccttctatgcggatcctggtgaccttgttactggacaccctgcctatgcttggtaacgttcttctgctatgtttttttgtgtttttcatctttggcattgtaggggtgcagctctgggcaggcctgctgcggaatcggtgcttcttggattctgccttcgtccgcaataataaccttacatttcttcggccctactatcagactgaagagggagaagaaaacccctttatctgctcttctcggagggacaacggaatgcaaaagtgtagccacattcctggaagaagggagctacggatgccgtgcacattaggatgggaagcctacacccagccacaggcagaaggggtgggggccgcacgcaacgcgtgcattaactggaaccagtattacaacgtgtgtagaagtggcgactccaacccccacaacggagctataaacttcgacaatataggatacgcgtggatcgcgatctttcaggtgatcacactcgagggttgggtcgatatcatgtactatgtcatggatgcccattctttttacaattttatctacttcatcctgctaattatagttggatctttcttcatgatcaacctctgtctcgtagtcattgcgacacaattcagcgaaacaaaacagcgggagtcgcaactgatgcgggagcaacgggcgcgccacctgtcaaatgactctacgctggcaagcttcagtgaacccggctcctgctacgaagaacttctgaagtacgtgggtcatatatttaggaaggtgaaaagacggtcattaagattgtacgcccggtggcagtccagatggcggaagaaggtggatccttccgccgtccaggggcaaggacctggacacagacaacgccgggctggtagacacacggccagcgttcaccaccttgtataccaccatcaccatcatcaccatcatcattaccacttttcacacggctcacctaggagacctgggcccgagccaggtgcctgtgatacccgactcgtgagagccggagccccaccaagcccccccagtcctggacgcgggccaccagatgccgagagcgtgcactctatttaccatgctgattgtcatattgaggggccacaagagcgcgcccgagtggctcatgcagctgccacggctgctgcgtccctcagattggccactggcttagggacaatgaactaccctacgatcttgccaagtggggtggggtcgggaaaaggtagcacatccccaggtccaaaggggaagtgggctgggggtcctcctggcacaggcggccacggaccgttgagcctgaattcgccagacccatatgaaaagatcccgcatgtagttggcgaacacgggcttgggcaggcgcctgggcacctatcaggactttcagtcccatgcccactgcccagtccacctgccgggactctcacatgcgaattgaagagttgtccatattgcacacgagccctcgaggaccccgagggcgagctgagcggaagtgagagcggggactcagacggccggggcgtttacgagtttacgcaggatgttagacatggagaccggtgggatcccacacgccctccccgcgccactgataccccaggacctggtcctggttcccctcaacgtcgtgcccaacagcgcgccgcaccaggagaacccggctggatggggagattatgggtgacgttttccggcaagttgagacggattgtggattccaaatattttagccgagggatcatgatggccatacttgttaataccctatccatgggcgtcgaataccacgaacagcctgaggaactgactaatgctcttgaaatctccaacattgtctttacttcgatgtttgctctggaaatgttgctcaagctcctggcctgcggcccattaggctatataaggaatccgtacaatatttttgatgggattattgtcgttattagtgtgtgggagattgtgggccaggctgacgggggcctctccgtccttcgcaccttcaggctccttagagtgctcaaactggtgaggttcctgcccgcccttaggaggcaactcgtggttctggtcaagaccatggataacgtcgcgaccttttgcaccctactcatgttattcatcttcatcttttcaatccttggcatgcatctgtttggctgtaaattttctctgaagaccgacacaggagataccgtgccagatagaaaaaattttgattccctgctttgggccatcgtcaccgtttttcagatcctgactcaggaggactggaacgtcgttctgtacaatggaatggcctctacatccagttgggctgctctgtatttcgttgccctgatgaccttcggcaattatgtgctctttaacctgttggtcgccatcctggtggagggttttcaagcagaaggagatgcaaatcggtcagataccgacgaggacaagacttctgtccacttcgaagaggattttcataagctgagggaactgcagaccacagaactcaaaatgtgttctctcgctgttactcctaacggtcacctggaaggaaggggaagccttagccccccgttgatcatgtgtaccgcagctactcccatgcccacgcccaagagctcgccattcctggacgctgcaccgagccttcccgactccagaagaggtagctcctcctcgggtgacccacccctgggtgaccagaagcccccagcaagcctccgatcctccccgtgtgcaccgtggggtcccagcggggcatggagcagcagacggtcctcctggtcctccctgggaagagcgccatctctgaagagaagaggccagtgtggggagagggaatcactcctgtcaggggagggcaagggctcaactgacgacgaagccgaggatggtcgcgcagcccctggaccccgggccactcctctgagacgagccgagtctctagatccgcgaccccttagaccagccgccctgccacctacgaagtgcagagatcgggacggccaggtggtcgcgctgccctccgatttttttctcaggattgattctcaccgtgaggacgctgctgaactggacgacgatagcgaagactcctgctgtctccggctacacaaggtactggaaccatataaaccgcagtggtgccgttctcgcgaggcgtgggccctgtatctcttctccccccaaaatagatttagagtttcttgccagaaggtgattacccataagatgtttgatcacgtggtcctggtgtttatcttccttaactgcgtcaccattgcacttgagcgacccgatatcgacccgggaagtactgaaagagtttttctctctgtcagcaattatatattcactgccattttcgttgcagaaatgatggtgaaagtggtagccctgggacttttatcaggagagcatgcctatctccagtcctcatggaacctgctggacggcctgctggtcctggtgtctttggtggatattgtcgtcgcaatggcttccgcaggaggagccaaaatacttggcgtgctgagagttttgcgattattgcgtactctcaggcctctgcgagtaatctctagggcgcctggcctgaagctggtggtggagacacttattagctctttgaggcccatcggcaacattgtgctcatatgctgtgccttctttatcatttttgggattctgggtgtgcagttgttcaaaggtaagttttactactgcgaggggccagatacacggaacatctcaacgaaggcccagtgcagagcggcccattaccggtgggtccggaggaagtataacttcgataatttaggacaagcccttatgtccttgtttgtgttgtcctcgaaagacggttgggtgaatatcatgtatgatggcctggacgcagtgggcgtggaccagcagcccgttcagaaccacaacccgtggatgcttctctactttatcagcttcctgctgattgtgtccttcttcgtccttaatatgttcgtgggggtggttgtggaaaatttccacaaatgtaggcagcatcaggaggccgaggaagcacgccgacgagaggagaaacgactgcggcgactcgagagacgaagaagatctacattcccctcgccagaggcacagcgccgcccctattacgcagattattctccaacaaggaggtcaatccattccctgtgcacctcgcactacctggacctgtttataacttttatcatctgcgtgaacgttattactatgtctatggagcactacaaccagcctaagagcttagatgaagccctaaaatattgcaactacgtctttacgatagtttttgtgttcgaggccgcacttaaactggtggccttcgggttcagacggttttttaaggaccgctggaatcagctagacctggcgatagtgttgttgagccttatgggcatcacattagaggagatcgagatgtccgccgccttaccgattaatcccactattatccgaattatgcgagtgctgcggatcgctcgtgtcctgaagctactcaagatggccacaggcatgcgcgcattgctggacaccgttgtgcaggcacttccgcaggtgggcaacctcggcctgttgtttatgctcctgttttttatatatgccgccctgggggtggagttgttcggaaggctagaatgctcggaagacaacccctgtgagggtcttagccgccacgccacgtttagtaacttcggaatggcctttttaactctgttccgcgtgtctacgggggataactggaacggaatcatgaaagacactttacgagaatgtagcagggaagacaagcactgtctctcctacctgccagcactttcccccgtctatttcgtgaccttcgtgctggtggctcagtttgttctggttaacgtggtggtagcggttctcatgaaacatctagaagagtcaaacaaagaagcccgggaagatgctgaactagacgccgagattgaactggaaatggcacaggggcccggctccgcacggcgtgtggacgcagataggccaccactgcctcaggagtctccaggtgccagggatgcccccaacttagtggccagaaaggtgagtgtgtcacgaatgctgtctcttcctaacgacagctatatgtttcggcccgttgtgcccgcatctgcaccgcatccacgccctctccaggaagtggagatggaaacatacggtgcaggcacacctctcggctccgttgcctcagtgcattcccctcccgctgagtcttgtgcctccctgcaaattcccttggccgtttcatcacccgcaagatctggggaacctctccacgctctctccccgagagggactgctcgaagcccctccctctctcgcctgctgtgcagacaggaagccgtccacaccgactctctcgaaggaaagatcgattcacctcgcgataccctggatcctgccgagccaggggagaaaacccctgtgcgccccgtgacacaaggtggatctctccagagccccccaagaagcccacgtcctgcctctgtccggacaaggaagcacacatttggacagaggtgcgtgagttcccggccagcagccccggggggcgaggaagccgaggcgtccgacccggccgacgaggaggtaagtcacatcaccagctctgcctgtccctggcagcccacagccgaaccacatgggcctgaggcttcacctgttgctgggggagaaagagacttacggaggctttacagcgtggacgcacaaggtttccttgacaagcctgggagggcagacgaacagtggagaccatccgcagagctgggatcgggcgagcccggcgaagcgaaggcttgggggcctgaagccgaacccgcccttggagcacgacggaagaaaaagatgtcccctccctgcatttccgtagagccccccgccgaggatgagggctccgctaggccttccgccgctgagggaggatcaaccactctaagacgccggaccccatcatgcgaggctactccacatcgcgatagtctagagcccacagagggttctggggcaggcggcgatcctgctgcaaaaggagagcggtggggccaagcttcttgtcgagccgaacacttgacggtcccctcttttgcgtttgaacctttggacctgggcgtcccatctggggaccctttcctagatggcagtcacagtgtcaccccagaatccagggccagctcttctggcgccatcgtcccattagagccccccgaaagcgagcctccaatgcccgttggagatccccccgagaaaagacggggcttgtacctgactgtaccacaatgtccactggagaaacccggctctccttcagctaccccagctcccggaggaggggccgacgaccctgtctag

SEQ ID NO: 207482 - DNA, 7061 bp, Artificial Sequence
  derived and/or modified sequence
atgactgagggtgcacgagccgctgacgaggttcgggtaccacttggtgcacctccaccaggcccagccgctcttgtgggcgcatcccctgaatccccaggcgcaccaggcagagaagccgagcgcggttctgaactgggagtttcccctagcgagtcgcctgccgcagaacgcggagcagagctgggtgcagatgaggaacagcgtgttccatatcccgcacttgccgctacagtctttttctgtttgggtcagacgacacggccacggtcttggtgcctgcggctcgtctgcaacccctggttcgagcacgtgagcatgctcgtgatcatgctcaactgcgtgactctggggatgtttaggccttgtgaggatgtggagtgcggcagtgagagatgtaatattttggaagcatttgacgcttttattttcgcattttttgctgtggagatggtgatcaaaatggttgcattaggcctgtttggccaaaagtgctaccttggcgatacctggaaccgcctggatttttttatagtcgttgccggaatgatggagtactctttggacggacataacgtgagcttatccgcgatccgtaccgtgcgagtgctgcgacctctgagggccatcaaccgggtaccatccatgcgcatcctcgtgacactgctgttggacacactgcccatgctcgggaacgtgcttctgctgtgcttcttcgtgttcttcatcttcggcatagtaggcgtccagttgtgggctgggttactcaggaatcgatgttttctcgactcagcttttgtgaggaataataatttaacatttctgaggccatattatcaaacagaggagggcgaagagaatccctttatctgcagcagccgaagggacaacggcatgcagaaatgcagccatataccgggtaggcgcgaactccgtatgccgtgcactctgggctgggaggcctacacccagccacaggcagaaggggttggagcagccaggaatgcctgcatcaactggaatcagtactataatgtctgccgttccggagattcgaacccacataatggggcaattaacttcgacaacatcggctatgcttggattgccatctttcaagtgatcacacttgaaggatgggtggatatcatgtactacgtgatggatgctcatagtttctacaactttatttacttcatcctgctaattattgtcggatcatttttcatgataaatctctgtcttgtggtgatcgcgacccagttttccgagacaaagcagagggaatcccagctcatgagggagcagcgtgcacgtcacctgagtaatgattccaccctagcatcattctctgagccagggagctgctatgaggagctcttgaaatatgtaggacacattttccgcaaagtcaagagaagatccttgcgcctttatgcacgctggcaatctcgatggagaaaaaaggttgatccaagtgccgtgcaaggccagggaccaggccatagacagcggagagccggtcgacacacagcttctgtacatcacctcgtgtaccaccatcatcaccaccaccatcatcactatcactttagtcacggcagtcctcgaaggccgggacctgagccgggagcctgcgatactcggttagtgcgcgcaggagctccacctagcccgccaagccctggccgtggtcccccagatgctgagagcgtccatagcatttaccatgctgattgccatatcgaggggccacaggaacgggctcgggttgcacatgcagcagccacggcagctgcctccctccgcctggccaccgggttggggacgatgaactacccaacaatccttccaagcggggtaggttctgggaaggggtcgacatccccaggtcccaaaggcaaatgggctggagggccaccaggcaccggtggccatgggcctttgagcctgaatagcccagatccatacgaaaaaattccgcacgttgtgggggaacatggcttagggcaagcccctgggcacctctcaggcctgtcagtgccatgccctcttccatctccgccagccggtacacttacgtgtgaattaaagagttgtccttattgcacaagagcgttggaggatccagaaggtgagctcagtggctctgaatccggcgacagcgatggaagaggagtgtatgagttcacgcaggacgtgcgccatggggacagatgggacccgactaggccgcctagggcgacggatacacctgggcctggccctggcagcccccagcgtcgggctcagcagcgggcagcgccaggtgaaccgggatggatgggcaggctgtgggtgacattcagcggcaaactcagacgcatcgtagattctaaatacttctcacgagggatcatgatggcaatactcgtaaacactctttctatgggcgttgagtaccacgaacaaccggaggaactgacaaatgctctggagatatcgaatattgtgttcacctcgatgtttgctctggagatgttactgaaacttctggcctgcggtccactgggctacatccggaacccctacaatatctttgatgggatcatcgttgttatttcagtttgggagatcgtgggacaggccgacggaggactgtcagtattacggacgtttcggctgctcagagttctgaaactcgtccggtttctccccgcacttcgaagacaactggttgttctggtgaagacgatggataatgtcgcaaccttctgcactctgttgatgctcttcatcttcatattctctatcctgggaatgcacctcttcggttgtaagttctcattgaaaaccgatacaggcgacaccgttccggaccgtaagaattttgatagtcttctgtgggccatcgttactgttttccagatcctgacacaggaggactggaacgtggtgctttataatggtatggcgagtaccagctcttgggccgcactgtattttgtcgccctgatgacttttgggaattatgtactgttcaacctactggttgcaattctggtggagggtttccaggctgaaggggacgcgaaccggagtgataccgacgaggataagacctccgtgcactttgaggaagactttcataagctgagggagctccagacaacagaactgaaaatgtgctcccttgccgtgaccccaaatgggcacttggagggcagaggcagcctatcacccccacttattatgtgtacagcagccactccaatgcccaccccgaaaagctcccccttcctcgacgcagccccatccttgccggattcccgcaggggttcatcatctagcggcgacccacctctgggggaccagaagccccctgcgtctctgaggtctagcccttgtgccccatggggacccagtggagcatggtcaagtcgccgatcgtcctggagctctctgggccgtgccccttccctcaaaagacgcggacagtgtggagaaagggaatccctgctcagcggggaaggaaagggtagtactgatgacgaggctgaagatgggagagctgctccaggcccaagggcaacccccttgcgaagggctgaatccttggatcccaggcccttgagacccgcagcattaccaccaacaaagtgccgggacagagacggccaggtggtagctctgccctctgattttttcctaaggattgacagtcaccgagaagatgctgctgagctggacgacgattccgaggactcatgttgcctgcggctgcacaaggttctggaaccatataagcctcagtggtgcagaagccgggaggcctgggctttatacctgttcagtccacaaaaccgatttagggtcagctgtcaaaaagtgataacgcacaagatgttcgaccacgtcgttttggtctttatcttcctaaattgtgtgacaatcgccctcgagcgtcctgatatagatcccggtagcactgagcgggtgtttttaagtgtgtccaactacatctttaccgctatcttcgtcgctgaaatgatggtcaaagtggtggccttgggacttctttctggtgaacatgcttaccttcagtctagctggaatctgcttgatggcctgctggttctggtttctctggtggatattgttgtcgcgatggcttcagcagggggtgccaagattctcggggtgctcagagttctgcgactgctgcggactcttcgacctttgcgtgtcatttcaagagccccagggctgaaactcgttgtagaaacactcatcagcagcttgaggcctattggaaacatcgtactcatctgttgtgccttctttatcatcttcggcattcttggagtgcaactgtttaagggaaagttctattattgtgagggacctgatactcgaaacatctccactaaagcccagtgcagggccgcacattacaggtgggtccggaggaagtacaattttgataacctaggtcaggcgttaatgagtttattcgtgttaagctccaaggatggctgggttaacataatgtacgacggtctggatgccgtcggtgttgatcagcagccagtgcagaatcataacccttggatgctgctgtatttcatttccttcctcctgatcgtttccttttttgtactcaacatgtttgtcggtgttgtggtggagaatttccataagtgtcgtcaacaccaggaagctgaggaagctagaaggcgcgaagaaaaacgccttcgccgtttggagaggcgtagacgttccacattcccatcacccgaagcccagcgacggccttactacgcggattatagcccaactagacggagtatccacagtttatgcacttcacattatctcgacttgtttataacattcattatctgcgtaaatgtcatcactatgtcgatggagcactacaatcagccgaagtctttagacgaagccctcaagtactgcaattacgtgttcactattgtgtttgtcttcgaggccgctctgaaactcgtcgcctttggatttcgccgttttttcaaagataggtggaatcagctcgacctggcaatcgtgctcctatcgttgatgggcatcacactcgaggagatcgagatgagcgcagctctccctattaatccaacaatcatccggatcatgcgcgtgcttcggatcgcacgtgtccttaagctcctgaagatggctaccggcatgcgcgctctgctggacaccgtcgtgcaggccttgcctcaggtgggaaatcttggactgttgttcatgctgctcttctttatctatgcggcactcggcgtagagctatttggccgactggaatgtagcgaagacaacccatgtgaaggtttgagtcgacatgcgactttttctaacttcgggatggctttccttaccttgttccgggtgagcacaggggataattggaatggaataatgaaagataccctgagggagtgtagcagagaagataaacactgtctttcatatctccccgctctgtctcccgtgtacttcgtcacatttgtgctggtggcacagttcgtcttggtgaacgtcgttgtcgccgtgctaatgaaacacctggaagagtccaacaaggaggcccgagaagacgccgaactggacgcggaaattgagctcgagatggctcaaggccctggctcagctcgacgtgtggatgcagatcggccacccctacctcaggagtccccaggtgccagagacgctccaaacctggtcgctcggaaggtgtctgtgtctcgcatgttatcacttccgaatgattcgtacatgttccggccagttgtgcccgctagcgcacctcatcctcgccctcttcaggaagtggagatggaaacgtacggcgcaggcacaccactgggttctgtggcatcagtgcattctccacccgctgagtcttgcgcaagtttgcagattcctctagctgtgagcagcccagccagatcaggagagcctcttcacgctttgtccccaaggggtactgcacgcagcccatctctcagtcgcctactatgtaggcaggaagccgtacacactgattcactggaagggaagattgattcccccagagacacgctggatcccgctgagcctggggagaaaacacccgtgcgccctgtgactcagggcggttcgttacagagtccacctcgcagtcctagacccgctagcgtcagaactaggaagcacaccttcggacagcgttgtgtcagctcgcgcccagccgctccagggggagaggaggccgaagcttcagaccctgccgacgaggaagtatcccatatcacctcttctgcttgcccgtggcagcccactgctgagccacacggtcccgaagcatctcccgtagccggaggcgaacgcgaccttcgcagactctacagtgtggacgcacaaggcttccttgacaagcccggtagggcagacgaacagtggcgacctagcgctgagctgggcagcggagagccaggcgaagccaaggcctgggggccagaagctgaacccgctttaggagccagacgcaagaagaaaatgtccccaccctgcatctccgtggagcccccagcagaggatgagggaagcgcccgtcccagcgctgcagaaggaggaagtacaacgctccggaggcgtactccctcctgtgaggccaccccacaccgggatagtctggagcctactgaaggttcgggggctggcggtgatccggcagctaaaggggaacgctggggccaggctagttgccgggcagaacaccttactgtgccctcgtttgctttcgagcccttagacttaggtgtgccgagcggtgatcctttcctggacggcagtcactcagtcacaccggagagccgagcgagctcatccggtgccatcgtgccactcgaacctcccgagtctgagccccctatgcccgttggagatccaccagagaagcggagaggcctgtaccttacagtgccccagtgcccccttgagaaacccggatctccttccgcaaccccagcaccgggaggaggggctgatgacccagtgta

SEQ ID NO: 207483 - DNA, 8087 bp, Artificial Sequence
  derived and/or modified sequence
cgaggccgccgccgtcgcctccgccgggcgagccggagccggagtcgagccgcggccgggagccgggcgggctggggacgcgggccgggggcggaggcgctgggggccggggccggggccgggggcggaggcgctgggggccggggccggggccgggcgccgagcggggtccgcggtgaccgcgccgcccgggcgatgcccgcggggacgccgccggccagcagagcgaggtgctgccggccgccaccatgaccgagggcgcacgggccgccgacgaggtccgggtgcccctgggcgcgccgccccctggccctgcggcgttggtgggggcgtccccggagagccccggggcgccgggacgcgaggcggagcgggggtccgagctcggcgtgtcaccctccgagagcccggcggccgagcgcggcgcggagctgggtgccgacgaggagcagcgcgtcccgtacccggccttggcggccacggtcttcttctgcctcggtcagaccacgcggccgcgcagctggtgcctccggctggtctgcaacccatggttcgagcacgtgagcatgctggtaatcatgctcaactgcgtgaccctgggcatgttccggccctgtgaggacgttgagtgcggctccgagcgctgcaacatcctggaggcctttgacgccttcattttcgccttttttgcggtggagatggtcatcaagatggtggccttggggctgttcgggcagaagtgttacctgggtgacacgtggaacaggctggatttcttcatcgtcgtggcgggcatgatggagtactcgttggacggacacaacgtgagcctctcggctatcaggaccgtgcgggtgctgcggcccctccgcgccatcaaccgcgtgcctagcatgcggatcctggtcactctgctgctggatacgctgcccatgctcgggaacgtccttctgctgtgcttcttcgtcttcttcattttcggcatcgttggcgtccagctctgggctggcctcctgcggaaccgctgcttcctggacagtgcctttgtcaggaacaacaacctgaccttcctgcggccgtactaccagacggaggagggcgaggagaacccgttcatctgctcctcacgccgagacaacggcatgcagaagtgctcgcacatccccggccgccgcgagctgcgcatgccctgcaccctgggctgggaggcctacacgcagccgcaggccgagggggtgggcgctgcacgcaacgcctgcatcaactggaaccagtactacaacgtgtgccgctcgggtgactccaacccccacaacggtgccatcaacttcgacaacatcggctacgcctggattgccatcttccaggtgatcacgctggaaggctgggtggacatcatgtactacgtcatggacgcccactcattctacaacttcatctatttcatcctgctcatcatcgtgggctccttcttcatgatcaacctgtgcctggtggtgattgccacgcagttctcggagacgaagcagcgggagagtcagctgatgcgggagcagcgggcacgccacctgtccaacgacagcacgctggccagcttctccgagcctggcagctgctacgaagagctgctgaagtacgtgggccacatattccgcaaggtcaagcggcgcagcttgcgcctctacgcccgctggcagagccgctggcgcaagaaggtggaccccagtgctgtgcaaggccagggtcccgggcaccgccagcgccgggcaggcaggcacacagcctcggtgcaccacctggtctaccaccaccatcaccaccaccaccaccactaccatttcagccatggcagcccccgcaggcccggccccgagccaggcgcctgcgacaccaggctggtccgagctggcgcgcccccctcgccaccttccccaggccgcggaccccccgacgcagagtctgtgcacagcatctaccatgccgactgccacatagaggggccgcaggagagggcccgggtggcacatgccgcagccactgccgctgccagcctcagactggccacagggctgggcaccatgaactaccccacgatcctgccctcaggggtgggcagcggcaaaggcagcaccagccccggacccaaggggaagtgggccggtggaccgccaggcaccggggggcacggcccgttgagcttgaacagccctgatccctacgagaagatcccgcatgtggtcggggagcatggactgggccaggcccctggccatctgtcgggcctcagtgtgccctgccccctgcccagccccccagcgggcacactgacctgtgagctgaagagctgcccgtactgcacccgtgccctggaggacccggagggtgagctcagcggctcggaaagtggagactcagatggccgtggcgtctatgaattcacgcaggacgtccggcacggtgaccgctgggaccccacgcgaccaccccgtgcgacggacacaccaggcccaggcccaggcagcccccagcggcgggcacagcagagggcagccccgggcgagccaggctggatgggccgcctctgggttaccttcagcggcaagctgcgccgcatcgtggacagcaagtacttcagccgtggcatcatgatggccatccttgtcaacacgctgagcatgggcgtggagtaccatgagcagcccgaggagctgactaatgctctggagatcagcaacatcgtgttcaccagcatgtttgccctggagatgctgctgaagctgctggcctgcggccctctgggctacatccggaacccgtacaacatcttcgacggcatcatcgtggtcatcagcgtctgggagatcgtggggcaggcggacggtggcttgtctgtgctgcgcaccttccggctgctgcgtgtgctgaagctggtgcgctttctgccagccctgcggcgccagctcgtggtgctggtgaagaccatggacaacgtggctaccttctgcacgctgctcatgctcttcattttcatcttcagcatcctgggcatgcaccttttcggctgcaagttcagcctgaagacagacaccggagacaccgtgcctgacaggaagaacttcgactccctgctgtgggccatcgtcaccgtgttccagatcctgacccaggaggactggaacgtggtcctgtacaacggcatggcctccacctcctcctgggccgccctctacttcgtggccctcatgaccttcggcaactatgtgctcttcaacctgctggtggccatcctcgtggagggcttccaggcggagggcgatgccaacagatccgacacggacgaggacaagacgtcggtccacttcgaggaggacttccacaagctcagagaactccagaccacagagctgaagatgtgttccctggccgtgacccccaacgggcacctggagggacgaggcagcctgtcccctcccctcatcatgtgcacagctgccacgcccatgcctacccccaagagctcaccattcctggatgcagcccccagcctcccagactctcggcgtggcagcagcagctccggggacccgccactgggagaccagaagcctccggccagcctccgaagttctccctgtgccccctggggccccagtggcgcctggagcagccggcgctccagctggagcagcctgggccgtgcccccagcctcaagcgccgcggccagtgtggggaacgtgagtccctgctgtctggcgagggcaagggcagcaccgacgacgaagctgaggacggcagggccgcgcccgggccccgtgccaccccactgcggcgggccgagtccctggacccacggcccctgcggccggccgccctcccgcctaccaagtgccgcgatcgcgacgggcaggtggtggccctgcccagcgacttcttcctgcgcatcgacagccaccgtgaggatgcagccgagcttgacgacgactcggaggacagctgctgcctccgcctgcataaagtgctggagccctacaagccccagtggtgccggagccgcgaggcctgggccctctacctcttctccccacagaaccggttccgcgtctcctgccagaaggtcatcacacacaagatgtttgatcacgtggtcctcgtcttcatcttcctcaactgcgtcaccatcgccctggagaggcctgacattgatcccggcagcaccgagcgggtcttcctcagcgtctccaattacatcttcacggccatcttcgtggcggagatgatggtgaaggtggtggccctggggctgctgtccggcgagcacgcctacctgcagagcagctggaacctgctggatgggctgctggtgctggtgtccctggtggacattgtcgtggccatggcctcggctggtggcgccaagatcctgggtgttctgcgcgtgctgcgtctgctgcggaccctgcggcctctgagggtcatcagccgggccccgggcctcaagctggtggtggagacgctgatatcatcactcaggcccattgggaacatcgtcctcatctgctgcgccttcttcatcatttttggcattttgggtgtgcagctcttcaaagggaagttctactactgcgagggccccgacaccaggaacatctccaccaaggcacagtgccgggccgcccactaccgctgggtgcgacgcaagtacaacttcgacaacctgggccaggccctgatgtcgctgttcgtgctgtcatccaaggatggatgggtgaacatcatgtacgacgggctggatgccgtgggtgtcgaccagcagcctgtgcagaaccacaacccctggatgctgctgtacttcatctccttcctgctcatcgtcagcttcttcgtgctcaacatgttcgtgggcgtcgtggtcgagaacttccacaagtgccggcagcaccaggaggcggaggaggcgcggcggcgagaggagaagcggctgcggcgcctagagaggaggcgcaggagcactttccccagcccagaggcccagcgccggccctactatgccgactactcgcccacgcgccgctccattcactcgctgtgcaccagccactatctcgacctcttcatcaccttcatcatctgtgtcaacgtcatcaccatgtccatggagcactataaccaacccaagtcgctggacgaggccctcaagtactgcaactacgtcttcaccatcgtgtttgtcttcgaggctgcactgaagctggtagcatttgggttccgtcggttcttcaaggacaggtggaaccagctggacctggccatcgtgctgctgtcactcatgggcatcacgctggaggagatagagatgagcgccgcgctgcccatcaaccccaccatcatccgcatcatgcgcgtgcttcgcattgcccgtgtgctgaagctgctgaagatggctacgggcatgcgcgccctgctggacactgtggtgcaagctctcccccaggtggggaacctgggccttcttttcatgctcctgttttttatctatgctgcgctgggagtggagctgttcgggaggctggagtgcagtgaagacaacccctgcgagggcctgagcaggcacgccaccttcagcaacttcggcatggccttcctcacgctgttccgcgtgtccacgggggacaactggaacgggatcatgaaggacacgctgcgcgagtgctcccgtgaggacaagcactgcctgagctacctgccggccctgtcgcccgtctacttcgtgaccttcgtgctggtggcccagttcgtgctggtgaacgtggtggtggccgtgctcatgaagcacctggaggagagcaacaaggaggcacgggaggatgcggagctggacgccgagatcgagctggagatggcgcagggccccgggagtgcacgccgggtggacgcggacaggcctcccttgccccaggagagtccgggcgccagggacgccccaaacctggttgcacgcaaggtgtccgtgtccaggatgctctcgctgcccaacgacagctacatgttcaggcccgtggtgcctgcctcggcgccccacccccgcccgctgcaggaggtggagatggagacctatggggccggcacccccttgggctccgttgcctctgtgcactctccgcccgcagagtcctgtgcctccctccagatcccattggctgtgtcgtccccagccaggagcggcgagcccctccacgccctgtcccctcggggcacagcccgctcccccagtctcagccggctgctctgcagacaggaggctgtgcacaccgattccttggaagggaagattgacagccctagggacaccctggatcctgcagagcctggtgagaaaaccccggtgaggccggtgacccaggggggctccctgcagtccccaccacgctccccacggcccgccagcgtccgcactcgtaagcataccttcggacagcgctgcgtctccagccggccggcggccccaggcggagaggaggccgaggcctcggacccagccgacgaggaggtcagccacatcaccagctccgcctgcccctggcagcccacagccgagccccatggccccgaagcctctccggtggccggcggcgagcgggacctgcgcaggctctacagcgtggatgctcagggcttcctggacaagccgggccgggcagacgagcagtggcggccctcggcggagctgggcagcggggagcctggggaggcgaaggcctggggccctgaggccgagcccgctctgggtgcgcgcagaaagaagaagatgagccccccctgcatctcggtggaaccccctgcggaggacgagggctctgcgcggccctccgcggcagagggcggcagcaccacactgaggcgcaggaccccgtcctgtgaggccacgcctcacagggactccctggagcccacagagggctcaggcgccgggggggaccctgcagccaagggggagcgctggggccaggcctcctgccgggctgagcacctgaccgtccccagctttgcctttgagccgctggacctcggggtccccagtggagaccctttcttggacggtagccacagtgtgaccccagaatccagagcttcctcttcaggggccatagtgcccctggaacccccagaatcagagcctcccatgcccgtcggtgaccccccagagaagaggcgggggctgtacctcacagtcccccagtgtcctctggagaaaccagggtccccctcagccacccctgccccagggggtggtgcagatgaccccgtgtagctcggggcttggtgccgcccacggctttggccctggggtctgggggccccgctggggtggaggcccaggcagaaccctgcatggaccctgacttgggtcccgtcgtgagcagaaaggcccggggaggatgacggcccaggccctggttctctgcccagcgaagcaggagtagctgccgggccccacgagcctccgtccgttctggttcgggtttctccgagttttgctaccagccgaggctgtgcgggcaactgggtcagcctcccgtcaggagagaagccgcgtctgtgggacgaagaccgggcacccgccagagaggggaaggtaccaggttgcgtcctttcaggccccgcgttgttacaggacactcgctgggggccctgtgcccttgccggcggcaggttgcagccaccgcggcccaatgtcaccttcactcacagtctgagttcttgtccgcctgtcacgccctcaccaccctccccttccagccaccaccctttccgttccgctcgggccttcccagaagcgtcctgtgactctgggagaggtgacacctcactaaggggccgaccccatggagtaacgcgcccggccccgatgcgaatcaggcctcccctacatctgggggcgttggccgcgagattcccattgacacctttgtttcgtgtgcttttaaattcaggttaaatgttgcaataatctgatgcagaagactcagcttctcaagggagagggagggggcggagcggaataaatagtaacttatttaagaaatgc

SEQ ID NO: 207484 - DNA, 7062 bp, Artificial Sequence
  derived and/or modified sequence
atgaccgagggcgccagagccgccgacgaggtgagagtgcccctgggcgcccccccccccggccccgccgccctggtgggcgccagccccgagagccccggcgcccccggcagagaggccgagagaggcagcgagctgggcgtgagccccagcgagagccccgccgccgagagaggcgccgagctgggcgccgacgaggagcagagagtgccctaccccgccctggccgccaccgtgttcttctgcctgggccagaccaccagacccagaagctggtgcctgagactggtgtgcaacccctggttcgagcacgtgagcatgctggtgatcatgctgaactgcgtgaccctgggcatgttcagaccctgcgaggacgtggagtgcggcagcgagagatgcaacatcctggaggccttcgacgccttcatcttcgccttcttcgccgtggagatggtgatcaagatggtggccctgggcctgttcggccagaagtgctacctgggcgacacctggaacagactggacttcttcatcgtggtggccggcatgatggagtacagcctggacggccacaacgtgagcctgagcgccatcagaaccgtgagagtgctgagacccctgagagccatcaacagagtgcccagcatgagaatcctggtgaccctgctgctggacaccctgcccatgctgggcaacgtgctgctgctgtgcttcttcgtgttcttcatcttcggcatcgtgggcgtgcagctgtgggccggcctgctgagaaacagatgcttcctggacagcgccttcgtgagaaacaacaacctgaccttcctgagaccctactaccagaccgaggagggcgaggagaaccccttcatctgcagcagcagaagagacaacggcatgcagaagtgcagccacatccccggcagaagagagctgagaatgccctgcaccctgggctgggaggcctacacccagccccaggccgagggcgtgggcgccgccagaaacgcctgcatcaactggaaccagtactacaacgtgtgcagaagcggcgacagcaacccccacaacggcgccatcaacttcgacaacatcggctacgcctggatcgccatcttccaggtgatcaccctggagggctgggtggacatcatgtactacgtgatggacgcccacagcttctacaacttcatctacttcatcctgctgatcatcgtgggcagcttcttcatgatcaacctgtgcctggtggtgatcgccacccagttcagcgagaccaagcagagagagagccagctgatgagagagcagagagccagacacctgagcaacgacagcaccctggccagcttcagcgagcccggcagctgctacgaggagctgctgaagtacgtgggccacatcttcagaaaggtgaagagaagaagcctgagactgtacgccagatggcagagcagatggagaaagaaggtggaccccagcgccgtgcagggccagggccccggccacagacagagaagagccggcagacacaccgccagcgtgcaccacctggtgtaccaccaccaccaccaccaccaccaccactaccacttcagccacggcagccccagaagacccggccccgagcccggcgcctgcgacaccagactggtgagagccggcgccccccccagcccccccagccccggcagaggcccccccgacgccgagagcgtgcacagcatctaccacgccgactgccacatcgagggcccccaggagagagccagagtggcccacgccgccgccaccgccgccgccagcctgagactggccaccggcctgggcaccatgaactaccccaccatcctgcccagcggcgtgggcagcggcaagggcagcaccagccccggccccaagggcaagtgggccggcggcccccccggcaccggcggccacggccccctgagcctgaacagccccgacccctacgagaagatcccccacgtggtgggcgagcacggcctgggccaggcccccggccacctgagcggcctgagcgtgccctgccccctgcccagcccccccgccggcaccctgacctgcgagctgaagagctgcccctactgcaccagagccctggaggaccccgagggcgagctgagcggcagcgagagcggcgacagcgacggcagaggcgtgtacgagttcacccaggacgtgagacacggcgacagatgggaccccaccagaccccccagagccaccgacacccccggccccggccccggcagcccccagagaagagcccagcagagagccgcccccggcgagcccggctggatgggcagactgtgggtgaccttcagcggcaagctgagaagaatcgtggacagcaagtacttcagcagaggcatcatgatggccatcctggtgaacaccctgagcatgggcgtggagtaccacgagcagcccgaggagctgaccaacgccctggagatcagcaacatcgtgttcaccagcatgttcgccctggagatgctgctgaagctgctggcctgcggccccctgggctacatcagaaacccctacaacatcttcgacggcatcatcgtggtgatcagcgtgtgggagatcgtgggccaggccgacggcggcctgagcgtgctgagaaccttcagactgctgagagtgctgaagctggtgagattcctgcccgccctgagaagacagctggtggtgctggtgaagaccatggacaacgtggccaccttctgcaccctgctgatgctgttcatcttcatcttcagcatcctgggcatgcacctgttcggctgcaagttcagcctgaagaccgacaccggcgacaccgtgcccgacagaaagaacttcgacagcctgctgtgggccatcgtgaccgtgttccagatcctgacccaggaggactggaacgtggtgctgtacaacggcatggccagcaccagcagctgggccgccctgtacttcgtggccctgatgaccttcggcaactacgtgctgttcaacctgctggtggccatcctggtggagggcttccaggccgagggcgacgccaacagaagcgacaccgacgaggacaagaccagcgtgcacttcgaggaggacttccacaagctgagagagctgcagaccaccgagctgaagatgtgcagcctggccgtgacccccaacggccacctggagggcagaggcagcctgagcccccccctgatcatgtgcaccgccgccacccccatgcccacccccaagagcagccccttcctggacgccgcccccagcctgcccgacagcagaagaggcagcagcagcagcggcgacccccccctgggcgaccagaagccccccgccagcctgagaagcagcccctgcgccccctggggccccagcggcgcctggagcagcagaagaagcagctggagcagcctgggcagagcccccagcctgaagagaagaggccagtgcggcgagagagagagcctgctgagcggcgagggcaagggcagcaccgacgacgaggccgaggacggcagagccgcccccggccccagagccacccccctgagaagagccgagagcctggaccccagacccctgagacccgccgccctgccccccaccaagtgcagagacagagacggccaggtggtggccctgcccagcgacttcttcctgagaatcgacagccacagagaggacgccgccgagctggacgacgacagcgaggacagctgctgcctgagactgcacaaggtgctggagccctacaagccccagtggtgcagaagcagagaggcctgggccctgtacctgttcagcccccagaacagattcagagtgagctgccagaaggtgatcacccacaagatgttcgaccacgtggtgctggtgttcatcttcctgaactgcgtgaccatcgccctggagagacccgacatcgaccccggcagcaccgagagagtgttcctgagcgtgagcaactacatcttcaccgccatcttcgtggccgagatgatggtgaaggtggtggccctgggcctgctgagcggcgagcacgcctacctgcagagcagctggaacctgctggacggcctgctggtgctggtgagcctggtggacatcgtggtggccatggccagcgccggcggcgccaagatcctgggcgtgctgagagtgctgagactgctgagaaccctgagacccctgagagtgatcagcagagcccccggcctgaagctggtggtggagaccctgatcagcagcctgagacccatcggcaacatcgtgctgatctgctgcgccttcttcatcatcttcggcatcctgggcgtgcagctgttcaagggcaagttctactactgcgagggccccgacaccagaaacatcagcaccaaggcccagtgcagagccgcccactacagatgggtgagaagaaagtacaacttcgacaacctgggccaggccctgatgagcctgttcgtgctgagcagcaaggacggctgggtgaacatcatgtacgacggcctggacgccgtgggcgtggaccagcagcccgtgcagaaccacaacccctggatgctgctgtacttcatcagcttcctgctgatcgtgagcttcttcgtgctgaacatgttcgtgggcgtggtggtggagaacttccacaagtgcagacagcaccaggaggccgaggaggccagaagaagagaggagaagagactgagaagactggagagaagaagaagaagcaccttccccagccccgaggcccagagaagaccctactacgccgactacagccccaccagaagaagcatccacagcctgtgcaccagccactacctggacctgttcatcaccttcatcatctgcgtgaacgtgatcaccatgagcatggagcactacaaccagcccaagagcctggacgaggccctgaagtactgcaactacgtgttcaccatcgtgttcgtgttcgaggccgccctgaagctggtggccttcggcttcagaagattcttcaaggacagatggaaccagctggacctggccatcgtgctgctgagcctgatgggcatcaccctggaggagatcgagatgagcgccgccctgcccatcaaccccaccatcatcagaatcatgagagtgctgagaatcgccagagtgctgaagctgctgaagatggccaccggcatgagagccctgctggacaccgtggtgcaggccctgccccaggtgggcaacctgggcctgctgttcatgctgctgttcttcatctacgccgccctgggcgtggagctgttcggcagactggagtgcagcgaggacaacccctgcgagggcctgagcagacacgccaccttcagcaacttcggcatggccttcctgaccctgttcagagtgagcaccggcgacaactggaacggcatcatgaaggacaccctgagagagtgcagcagagaggacaagcactgcctgagctacctgcccgccctgagccccgtgtacttcgtgaccttcgtgctggtggcccagttcgtgctggtgaacgtggtggtggccgtgctgatgaagcacctggaggagagcaacaaggaggccagagaggacgccgagctggacgccgagatcgagctggagatggcccagggccccggcagcgccagaagagtggacgccgacagaccccccctgccccaggagagccccggcgccagagacgcccccaacctggtggccagaaaggtgagcgtgagcagaatgctgagcctgcccaacgacagctacatgttcagacccgtggtgcccgccagcgccccccaccccagacccctgcaggaggtggagatggagacctacggcgccggcacccccctgggcagcgtggccagcgtgcacagcccccccgccgagagctgcgccagcctgcagatccccctggccgtgagcagccccgccagaagcggcgagcccctgcacgccctgagccccagaggcaccgccagaagccccagcctgagcagactgctgtgcagacaggaggccgtgcacaccgacagcctggagggcaagatcgacagccccagagacaccctggaccccgccgagcccggcgagaagacccccgtgagacccgtgacccagggcggcagcctgcagagcccccccagaagccccagacccgccagcgtgagaaccagaaagcacaccttcggccagagatgcgtgagcagcagacccgccgcccccggcggcgaggaggccgaggccagcgaccccgccgacgaggaggtgagccacatcaccagcagcgcctgcccctggcagcccaccgccgagccccacggccccgaggccagccccgtggccggcggcgagagagacctgagaagactgtacagcgtggacgcccagggcttcctggacaagcccggcagagccgacgagcagtggagacccagcgccgagctgggcagcggcgagcccggcgaggccaaggcctggggccccgaggccgagcccgccctgggcgccagaagaaagaagaagatgagccccccctgcatcagcgtggagccccccgccgaggacgagggcagcgccagacccagcgccgccgagggcggcagcaccaccctgagaagaagaacccccagctgcgaggccaccccccacagagacagcctggagcccaccgagggcagcggcgccggcggcgaccccgccgccaagggcgagagatggggccaggccagctgcagagccgagcacctgaccgtgcccagcttcgccttcgagcccctggacctgggcgtgcccagcggcgaccccttcctggacggcagccacagcgtgacccccgagagcagagccagcagcagcggcgccatcgtgcccctggagccccccgagagcgagccccccatgcccgtgggcgacccccccgagaagagaagaggcctgtacctgaccgtgccccagtgccccctggagaagcccggcagccccagcgccacccccgcccccggcggcggcgccgacgaccccgtgtag

SEQ ID NO: 207485 - protein, 189 aa, Artificial Sequence
  derived and/or modified sequence
MLLRAAWRRAAVAVTAAPGPKPAAPTRGLRLRVGDRAPQSAVPADTAAAPEVGPVLRPLYMDVQATTPLDPRVLDAMLPYLINYYGNPHSRTHAYGWESEAAMERARQQVASLIGADPREIIFTSGATESNNIAIKTESHSVIQAGVQWHDLDSLQAPPPGFTPFSCLSLLSSWDYRRPPPHPANFLYF

SEQ ID NO: 207486 - protein, 457 aa, Artificial Sequence
  derived and/or modified sequence
MLLRAAWRRAAVAVTAAPGPKPAAPTRGLRLRVGDRAPQSAVPADTAAAPEVGPVLRPLYMDVQATTPLDPRVLDAMLPYLINYYGNPHSRTHAYGWESEAAMERARQQVASLIGADPREIIFTSGATESNNIAIKGVARFYRSRKKHLITTQTEHKCVLDSCRSLEAEGFQVTYLPVQKSGIIDLKELEAAIQPDTSLVSVMTVNNEIGVKQPIAEIGRICSSRKVYFHTDAAQAVGKIPLDVNDMKIDLMSISGHKIYGPKGVGAIYIRRRPRVRVEALQSGGGQERGMRSGTVPTPLVVGLGAACEVAQQEMEYDHKRISKLSERLIQNIMKSLPDVVMNGDPKHHYPGCINLSFAYVEGESLLMALKDVALSSGSACTSASLEPSYVLRAIGTDEDLAHSSIRFGIGRFTTEEEVDYTVEKCIQHVKRLREMSPLWEMVQDGIDLKSIKWTQH

SEQ ID NO: 207487 - protein, 161 aa, Artificial Sequence [sequence omitted]

SEQ ID NO: 207488 - DNA, 1374 bp, Artificial Sequence
  derived and/or modified sequence
atgctactcagagcagcttggaggcgcgcagctgtggctgtgaccgcagctccaggccctaagccggcagcgccaacacgagggctacgtctccgtgtgggcgatcgggcacctcagtccgccgtcccggcagacaccgcggccgccccagaagtcggccccgtgctgagaccactgtatatggacgttcaagccactacaccattagatccaagggttctggatgccatgttgccctaccttattaattactacggcaaccctcattcaagaactcacgcttacggctgggagtccgaagcggccatggagcgcgctagacaacaggtagccagtcttattggggccgaccctcgggagatcatcttcaccagtggcgcaacagagtctaacaacatcgccattaagggagtggccagattctatcgatccagaaaaaagcacctgataaccacccaaaccgagcataaatgcgtgctcgatagctgtcgctctctggaagcggaggggttccaggtgacgtatctgcccgtacaaaagtcagggatcatcgatctgaaagagttagaggcggccattcagcccgatacctcactggtgtctgtaatgacagtgaacaatgagatcggggtcaagcagccgatcgctgaaattggccggatctgttcttcccgcaaggtatacttccatacagatgcagcccaggccgtgggcaagatccccctggatgtgaatgatatgaaaatcgatctgatgtcaatctcagggcacaaaatctacggccctaaaggggtgggcgccatctatattcggaggcggccgagagtgagagtcgaggctctccagtccggaggggggcaggaacggggtatgagatccgggaccgtgccaacccccctggtagtcgggctgggtgccgcttgcgaagtggcccagcaagagatggagtacgatcacaagcgcatctccaaattatctgagcgcctaatacagaacattatgaagtccctgccagacgtggtcatgaacggcgacccgaagcatcactacccaggttgcattaatctcagcttcgcatacgttgagggagagagtctcttgatggcccttaaagatgtagcattgagtagcgggtcggcctgcacatccgcttccctggagcccagctatgtgttacgggctatcggtacggacgaggacttggctcattcttccattagattcggcatcggacgcttcaccactgaagaggaagtggactacaccgtggagaagtgcatccagcatgtcaaacggctgagggagatgtccccgctgtgggagatggtacaggatggaatcgacctaaagagtatcaaatggactcaacactag

SEQ ID NO: 207489 - DNA, 486 bp, Artificial Sequence
  derived and/or modified sequence
atgttactcagggcagcttggagaagagccgcagtcgcggttactgccgcccctgggcctaagcccgccgctcctactaggggccttaggctccgcgtgggggacagagcgcctcaatcagctgttcccgcagacaccgccgccgcccctgaagttgggcccgttctacgcccgctgtatatggacgtgcaggccacgacgcctctggacccaagggttttagacgcaatgctgccatatttaatcaattactacggcaatccccacagccgtacgcatgcctatggctgggaaagcgaagcggccatggagcgagccagacaacaggtcgcctccctgatcggcgcggatccccgagagatcatctttacctccggagcaacagagtcaaacaatatagctattaaaggggtagcacggttttacagaagcagaaaaaagcatctgattaccaccctttcgggaggggcgggcgggtgtgtttag

SEQ ID NO: 207490 - DNA, 1374 bp, Artificial Sequence
  derived and/or modified sequence
atgctgctgcgggccgcctggaggagagctgctgtggccgtgacagctgcccctggccccaagccagctgcccccacccggggcctgcggctgcgggtgggggaccgggccccccagagcgctgtgcctgctgacacagctgctgcccctgaggtgggccctgtgctgcggcccctgtacatggatgtgcaggccaccacccccctggacccccgggtgctggatgccatgctgccctacctgatcaactactacggcaacccccacagcaggacccacgcctacggctgggagagcgaggccgccatggagcgggcccggcagcaggtggccagcctcatcggggctgacccccgggagatcatcttcaccagcggggccacagagagcaacaacatcgccatcaagggcgtggcccgcttctaccgcagcaggaagaagcacctgatcaccacccagacagagcacaagtgtgtgctggacagctgccgcagcctggaggccgagggcttccaggtgacctacctgcctgtgcagaagagcggcatcatcgacctgaaggagctggaggccgccatccagcctgacaccagcctggtgtctgtgatgacagtgaacaatgaaattggagtgaagcagcccatcgccgagatcggccgcatctgcagcagcaggaaggtgtacttccacacagatgctgcccaggccgtgggcaagatccccctggatgtgaatgacatgaagattgacctgatgagcatcagcggccacaagatctacggccccaagggcgtgggcgccatctacatcagaagaagaccccgggtgcgggtggaggccctgcagagcggcggcggccaggagcggggcatgaggtctggaacagtgcccacccccctggtggtgggcctgggcgccgcctgtgaggtggcccagcaggagatggagtatgaccacaagaggatcagcaagctgtctgagcggctcatccagaacatcatgaagagcctgcctgatgtggtgatgaatggagaccccaagcaccactacccaggctgcatcaacctgagctttgcctacgtggagggggagagcctgctgatggccctgaaggatgtggccctgagcagcggcagcgcctgcaccagcgccagcctggagcccagctatgtgctgcgggccatcggcacagatgaggacctggcccacagcagcatccgcttcggcatcggccgcttcaccacagaggaggaggtggactacacagtggagaagtgcatccagcacgtgaagaggctgcgggagatgagccccctgtgggagatggtgcaggacggcatcgacctgaagagcatcaagtggacccagcactag

SEQ ID NO: 207491 - DNA, 486 bp, Artificial Sequence
  derived and/or modified sequence
atgctgctgcgggccgcctggaggagagctgctgtggccgtgacagctgcccctggccccaagccagctgcccccacccggggcctgcggctgcgggtgggggaccgggccccccagagcgctgtgcctgctgacacagctgctgcccctgaggtgggccctgtgctgcggcccctgtacatggatgtgcaggccaccacccccctggacccccgggtgctggatgccatgctgccctacctgatcaactactacggcaacccccacagcaggacccacgcctacggctgggagagcgaggccgccatggagcgggcccggcagcaggtggccagcctcatcggggctgacccccgggagatcatcttcaccagcggggccacagagagcaacaacatcgccatcaagggcgtggcccgcttctaccgcagcaggaagaagcacctgatcaccaccctgagcggcggggccggcggctgtgtgtag

SEQ ID NO: 207492 - DNA, 1374 bp, Artificial Sequence
  derived and/or modified sequence
atgctgctgcgggccgcctggcggcgggccgccgtggccgtgaccgcggctccaggtcctaaaccagctgctccaactcgcgggctgaggctgcgggtcggcgatagagcccctcaatccgccgtgcccgccgacactgccgcagctccagaggtgggtcccgtccttcgccctctgtatatggacgttcaggctaccactccgctggatccacgcgtgctggatgctatgctaccatatctaataaattattatggtaatcctcattctcgaacccacgcatacggctgggagagcgaagcagccatggagagggcacggcagcaggttgcttccctgatcggtgcagatcctcgtgagattatctttacatccggggcaacagagagtaacaacatcgccatcaagggcgtggctcgcttctatcgcagcagaaagaagcacctgatcaccacccaaaccgagcacaagtgtgtgctggattcatgcagaagcctagaggcagagggctttcaggtcacatacctgccggtccagaagtctggtatcattgatcttaaagaattggaagcagccatccagcctgacactagtttggtgtccgtgatgacggtcaataatgaaattggagttaagcaacctatagcagaaattggtagaatctgctcatcgcgtaaagtctactttcacactgacgctgctcaggcagtaggcaaaatccccctggacgtaaatgacatgaagatcgatctcatgtctatttctggacacaagatctacggccccaagggggtgggagctatctacatcaggcgcagacctcgcgtgagagtggaagccctccagagtggaggcggccaggagagaggcatgagaagcggtaccgtccctactcctctggtggtgggtttaggggccgcgtgcgaagtggcccagcaggaaatggagtacgaccataagcggatttccaaattgagtgaaagattgatccagaatattatgaaatcactgccagacgtggtgatgaacggcgaccctaagcatcactatccaggatgcataaacctgagctttgcttatgtagagggagaaagcctcctcatggctctgaaggacgtggccctcagttccggcagcgcctgtacatccgcctcccttgagccgtcctatgtcttgcgggctatcggcacagacgaagaccttgctcacagctctatccggtttggaattgggagattcactacagaggaagaagtagattacaccgtggagaagtgtatacagcatgttaagcggctgcgcgaaatgagtccattgtgggagatggtgcaagacggtatcgacctgaagtctattaagtggacccagcactag

SEQ ID NO: 207493 - DNA, 486 bp, Artificial Sequence
  derived and/or modified sequence
atgctgctgcgggccgcctggcggcgggccgccgtggccgtgaccgccgcacctggtccgaaaccggctgcccccacaaggggcctccgtctccgggtcggagaccgagcccctcagtctgccgtcccagcggacaccgccgcggcccctgaggtaggacccgtcttgagacctctgtacatggacgtacaggctacaacccctctggatccgcgggtcctggacgctatgctgccatatctgatcaattactacgggaacccccattcccgcacccatgcttatggctgggaatcagaagctgccatggagcgggcaagacaacaggtagcttcgctgattggggccgacccgagggaaatcatttttacaagtggggccaccgagtccaacaatatagctatcaagggcgtggccaggttctaccgttctcgaaagaaacatctgattactacactcagcgggggcgccgggggctgcgtgtag

SEQ ID NO: 207494 - DNA, 2379 bp, Artificial Sequence
  derived and/or modified sequence
gggcagcacttccgggagcctggggcccaggactgcagcggcttcggaaggtgggctctgccagcgggaccatgctgctccgagccgcttggaggcgggcggcagtggcggtgacagcggctccagggccgaagcccgcggcgcccactcgggggctgcgcctgcgcgttggagaccgtgctcctcagtctgcggttcccgcagatacagccgctgccccggaggtggggccagtgctgcgacctctctatatggatgtgcaagctacaactcctctggacccccgggtgcttgatgccatgctcccttacctaatcaactactatgggaacccacactcccggacacatgcttatggctgggagagtgaggcagccatggaacgtgctcgtcagcaagtagcatctctgattggagctgatcctcgtgagatcatttttactagtggtgctactgaatccaacaacatagcaattaagggggtggcccgattctacaggtcacggaaaaagcacttgatcaccacccagacagaacacaaatgtgtcttggactcctgccgttcactggaagctgagggctttcaggtcacctacctcccagtgcagaagagtgggatcattgacctaaaggaactagaggctgctatccagccagatactagcctggtgtcagtcatgactgtgaacaatgagattggagtgaagcagcctattgcagaaatagggcggatttgcagttccagaaaggtatatttccatactgatgcagcccaggctgttggaaaaatcccacttgatgtcaatgacatgaaaattgatctcatgagcattagtggtcacaaaatctacggtcccaaaggggttggtgccatctacatccgtcgccggccccgtgtgcgtgtggaggccctgcagagtggaggggggcaggagcggggtatgcggtctgggacagtgcccacacccttagtggtggggctgggggctgcgtgtgaggtggcacagcaagagatggagtatgaccacaagcgaatctcaaagttgtcagagcggctgatacagaatataatgaagagccttccagatgtggtgatgaatggggaccctaagcaccattatcccggctgtatcaacctctcctttgcatatgtggaaggggaaagtctgctgatggcactgaaggacgttgccttatcctcagggagtgcctgcacctctgcatccctggagccctcttatgtgcttagagcaattggcactgatgaggatttagcgcactcttctatcaggtttggaattggccgcttcactacagaggaggaagtggactacacagtggagaaatgcattcagcatgtgaagcgtcttcgagaaatgagccctctctgggagatggttcaggatggcattgacctcaagagcatcaagtggacccaacactagaagaatagggccctgactttgtgctggtctggcccctcctgcctcaccaacccgtgcacaaccagacaccttgttacacctagtggatgctctagattggtatagaccagttgacttcagcatcagtccacctctatgacagaaacacaagaaaactgtctttccctagcttcagttccttgggtgtggagcactccccatttcttctcgggtcttaaagtgtgtggacattttcatcccgaagccatagagacatttgctgtcatattgctgctgggcacatctgtgctcttggtgaggagagcaagaggaaccagaagaagtctctttggtcagggaccatgatgctctacatggacatttgagtcttcgtcttctgctgctgctcggctggaccagcttctttaacagcaagcataatccacttcaatgtaatattttctgtagctccaaaggctatctcttcatattgactgcagacagactgaatggacagtttcttagagggcttgtctcctttctacccttgtcctctttcctttcctttgacctaatggagctagaaatatgtctgtgactccaccagttattctaataatttgttttcttgaaaattgttaatttcaagactggagaaataaactcaccttctatttactctgtgactttatgagaggttgagggaaaagtggaagctgtacttgggaattgtggagaagaccgccactccatctgatttgcataaatgactcagtgggcttttgtatctcttcatttaagaattatttgaatgcctgccaggagccagatttgttctgggtattaggaatacactggttaacaggaccaaaaaagaccctgccctcactgagttttaaattttagtggagagatggaaaataattaaacaaataaacaatgttatagattgtga

SEQ ID NO: 207495 - DNA, 550 bp, Artificial Sequence
  derived and/or modified sequence
acttccgggagcctggggcccaggactgcagcggcttcggaaggtgggctctgccagcgggaccatgctgctccgagccgcttggaggcgggcggcagtggcggtgacagcggctccagggccgaagcccgcggcgcccactcgggggctgcgcctgcgcgttggagaccgtgctcctcagtctgcggttcccgcagatacagccgctgccccggaggtggggccagtgctgcgacctctctatatggatgtgcaagctacaactcctctggacccccgggtgcttgatgccatgctcccttacctaatcaactactatgggaacccacactcccggacacatgcttatggctgggagagtgaggcagccatggaacgtgctcgtcagcaagtagcatctctgattggagctgatcctcgtgagatcatttttactagtggtgctactgaatccaacaacatagcaattaagggggtggcccgattctacaggtcacggaaaaagcacttgatcaccacccttagtggtggggctgggggctgcgtgtga

SEQ ID NO: 207496 - DNA, 2011 bp, Artificial Sequence
  derived and/or modified sequence
acttccgggagcctggggcccaggactgcagcggcttcggaaggtgggctctgccagcgggaccatgctgctccgagccgcttggaggcgggcggcagtggcggtgacagcggctccagggccgaagcccgcggcgcccactcgggggctgcgcctgcgcgttggagaccgtgctcctcagtctgcggttcccgcagatacagccgctgccccggaggtggggccagtgctgcgacctctctatatggatgtgcaagctacaactcctctggacccccgggtgcttgatgccatgctcccttacctaatcaactactatgggaacccacactcccggacacatgcttatggctgggagagtgaggcagccatggaacgtgctcgtcagcaagtagcatctctgattggagctgatcctcgtgagatcatttttactagtggtgctactgaatccaacaacatagcaattaagatggagtctcaccctgtcgcccaggctagagtgtaggggcatgatctcggctcactgcaacctctgcctcccaggttcaagcgattctcctgcctcatcctcctgagtagccgggattacagggggtggcccgattctacaggtcacggaaaaagcacttgatcaccacccagacagaacacaaatgtgtcttggactcctgccgttcactggaagctgagggctttcaggtcacctacctcccagtgcagaagagtgggatcattgacctaaaggaactagaggctgctatccagccagatactagcctggtgtcagtcatgactgtgaacaatgagattggagtgaagcagcctattgcagaaatagggcggatttgcagttccagaaaggtatatttccatactgatgcagcccaggctgttggaaaaatcccacttgatgtcaatgacatgaaaattgatctcatgagcattagtggtcacaaaatctacggtcccaaaggggttggtgccatctacatccgtcgccggccccgtgtgcgtgtggaggccctgcagagtggaggggggcaggagcggggtatgcggtctgggacagtgcccacacccttagtggtggggctgggggctgcgtgtgaggtggcacagcaagagatggagtatgaccacaagcgaatctcaaagttgtcagagcggctgatacagaatataatgaagagccttccagatgtggtgatgaatggggaccctaagcaccattatcccggctgtatcaacctctcctttgcatatgtggaaggggaaagtctgctgatggcactgaaggacgttgccttatcctcagggagtgcctgcacctctgcatccctggagccctcttatgtgcttagagcaattggcactgatgaggatttagcgcactcttctatcaggtttggaattggccgcttcactacagaggaggaagtggactacacagtggagaaatgcattcagcatgtgaagcgtcttcgagaaatgagccctctctgggagatggttcaggatggcattgacctcaagagcatcaagtggacccaacactagaagaatagggccctgactttgtgctggtctggcccctcctgcctcaccaacccgtgcacaaccagacaccttgttacacctagtggatgctctagattggtatagaccagttgacttcagcatcagtccacctctatgacagaaacacaagaaaactgtctttccctagcttcagttccttgggtgtggagcactccccatttcttctcgggtcttaaagtgtgtggacattttcatcccgaagccatagagacatttgctgtcatattgctgctgggcacatctgtgctcttggtgaggagagcaagaggaaccagaagaagtctctttggtcagggaccatgatgctctacatggacatttgagtcttcgtcttctgctgctgctcggctggaccagcttctttaacagcaagcataatccacttcaatgtaatattttctgtagctcc

SEQ ID NO: 207497 - DNA, 1374 bp, Artificial Sequence
  derived and/or modified sequence
atgctgctgcgtgctgcttggaggcgggctgctgtggccgttacagccgcaccaggcccaaagccggctgccccaacccggggactgaggcttcgggttggtgacagagccccacaaagcgcagtacccgctgataccgcagccgctcccgaggtgggtcccgttctgaggcccctgtacatggacgtccaggccactacaccactagaccctagagtcctggatgcaatgttgccctatctcatcaattattacggaaatccacactcaagaacacatgcctacggctgggaatctgaggctgcgatggaacgagccagacaacaagtggcttccctgataggcgcagatcctagggagattatatttactagcggagccactgagtccaacaacatcgccatcaagggcgtggccaggttctaccgaagccggaaaaagcacctcataacaactcaaacggaacataaatgtgtgctggattcttgccgatccctggaagctgagggatttcaagtgacttatcttcctgtgcagaagtcgggcataatcgaccttaaggagctggaggcagccatccagccagataccagcctcgtgagtgtgatgacagtaaacaatgagataggtgtcaaacagccgattgccgagatcggacgaatctgttcatcgcggaaagtttattttcatacggacgccgctcaggccgtgggaaagattccactggatgtgaatgacatgaagatcgacctgatgagcatctccggacataagatctacggccctaagggcgtgggagcgatatatataaggcgtcgtcctagggtcagagttgaagccttgcaaagtggcggagggcaggaaaggggtatgaggagcggaaccgtaccaactcctcttgtcgttggacttggagcagcgtgcgaggttgcccaacaggaaatggaatatgatcacaagagaatttcaaagctgtcagagaggctgatccaaaatataatgaaatctctcccagatgtagtaatgaacggggacccaaagcaccactatccgggatgcatcaatctcagttttgcctatgtcgagggcgagtcactgctgatggcacttaaagacgtggcactgtcttccggcagtgcgtgtacctcagcttctctcgaaccttcatatgtcctgcgcgcaattgggactgacgaagacctggctcactcatcaattagattcggaattggacgctttaccaccgaggaagaggtcgattatacggtagagaaatgcatacagcacgtaaagagactgcgggaaatgagtcccctttgggaaatggtgcaagatggcatagatctgaagtctattaagtggactcaacattag

SEQ ID NO: 207498 - DNA, 486 bp, Artificial Sequence
  derived and/or modified sequence
atgctcctgagagccgcttggaggagggcggctgttgcagtgaccgctgcacctggcccaaagccggctgccccaacaaggggattgaggctgcgggtgggagatcgggcaccccaatctgctgtcccagctgacacagctgctgcccctgaggttggaccagtgctacggcctttgtacatggatgtgcaggcgacgactcctcttgaccctcgggttctggacgcaatgctgccttatctaatcaactattatgggaacccccattcgaggacacatgcgtatggttgggagagtgaggccgctatggaaagagcgcgacagcaggttgcatccctgattggggcagatccacgagagattatatttacatcaggagcgacagaaagtaacaacatcgccattaagggggtggctcgcttctacaggagccgcaagaaacatctcattactaccctgtctggtggtgccggtggttgcgtgtag

SEQ ID NO: 207499 - DNA, 1374 bp, Artificial Sequence
  derived and/or modified sequence
atgctgctgagagccgcctggagaagagccgccgtggccgtgaccgccgcccccggccccaagcccgccgcccccaccagaggcctgagactgagagtgggcgacagagccccccagagcgccgtgcccgccgacaccgccgccgcccccgaggtgggccccgtgctgagacccctgtacatggacgtgcaggccaccacccccctggaccccagagtgctggacgccatgctgccctacctgatcaactactacggcaacccccacagcagaacccacgcctacggctgggagagcgaggccgccatggagagagccagacagcaggtggccagcctgatcggcgccgaccccagagagatcatcttcaccagcggcgccaccgagagcaacaacatcgccatcaagggcgtggccagattctacagaagcagaaagaagcacctgatcaccacccagaccgagcacaagtgcgtgctggacagctgcagaagcctggaggccgagggcttccaggtgacctacctgcccgtgcagaagagcggcatcatcgacctgaaggagctggaggccgccatccagcccgacaccagcctggtgagcgtgatgaccgtgaacaacgagatcggcgtgaagcagcccatcgccgagatcggcagaatctgcagcagcagaaaggtgtacttccacaccgacgccgcccaggccgtgggcaagatccccctggacgtgaacgacatgaagatcgacctgatgagcatcagcggccacaagatctacggccccaagggcgtgggcgccatctacatcagaagaagacccagagtgagagtggaggccctgcagagcggcggcggccaggagagaggcatgagaagcggcaccgtgcccacccccctggtggtgggcctgggcgccgcctgcgaggtggcccagcaggagatggagtacgaccacaagagaatcagcaagctgagcgagagactgatccagaacatcatgaagagcctgcccgacgtggtgatgaacggcgaccccaagcaccactaccccggctgcatcaacctgagcttcgcctacgtggagggcgagagcctgctgatggccctgaaggacgtggccctgagcagcggcagcgcctgcaccagcgccagcctggagcccagctacgtgctgagagccatcggcaccgacgaggacctggcccacagcagcatcagattcggcatcggcagattcaccaccgaggaggaggtggactacaccgtggagaagtgcatccagcacgtgaagagactgagagagatgagccccctgtgggagatggtgcaggacggcatcgacctgaagagcatcaagtggacccagcactag

SEQ ID NO: 207500 - DNA, 486 bp, Artificial Sequence
  derived and/or modified sequence
atgctgctgagagccgcctggagaagagccgccgtggccgtgaccgccgcccccggccccaagcccgccgcccccaccagaggcctgagactgagagtgggcgacagagccccccagagcgccgtgcccgccgacaccgccgccgcccccgaggtgggccccgtgctgagacccctgtacatggacgtgcaggccaccacccccctggaccccagagtgctggacgccatgctgccctacctgatcaactactacggcaacccccacagcagaacccacgcctacggctgggagagcgaggccgccatggagagagccagacagcaggtggccagcctgatcggcgccgaccccagagagatcatcttcaccagcggcgccaccgagagcaacaacatcgccatcaagggcgtggccagattctacagaagcagaaagaagcacctgatcaccaccctgagcggcggcgccggcggctgcgtgtag

SEQ ID NO: 207501 - protein, 211 aa, Artificial Sequence
  derived and/or modified sequence
MANAGLQLLGFILAFLGWIGAIVSTALPQWRIYSYAGDNIVTAQAMYEGLWMSCVSQSTGQIQCKVFDSLLNLSSTLQATRALMVVGILLGVIAIFVATVGMKCMKCLEDDEVQKMRMAVIGGAIFLLAGLAILVATAWYGNRIVQEFYDPMTPVNARYEFGQALFTGWAAASLCLLGGALLCCSCPRKTTSYPTPRPYPKPAPSSGKDYV

SEQ ID NO: 207502 - protein, 166 aa, Artificial Sequence
  derived and/or modified sequence
MYEGLWMSCVSQSTGQIQCKVFDSLLNLSSTLQATRALMVVGILLGVIAIFVATVGMKCMKCLEDDEVQKMRMAVIGGAIFLLAGLAILVATAWYGNRIVQEFYDPMTPVNARYEFGQALFTGWAAASLCLLGGALLCCSCPRKTTSYPTPRPYPKPAPSSGKDYV

SEQ ID NO: 207503 - DNA, 636 bp, Artificial Sequence
  derived and/or modified sequence
atggcaaatgctggcttgcagctcctggggttcattttagcattcttgggttggattggcgcaatcgtgtcaaccgcattaccgcaatggaggatctactcctacgctggagataatatcgttacagcacaggcaatgtatgaaggactgtggatgtcatgcgtcagccaaagtaccggacagatccaatgcaaggttttcgactcactgctgaatttatccagcactctgcaggctacaagagccttgatggtggttggcatcttacttggagtgattgccatattcgtggccaccgtggggatgaagtgcatgaaatgcttggaagatgatgaagtacagaagatgagaatggccgtcatcggcggagccatctttttgctggcggggctggccattttggtggcaaccgcctggtacggaaacagaatagtgcaggagttctacgacccaatgacaccggtgaacgcccggtacgaattcggccaagcactgttcacgggctgggctgctgctagtctttgtcttctaggaggagccctgctctgttgttcttgcccaaggaagaccacctcctaccccaccccccgcccatatccgaagccagctccgagttcaggaaaggattacgtatag

SEQ ID NO: 207504 - DNA, 501 bp, Artificial Sequence
  derived and/or modified sequence
atgtatgaggggctttggatgtcctgcgtgtcccagagcacaggacagattcagtgtaaggtgttcgatagcttgctgaatctttccagcacgctgcaggctacccgtgctctgatggtcgtgggcattctgctaggcgtgatcgccatttttgtggccacggtgggtatgaagtgcatgaaatgtctggaagacgacgaagtgcagaagatgaggatggccgtgataggaggcgcgatatttctgctggctggcctggcaattctggtggctacggcctggtatgggaatcgtatagtgcaggaattttacgaccctatgacgcctgttaacgctcgatatgaattcggtcaagctctgttcacaggatgggcggctgcatctctgtgccttctgggcggagctctgctgtgttgttcttgtcctcggaaaacgacgtcctatccaactccccgaccatatccaaaaccagcaccgtccagtgggaaggactatgtctag

SEQ ID NO: 207505 - DNA, 636 bp, Artificial Sequence
  derived and/or modified sequence
atggccaatgccggcctgcagctgctgggcttcatcctggccttcctgggctggattggagccatcgtgtccacagccctgccccagtggaggatctacagctatgctggggacaacatcgtgacagcccaggccatgtatgagggcctgtggatgagctgtgtgtcccagagcacaggccagatccagtgcaaggtgtttgacagcctgctgaacctgagcagcaccctgcaggccacccgggccctgatggtggtgggcatcctgctgggcgtgattgccatctttgtggccaccgtgggcatgaagtgcatgaagtgcctggaggatgatgaggtgcagaagatgaggatggctgtgattggaggagccatcttcctgctggccggcctggccatcctggtggccacagcctggtacggcaaccgcatcgtgcaggagttctatgaccccatgacccctgtgaatgcccgctatgaatttggccaggccctcttcaccggctgggccgccgccagcctgtgcctgctgggcggggccctgctgtgctgcagctgccccaggaagaccaccagctaccccaccccccggccctaccccaagccagcccccagcagcggcaaggactatgtgtag

SEQ ID NO: 207506 - DNA, 501 bp, Artificial Sequence
  derived and/or modified sequence
atgtatgagggcctgtggatgagctgtgtgtcccagagcacaggccagatccagtgcaaggtgtttgacagcctgctgaacctgagcagcaccctgcaggccacccgggccctgatggtggtgggcatcctgctgggcgtcatcgccatctttgtggccaccgtgggcatgaagtgcatgaagtgcctggaggatgatgaggtgcagaagatgaggatggccgtcatcggcggggccatcttcctgctggccggcctggccatcctggtggccacagcctggtacggcaacagaattgtgcaggagttctatgaccccatgacccctgtgaatgcccgctatgaatttggccaggccctcttcaccggctgggccgccgccagcctgtgcctgctgggcggggccctgctgtgctgcagctgccccaggaagaccaccagctaccccaccccccggccctaccccaagccagcccccagcagcggcaaggactatgtgtag

SEQ ID NO: 207507 - DNA, 636 bp, Artificial Sequence
  derived and/or modified sequence
atggccaacgccggcctgcagctgctgggcttcatcctggccttcttgggatggattggggctatagtttcgaccgcccttccgcagtggaggatctattcttatgccggcgacaacattgtaactgcacaggcaatgtacgagggtttgtggatgtcctgtgtgagtcagtccaccgggcaaatccagtgtaaagtgtttgacagcctcctcaacctcagcagtacactgcaggcaactagagctctcatggttgtcggcattctgctgggggtgattgccattttcgtggccactgtgggcatgaagtgcatgaaatgtctggaggatgatgaagtgcaaaaaatgcggatggccgtaatcgggggcgccatcttcctactagcagggttggcaatattggtcgcaaccgcctggtatggaaacagaatcgtccaggaattctacgatccaatgacccctgtgaacgcccgctacgagtttggtcaagccttgtttactgggtgggccgcagctagcctgtgtctgctcggcggtgctcttctgtgctgttcttgcccccggaagactacgtcctatccaacgcctcgaccataccctaaacccgcgccttctagcggcaaggactatgtttag

SEQ ID NO: 207508 - DNA, 501 bp, Artificial Sequence
  derived and/or modified sequence
atgtacgagggcctgtggatgagctgcgtgagccagagcaccggccaaatacaatgcaaggtgttcgactcactgctaaacctttcgtctaccctgcaagccactcgggcactgatggtcgtgggaatcctgcttggcgtcattgccatcttcgttgctacagtcggaatgaaatgtatgaagtgtctggaagacgatgaggtgcagaagatgcgaatggccgtaattggcggcgctatctttctgctggccggactcgctatcctcgttgcgactgcctggtacggaaaccgcattgtacaagagttctatgatcctatgacacccgtgaatgccaggtacgaattcggacaggcgttattcaccgggtgggcagccgcttccctctgtctgctcgggggggctctgctttgctgctcttgtccccgaaaaactacatcttaccccactccgcgcccctacccgaagcctgcaccgtcctctggcaaagactatgtgtag

SEQ ID NO: 207509 - DNA, 636 bp, Artificial Sequence
  derived and/or modified sequence
atggccaacgccggattgcagctgctaggctttattctagcattcttgggttggatcggagcaatcgtttccacagccctgccgcagtggcgcatttacagctacgccggtgacaacattgtcacagcccaggccatgtatgaaggactatggatgtcctgcgtgagtcaatcaacgggccaaattcagtgtaaggtgttcgattctctgctgaatctgtccagcaccttgcaggctaccagagcactaatggtggtcggaatcttactcggtgtgattgcaatcttcgtggctactgtaggcatgaagtgtatgaaatgccttgaggatgatgaggttcagaagatgcgaatggctgttatcggcggtgccattttcctgcttgctggtctggctatccttgtcgctactgcttggtatggaaacaggatcgtgcaggagttttatgacccgatgacgcccgtaaacgctcgctacgaattcgggcaagcgctgtttacagggtgggcagccgcatcactttgccttcttggtggtgccttattgtgttgctcctgtccccgaaagactaccagttaccctactcctcgtccctacccaaaacctgcaccctcctccggcaaagattacgtctag

SEQ ID NO: 207510 - DNA, 501 bp, Artificial Sequence
  derived and/or modified sequence
atgtacgaaggactgtggatgtcatgtgtttcccagagtactggtcagatccagtgcaaggtgtttgactcccttctgaaccttagcagtaccttacaggccacaagagcactaatggtggtggggatactccttggagtgatagccatctttgtggccacagtgggtatgaaatgtatgaagtgcttggaagatgatgaagtgcaaaagatgcgcatggctgtgatcggcggagctatttttctgcttgctggtctggcaatactcgttgccactgcctggtatggcaaccggattgtgcaggaattttatgatccaatgactcctgtgaatgcccgatacgaatttgggcaggctctattcactggttgggcagcagcaagcttatgcctgctcggaggcgcacttctgtgctgtagctgcccacgtaagactacaagttatccaacccccaggccctacccgaaaccagctccctcctcggggaaggactacgtgtag

SEQ ID NO: 207511 - DNA, 3481 bp, Artificial Sequence
  derived and/or modified sequence
ctttaaatcgcggcgcccagcggttctgcgtctcagttcccgagcctgggagcaaccgcagcttctagtatccagactccagcgccgccccgggcgcggaccccaaccccgacccagagcttctccagcggcggcgcagcgagcagggctccccgccttaacttcctccgcggggcccagccaccttcgggagtccgggttgcccacctgcaaactctccgccttctgcacctgccacccctgagccagcgcgggcgcccgagcgagtcatggccaacgcggggctgcagctgttgggcttcattctcgccttcctgggatggatcggcgccatcgtcagcactgccctgccccagtggaggatttactcctatgccggcgacaacatcgtgaccgcccaggccatgtacgaggggctgtggatgtcctgcgtgtcgcagagcaccgggcagatccagtgcaaagtctttgactccttgctgaatctgagcagcacattgcaagcaacccgtgccttgatggtggttggcatcctcctgggagtgatagcaatctttgtggccaccgttggcatgaagtgtatgaagtgcttggaagacgatgaggtgcagaagatgaggatggctgtcattgggggtgcgatatttcttcttgcaggtctggctattttagttgccacagcatggtatggcaatagaatcgttcaagaattctatgaccctatgaccccagtcaatgccaggtacgaatttggtcaggctctcttcactggctgggctgctgcttctctctgccttctgggaggtgccctactttgctgttcctgtccccgaaaaacaacctcttacccaacaccaaggccctatccaaaacctgcaccttccagcgggaaagactacgtgtgacacagaggcaaaaggagaaaatcatgttgaaacaaaccgaaaatggacattgagatactatcattaacattaggaccttagaattttgggtattgtaatctgaagtatggtattacaaaacaaacaaacaaacaaaaaacccatgtgttaaaatactcagtgctaaacatggcttaatcttattttatcttctttcctcaatataggagggaagatttttccatttgtattactgcttcccattgagtaatcatactcaactgggggaaggggtgctccttaaatatatatagatatgtatatatacatgtttttctattaaaaatagacagtaaaatactattctcattatgttgatactagcatacttaaaatatctctaaaataggtaaatgtatttaattccatattgatgaagatgtttattggtatattttctttttcgtctatatatacatatgtaacagtcaaatatcatttactcttcttcattagctttgggtgcctttgccacaagacctagcctaatttaccaaggatgaattctttcaattcttcatgcgtgcccttttcatatacttattttattttttaccataatcttatagcacttgcatcgttattaagcccttatttgttttgtgtttcattggtctctatctcctgaatctaacacatttcatagcctacattttagtttctaaagccaagaagaatttattacaaatcagaactttggaggcaaatctttctgcatgaccaaagtgataaattcctgttgaccttcccacacaatccctgtactctgacccatagcactcttgtttgctttgaaaatatttgtccaattgagtagctgcatgctgttcccccaggtgttgtaacacaactttattgattgaatttttaagctacttattcatagttttatatccccctaaactacctttttgttccccattccttaattgtattgttttcccaagtgtaattatcatgcgttttatatcttcctaataaggtgtggtctgtttgtctgaacaaagtgctagactttctggagtgataatctggtgacaaatattctctctgtagctgtaagcaagtcacttaatctttctacctcttttttctatctgccaaattgagataatgatacttaaccagttagaagaggtagtgtgaatattaattagtttatattactctcattctttgaacatgaactatgcctatgtagtgtctttatttgctcagctggctgagacactgaagaagtcactgaacaaaacctacacacgtaccttcatgtgattcactgccttcctctctctaccagtctatttccactgaacaaaacctacacacataccttcatgtggttcagtgccttcctctctctaccagtctatttccactgaacaaaacctacgcacataccttcatgtggctcagtgccttcctctctctaccagtctatttccattctttcagctgtgtctgacatgtttgtgctctgttccattttaacaactgctcttacttttccagtctgtacagaatgctatttcacttgagcaagatgatgtaatggaaagggtgttggcattggtgtctggagacctggatttgagtcttggtgctatcaatcaccgtctgtgtttgagcaaggcatttggctgctgtaagcttattgcttcatctgtaagcggtggtttgtaattcctgatcttcccacctcacagtgatgttgtggggatccagtgagatagaatacatgtaagtgtggttttgtaatttaaaaagtgctatactaagggaaagaattgaggaattaactgcatacgttttggtgttgcttttcaaatgtttgaaaacaaaaaaaatgttaagaaatgggtttcttgccttaaccagtctctcaagtgatgagacagtgaagtaaaattgagtgcactaaacaaataagattctgaggaagtcttatcttctgcagtgagtatggcccgatgctttctgtggctaaacagatgtaatgggaagaaataaaagcctacgtgttggtaaatccaacagcaagggagatttttgaatcataataactcataaggtgctatctgttcagtgatgccctcagagctcttgctgttagctggcagctgacgctgctaggatagttagtttggaaatggtacttcataataaactacacaaggaaagtcagccactgtgtcttatgaggaattggacctaataaattttagtgtgccttccaaacctgagaatatatgcttttggaagttaaaatttaaatggcttttgccacatacatagatcttcatgatgtgtgagtgtaattccatgtggatatcagttaccaaacattacaaaaaaattttatggcccaaaatgaccaacgaaattgttacaatagaatttatccaattttgatctttttatattcttctaccacacctggaaacagaccaatagacattttggggttttataataggaatttgtataaagcattactctttttcaataaattgttttttaatttaaaaaaaggatta

SEQ ID NO: 207512 - DNA, 1452 bp, Artificial Sequence
  derived and/or modified sequence
tcagttcccgagcctgggagcaaccgcagcttctagtatccagactccagcgccgccccgggcgcggaccccaaccccgacccagagcttctccagcggcggcgcagcgagcagggctccccgccttaacttcctccgcggggcccagccaccttcgggagtccgggttgcccacctgcaaactctccgccttctgcacctgccccagtggaggatttactcctatgccggcgacaacatcgtgaccgcccaggccatgtacgaggggctgtggatgtcctgcgtgtcgcagagcaccgggcagatccagtgcaaagtctttgactccttgctgaatctgagcagcacattgcaagcaacccgtgccttgatggtggttggcatcctcctgggagtgatagcaatctttgtggccaccgttggcatgaagtgtatgaagtgcttggaagacgatgaggtgcagaagatgaggatggctgtcattgggggtgcgatatttcttcttgcaggtctggctattttagttgccacagcatggtatggcaatagaatcgttcaagaattctatgaccctatgaccccagtcaatgccaggtacgaatttggtcaggctctcttcactggctgggctgctgcttctctctgccttctgggaggtgccctactttgctgttcctgtccccgaaaaacaacctcttacccaacaccaaggccctatccaaaacctgcaccttccagcgggaaagactacgtgtgacacagaggcaaaaggagaaaatcatgttgaaacaaaccgaaaatggacattgagatactatcattaacattaggaccttagaattttgggtattgtaatctgaagtatggtattacaaaacaaacaaacaaacaaaaaacccatgtgttaaaatactcagtgctaaacatggcttaatcttattttatcttctttcctcaatataggagggaagatttttccatttgtattactgcttcccattgagtaatcatactcaactgggggaaggggtgctccttaaatatatatagatatgtatatatacatgtttttctattaaaaatagacagtaaaatactattctcattatgttgatactagcatacttaaaatatctctaaaataggtaaatgtatttaattccatattgatgaagatgtttattggtatattttctttttcgtctatatatacatatgtaacagtcaaatatcatttactcttcttcattagctttgggtgcctttgccacaagacctagcctaatttaccaaggatgaattctttcaattcttcatgcgtgcccttttcatatacttattttattttttaccataatcttatagcacttgcatcgttattaagcccttatttgttttgtgtttcattggtctctatctcctgaatctaacacatttcatagcctacatttt

SEQ ID NO: 207513 - DNA, 636 bp, Artificial Sequence
  derived and/or modified sequence
atggccaacgccggcctgcagctgctgggcttcatcctggccttcctgggctggatcggcgccatcgtgagcaccgccctgccccagtggagaatctacagctacgccggcgacaacatcgtgaccgcccaggccatgtacgagggcctgtggatgagctgcgtgagccagagcaccggccagatccagtgcaaggtgttcgacagcctgctgaacctgagcagcaccctgcaggccaccagagccctgatggtggtgggcatcctgctgggcgtgatcgccatcttcgtggccaccgtgggcatgaagtgcatgaagtgcctggaggacgacgaggtgcagaagatgagaatggccgtgatcggcggcgccatcttcctgctggccggcctggccatcctggtggccaccgcctggtacggcaacagaatcgtgcaggagttctacgaccccatgacccccgtgaacgccagatacgagttcggccaggccctgttcaccggctgggccgccgccagcctgtgcctgctgggcggcgccctgctgtgctgcagctgccccagaaagaccaccagctaccccacccccagaccctaccccaagcccgcccccagcagcggcaaggactacgtgtag

SEQ ID NO: 207514 - DNA, 501 bp, Artificial Sequence
  derived and/or modified sequence
atgtacgagggcctgtggatgagctgcgtgagccagagcaccggccagatccagtgcaaggtgttcgacagcctgctgaacctgagcagcaccctgcaggccaccagagccctgatggtggtgggcatcctgctgggcgtgatcgccatcttcgtggccaccgtgggcatgaagtgcatgaagtgcctggaggacgacgaggtgcagaagatgagaatggccgtgatcggcggcgccatcttcctgctggccggcctggccatcctggtggccaccgcctggtacggcaacagaatcgtgcaggagttctacgaccccatgacccccgtgaacgccagatacgagttcggccaggccctgttcaccggctgggccgccgccagcctgtgcctgctgggcggcgccctgctgtgctgcagctgccccagaaagaccaccagctaccccacccccagaccctaccccaagcccgcccccagcagcggcaaggactacgtgtag

SEQ ID NO: 207515 - protein, 252 aa, Artificial Sequence
  derived and/or modified sequence
MAQLCGLRRSRAFLALLGSLLLSGVLAADRERSIHDFCLVSKVVGRCRASMPRWWYNVTDGSCQLFVYGGCDGNSNNYLTKEECLKKCATVTENATGDLATSRNAADSSVPSAPRRQDSEDHSSDMFNYEEYCTANAVTGPCRASFPRWYFDVERNSCNNFIYGGCRGNKNSYRSEEACMLRCFRQQENPPLPLGSKVVVLAGLFVMVLILFLGASMVYLIRVARRNQERALRTVWSSGDDKEQLVKNTYVL

SEQ ID NO: 207516 - DNA, 759 bp, Artificial Sequence
  derived and/or modified sequence
atggcccaactgtgcgggttgaggagaagccgcgcatttttggctctcctggggtcactactcttaagcggagtgctcgcagctgatagagagagaagcatccacgatttctgcttggtttcaaaggtagtggggaggtgtcgtgcaagtatgccccgatggtggtataatgtcacagacggtagttgccagttatttgtgtatgggggctgcgatggcaattcgaataactacctgactaaagaagagtgcctcaaaaagtgtgcaacagtgacagagaatgccacaggcgacctggcgacttcaaggaacgccgcggactccagcgtgcctagtgctccccggaggcaggattcagaggaccactccagcgatatgtttaattacgaggagtactgtaccgcgaatgctgtgacaggaccctgccgtgcttctttcccaagatggtatttcgacgtggagcgcaacagctgcaataacttcatttacggaggctgccgcgggaacaagaatagttatcgaagcgaggaagcttgtatgttgcgatgtttcaggcagcaggagaatcctccactgcccttgggctctaaggtggttgttctggccggtcttttcgtcatggtcctaatcctgttcctgggcgcctccatggtttatctcatacgcgtggccagacgaaaccaggagagggccctgaggaccgtttggtcatctggcgatgataaggagcagctcgtgaagaatacctacgttctgtag

SEQ ID NO: 207517 - DNA, 759 bp, Artificial Sequence
  derived and/or modified sequence
atggcccagctgtgtggcctgcggcgcagccgggccttcctggccctgctgggcagcctgctgctgtctggagtgctggccgctgaccgggagaggagcatccatgacttctgcctggtgtccaaggtggtgggccgctgccgggcctccatgccccgctggtggtacaacgtgacagatggcagctgccagctgtttgtgtatggaggctgtgatggcaacagcaacaactacctgaccaaggaggagtgcctgaagaagtgtgccaccgtgacagaaaatgccaccggggacctggccaccagcagaaatgctgctgacagctctgtgcccagcgccccccggcggcaggacagcgaggaccacagcagtgacatgttcaactatgaggagtactgcacagccaatgctgtgacaggcccctgccgggccagcttcccccgctggtactttgatgtggagaggaacagctgcaacaacttcatctatggaggctgccggggcaacaagaacagctacagaagtgaggaggcctgcatgctgcgctgcttccggcagcaggagaacccccccctgcccctgggcagcaaggtggtggtgctggccggcctgtttgtgatggtgctgatcctcttcctgggcgcctccatggtgtacctgatccgggtggcccggaggaaccaggagcgggccctgaggacagtgtggagcagtggagatgacaaggagcagctggtgaagaacacctacgtgctgtag

SEQ ID NO: 207518 - DNA, 759 bp, Artificial Sequence
  derived and/or modified sequence
atggcccagctgtgcggcctgcggcggagccgggccttcctggccctgttgggtagcctcttactgtctggggtgctcgccgctgatagagagaggtctattcacgacttttgcctagtatccaaggtcgtgggaagatgtcgtgctagcatgcctcggtggtggtacaacgtgactgatggctcatgccagctgttcgtgtatggaggctgcgacggaaactctaacaattacctaaccaaagaggagtgtctgaaaaaatgtgcaacggtcacagaaaatgccactggtgatcttgccacctcaagaaatgcggcagactcttccgtgcccagtgcaccacggagacaggactctgaggaccactcttctgacatgtttaattatgaagaatactgcaccgccaacgcagtcacaggcccatgtagagcatcatttcccaggtggtattttgacgttgaaaggaattcttgtaataacttcatctacggtggctgccggggcaacaaaaacagctacaggagtgaagaggcctgtatgctgcgctgctttcggcagcaagagaaccctccactgccactgggatctaaggtagtagtgctcgccggactgttcgtcatggtacttattctgtttcttggagcgagtatggtgtacttaattcgggtcgcccgtcgtaatcaggagcgcgcattgagaactgtctggtcttccggagatgataaggaacagcttgtgaagaacacttacgttctgtag

SEQ ID NO: 207519 - DNA, 759 bp, Artificial Sequence
  derived and/or modified sequence
atggcccagctttgtggcttgcgaagatctagagctttcctggcccttcttggtagcctcctgttgtccggagtgctggcggcagaccgggaaaggtccattcatgatttttgtctggtgtctaaagtagtggggcgatgccgagcatccatgccacgttggtggtacaatgtgacagacggctcctgccagctgttcgtctatgggggatgtgatggtaatagtaataactatcttactaaagaagaatgtctaaaaaaatgcgccacggtgacagagaacgccacgggagatctagccacgagtcgaaacgccgcagactcctccgtgcctagcgcaccaaggaggcaggactccgaggatcacagttctgacatgtttaattacgaggagtactgcactgccaacgccgtaacagggccttgcagagctagctttccccgatggtactttgatgtcgaacgcaattcttgtaataactttatctatgggggttgccgcggaaacaagaactcgtacagatctgaagaggcatgtatgctgcgttgcttcagacagcaggaaaacccaccattgccgcttggcagcaaggtggtggtgttggcaggcctcttcgtgatggtgcttatcctgtttctgggcgcatccatggtttatcttatacgggttgcgcgtaggaatcaggaaagagccctgcgcaccgtgtggtcctccggggacgataaggaacaactggtcaagaatacgtacgtgctgtag

SEQ ID NO: 207520 - DNA, 1801 bp, Artificial Sequence
  derived and/or modified sequence
gcggccgcgcaggtgcctgccctttgcgcctgcgcccagctcgccctgcctagccaggtgcgccccgccccctgcctgcccggccaccttcgggagccgcttccaataggcgttcgccattggctctggcgacctccgcgcgttgggaggtgtagcgcggctctgaacgcgctgagggccgttgagtgtcgcaggcggcgagggcgcgagtgaggagcagacccaggcatcgcgcgccgagaaggccgggcgtccccacactgaaggtccggaaaggcgacttccgggggctttggcacctggcggaccctcccggagcgtcggcacctgaacgcgaggcgctccattgcgcgtgcgcgttgaggggcttcccgcacctgatcgcgagaccccaacggctggtggcgtcgcctgcgcgtctcggctgagctggccatggcgcagctgtgcgggctgaggcggagccgggcgtttctcgccctgctgggatcgctgctcctctctggggtcctggcggccgaccgagaacgcagcatccacgacttctgcctggtgtcgaaggtggtgggcagatgccgggcctccatgcctaggtggtggtacaatgtcactgacggatcctgccagctgtttgtgtatgggggctgtgacggaaacagcaataattacctgaccaaggaggagtgcctcaagaaatgtgccactgtcacagagaatgccacgggtgacctggccaccagcaggaatgcagcggattcctctgtcccaagtgctcccagaaggcaggattctgaagaccactccagcgatatgttcaactatgaagaatactgcaccgccaacgcagtcactgggccttgccgtgcatccttcccacgctggtactttgacgtggagaggaactcctgcaataacttcatctatggaggctgccggggcaataagaacagctaccgctctgaggaggcctgcatgctccgctgcttccgccagcaggagaatcctcccctgccccttggctcaaaggtggtggttctggcggggctgttcgtgatggtgttgatcctcttcctgggagcctccatggtctacctgatccgggtggcacggaggaaccaggagcgtgccctgcgcaccgtctggagctccggagatgacaaggagcagctggtgaagaacacatatgtcctgtgaccgccctgtcgccaagaggactggggaagggaggggagactatgtgtgagctttttttaaatagagggattgactcggatttgagtgatcattagggctgaggtctgtttctctgggaggtaggacggctgcttcctggtctggcagggatgggtttgctttggaaatcctctaggaggctcctcctcgcatggcctgcagtctggcagcagccccgagttgtttcctcgctgatcgatttctttcctccaggtagagttttctttgcttatgttgaattccattgcctcttttctcatcacagaagtgatgttggaatcgtttcttttgtttgtctgatttatggtttttttaagtataaacaaaagttttttattagcattctgaaagaaggaaagtaaaatgtacaagtttaataaaaaggggccttcccctttagaataaatttcagcatgtgctttctttatgggagtcctaatttcaaccctaccaaaatgatcacaagacactatctgaggtgtcccattctagaaatagacccctcaaaatagcgtctttcagatctttttgaatgaatccacaagatgaaataaatgtcctattactg

SEQ ID NO: 207521 - DNA, 759 bp, Artificial Sequence
  derived and/or modified sequence
atggcccagctgtgcggcctgagaagaagcagagccttcctggccctgctgggcagcctgctgctgagcggcgtgctggccgccgacagagagagaagcatccacgacttctgcctggtgagcaaggtggtgggcagatgcagagccagcatgcccagatggtggtacaacgtgaccgacggcagctgccagctgttcgtgtacggcggctgcgacggcaacagcaacaactacctgaccaaggaggagtgcctgaagaagtgcgccaccgtgaccgagaacgccaccggcgacctggccaccagcagaaacgccgccgacagcagcgtgcccagcgcccccagaagacaggacagcgaggaccacagcagcgacatgttcaactacgaggagtactgcaccgccaacgccgtgaccggcccctgcagagccagcttccccagatggtacttcgacgtggagagaaacagctgcaacaacttcatctacggcggctgcagaggcaacaagaacagctacagaagcgaggaggcctgcatgctgagatgcttcagacagcaggagaacccccccctgcccctgggcagcaaggtggtggtgctggccggcctgttcgtgatggtgctgatcctgttcctgggcgccagcatggtgtacctgatcagagtggccagaagaaaccaggagagagccctgagaaccgtgtggagcagcggcgacgacaaggagcagctggtgaagaacacctacgtgctgtag

SEQ ID NO: 207522 - protein, 44 aa, Artificial Sequence
  derived and/or modified sequence
MADKPDMGEIASFDKAKLKKTETQEKNTLPTKETIEQEKRSEIS

SEQ ID NO: 207523 - DNA, 135 bp, Artificial Sequence
  derived and/or modified sequence
atggccgacaagcccgacatgggcgagatcgccagcttcgacaaggccaagctgaagaagaccgagacccaggagaagaacaccctgcccaccaaggagaccatcgagcaggagaagagaagcgagatcagctag

SEQ ID NO: 207524 - DNA, 135 bp, Artificial Sequence
  derived and/or modified sequence
atggccgacaaaccagacatgggagagatcgccagcttcgataaagctaagcttaagaagactgagacacaagagaaaaacacgctcccaacaaaggagacaatcgagcaggagaagcggtcagaaatcagctag

SEQ ID NO: 207525 - DNA, 135 bp, Artificial Sequence
  derived and/or modified sequence
atggctgacaagccagacatgggagagatcgccagctttgacaaggccaagctgaagaagacagagacccaggagaagaacaccctgcccaccaaggagaccatcgagcaggagaagaggtctgagatctcctag

SEQ ID NO: 207526 - DNA, 135 bp, Artificial Sequence
  derived and/or modified sequence
atggccgacaagcccgacatgggcgagatcgccagcttcgacaaggccaagttaaagaagaccgaaacacaggagaagaatacgcttcctaccaaggagactattgagcaagagaagcggtccgagatcagctag

SEQ ID NO: 207527 - DNA, 135 bp, Artificial Sequence
  derived and/or modified sequence
atggctgacaagcctgacatgggagagatcgcgagttttgacaaagctaagttgaagaaaaccgagactcaggaaaagaataccctacctactaaggagaccatcgagcaggaaaagcgctctgagatctcctag

SEQ ID NO: 207528 - DNA, 492 bp, Artificial Sequence
  derived and/or modified sequence
atataaggctaggggcgggcgccgctcttttgtttcttgctgcagcaacgcgagtgggagcaccaggatctcgggctcggaacgagactgcacggattgttttaagaaaatggcagacaaaccagacatgggggaaatcgccagcttcgataaggccaagctgaagaaaacggagacgcaggagaagaacaccctgccgaccaaagagaccattgagcaggagaagcggagtgaaatttcctaagatcctggaggatttcctacccccgtcctcttcgagaccccagtcgtgatgtggaggaagagccacctgcaagatggacacgagccacaagctgcactgtgaacctgggcactccgcgccgatgccaccggcctgtgggtctctgaagggacccccccccaatcggactgccaaattctccggtttgccccgggatattatagaaaattatttgtatgaataatgaaaataaaacacacctcgtggca

SEQ ID NO: 207529 - protein, 25 aa, Artificial Sequence [sequence omitted]

SEQ ID NO: 207530 - protein, 318 aa, Artificial Sequence
  derived and/or modified sequence
MDKQNSQMNASHPETNLPVGYPPQYPPTAFQGPPGYSGYPGPQVSYPPPPAGHSGPGPAGFPVPNQPVYNQPVYNQPVGAAGVPWMPAPQPPLNCPPGLEYLSQIDQILIHQQIELLEVLTGFETNNKYEIKNSFGQRVYFAAEDTDCCTRNCCGPSRPFTLRIIDNMGQEVITLERPLRCSSCCCPCCLQEIEIQAPPGVPIGYVIQTWHPCLPKFTIQNEKREDVLKISGPCVVCSCCGDVDFEIKSLDEQCVVGKISKHWTGILREAFTDADNFGIQFPLDLDVKMKAVMIGACFLIDFMFFESTGSQEQKSGVW

SEQ ID NO: 207531 - protein, 30 aa, Artificial Sequence
  derived and/or modified sequence
MKAVMIGACFLIDFMFFESTGSQEQKSGVW

SEQ ID NO: 207532 - protein, 249 aa, Artificial Sequence
  derived and/or modified sequence
MDKQNSQMNASHPETNLPVGYPPQYPPTAFQGPPGYSGYPGPQVSYPPPPAGHSGPGPAGFPVPNQPVYNQPVYNQPVGAAGVPWMPAPQPPLNCPPGLEYLSQIDQILIHQQIELLEVLTGFETNNKYEIKNSFGQRVYFAAEDTDCCTRNCCGPSRPFTLRIIDNMGQEVITLERPLRCSSCCCPCCLQEIEIQAPPGVPIGYVIQTWHPCLPKFTIQNEKREDVLKISGPCVVCSCCGDVDFEIKS

SEQ ID NO: 207533 - DNA, 957 bp, Artificial Sequence
  derived and/or modified sequence
atggataagcaaaattctcagatgaacgccagtcatcccgagaccaatttgcccgtcggatatcctccacaataccctcccacagcctttcagggaccccctgggtactctggttacccaggacctcaggtctcctaccctccaccaccggccggacacagcggtcccgggccagccggcttccctgtgcctaatcaacctgtgtacaatcagccagtatataaccagccagtgggagccgcgggggtgccctggatgcctgctccgcagccgcctctgaactgtcccccaggactcgaataccttagtcagatagatcagattttaattcaccagcaaatagaactcctcgaggttttgactggcttcgagacgaacaacaagtatgagattaagaactcctttgggcagcgggtctatttcgccgcggaagacaccgactgctgtacccggaattgctgtggcccctccagaccctttactcttagaattattgacaatatgggccaggaggtgattaccctcgaacggcctctgcgctgttcgagctgttgctgtccctgctgcctccaggaaatcgaaatccaggctcctcccggggtcccaatcgggtacgtgattcagacttggcacccttgcctgcctaaatttactatacaaaatgagaaacgcgaagatgttctgaagatatctggcccctgcgttgtatgcagctgttgtggtgatgtggactttgagataaaatctctggacgagcaatgtgtcgtgggcaagataagcaagcattggaccggaatcctcagagaagcattcaccgacgccgacaatttcgggattcagttcccattagacctggacgtcaagatgaaggctgtcatgatcggagcgtgttttctgatcgatttcatgtttttcgagtcaacaggcagtcaggaacagaagagtggggtctggtag

SEQ ID NO: 207534 - DNA, 750 bp, Artificial Sequence
  derived and/or modified sequence
atggacaaacagaacagccagatgaacgcaagccaccctgagacaaacctccctgtcggctaccccccgcagtatccccccacggcttttcaagggcctccaggatacagcgggtatcccggtccccaggtttcctacccaccacctcccgcaggacactccggaccaggccccgccggctttccagtgcctaaccagccagtctacaaccagcctgtgtataatcagcctgtcggagctgcaggagtcccatggatgcctgctccgcagccacctctcaactgtcctcctggcttagaatacttaagccagatagaccagatcctgatccaccagcaaattgagttacttgaggtgctgacaggctttgagacaaataacaagtacgaaatcaagaacagctttgggcagcgcgtctatttcgccgctgaagatactgactgctgtacacggaattgctgtggaccatcacgcccttttacactcaggatcatcgacaatatgggacaagaggttattaccctcgaaaggcccctcagatgtagctcctgctgttgcccttgttgcctccaggaaattgagattcaggctccgcctggcgttccaattgggtacgtaattcagacatggcatccctgcttgcccaagtttacgattcagaacgaaaaaagagaagacgtgctcaagattagcgggccatgcgtcgtatgttcatgctgtggcgacgttgacttcgaaataaaatcatag

SEQ ID NO: 207535 - DNA, 957 bp, Artificial Sequence
  derived and/or modified sequence
atggacaagcagaacagccagatgaatgccagccaccctgagaccaacctgcctgtgggctacccaccccagtacccacccacagccttccagggccccccaggctacagcggctacccaggcccccaggtgtcctacccacctcctcctgctggccacagcggccctggccctgctggcttccctgtgcccaaccagcctgtgtacaaccagcctgtgtacaaccagcctgtgggcgctgctggggtgccctggatgcctgccccccagccccccctgaactgccccccaggcctggagtacctgagccagattgaccagatcctgatccaccagcagatcgagctgctggaggtgctgactggatttgagaccaacaacaagtatgagatcaagaacagctttggccagagggtgtactttgctgctgaggacacagactgctgcaccaggaactgctgcggccccagccggcccttcaccctgcgcatcatcgacaacatgggccaggaggtgatcaccctggagcggcccctgcgctgcagcagctgctgctgcccctgctgcctgcaggagattgagatccaggcccctcctggggtgcccatcggctacgtgatccagacctggcacccctgcctgcccaagttcaccatccagaatgagaagagagaagatgtgctgaagatcagcggcccctgtgtggtgtgcagctgctgcggagatgtggactttgagatcaagagcctggatgagcagtgtgtggtgggcaagatcagcaagcactggacaggcatcctgcgggaggccttcacagatgctgacaactttggcatccagttccccctggacctggatgtgaagatgaaggctgtgatgattggagcctgcttcctgattgacttcatgttctttgagagcacaggcagccaggagcagaagtctggagtgtggtag

SEQ ID NO: 207536 - DNA, 750 bp, Artificial Sequence
  derived and/or modified sequence
atggacaagcagaacagccagatgaatgccagccaccctgagaccaacctgcctgtgggctacccaccccagtacccacccacagccttccagggccccccaggctacagcggctacccaggcccccaggtgtcctacccacctcctcctgctggccacagcggccctggccctgctggcttccctgtgcccaaccagcctgtgtacaaccagcctgtgtacaaccagcctgtgggcgctgctggggtgccctggatgcctgccccccagccccccctgaactgccccccaggcctggagtacctgagccagattgaccagatcctgatccaccagcagatcgagctgctggaggtgctgactggatttgagaccaacaacaagtatgagatcaagaacagctttggccagagggtgtactttgctgctgaggacacagactgctgcaccaggaactgctgcggccccagccggcccttcaccctgcgcatcatcgacaacatgggccaggaggtgatcaccctggagcggcccctgcgctgcagcagctgctgctgcccctgctgcctgcaggagattgagatccaggcccctcctggggtgcccatcggctacgtgatccagacctggcacccctgcctgcccaagttcaccatccagaatgagaagagagaagatgtgctgaagatcagcggcccctgtgtggtgtgcagctgctgcggagatgtggactttgagatcaagagctag

SEQ ID NO: 207537 - DNA, 957 bp, Artificial Sequence
  derived and/or modified sequence
atggacaagcagaacagccagatgaacgccagccaccccgagaccaatctccctgttggctacccaccccaataccctccaaccgcgttccagggccctccgggatactccgggtatcccgggccccaggttagttatccccctcccccagccggccactctggtcctggccctgcaggattcccagttcccaaccagccagtatataaccagcccgtatataatcagcctgtcggagctgccggagtcccttggatgcccgcaccgcagccccctttgaattgtccccctgggctggagtacctctcgcagattgatcagatcttgattcaccaacagatcgaattgctcgaagtgctcacaggatttgaaactaacaacaaatatgaaatcaaaaattcttttggtcagcgggtctattttgcagcagaggatacggactgttgcacgagaaactgttgtgggcctagtcgcccctttaccttacggattatcgataatatgggacaagaagttatcactttagaaagacctcttcgctgctcttcctgctgttgtccatgttgtctccaggagatcgaaatccaggcgccccctggagtgcctatcggctatgttatccagacgtggcatccgtgtctgccaaaattcactatacagaacgagaagagggaagacgtgttaaaaatctccgggccatgtgtggtgtgttcctgctgtggcgacgtagatttcgagataaagagtctggacgaacaatgcgtcgtggggaaaatttcgaaacactggaccgggattctcagagaggcctttaccgacgcggataattttggaatacagttccctctggacctggatgtgaagatgaaagccgtgatgatcggggcctgcttcttgattgatttcatgttcttcgagtccaccggtagccaggaacaaaaatctggagtgtggtag

SEQ ID NO: 207538 - DNA, 750 bp, Artificial Sequence
  derived and/or modified sequence
atggacaagcagaacagccagatgaacgccagccaccccgagaccaatctgccggtgggctatcccccccagtacccacctactgcctttcaggggccacccgggtactcgggctaccctggcccccaggtcagctacccccctccgcccgctggccacagcggaccagggcctgccggctttccggtcccgaatcagccagtgtataaccagcccgtctacaaccagcctgtcggggctgccggcgtgccttggatgccagcacctcagccacccctgaactgcccacctggcttggagtacctctcacagattgaccagattctcatccatcaacagattgagctgctcgaggtgttaactgggttcgaaactaataacaaatacgagatcaagaactcatttggtcagcgggtctatttcgcagctgaagatacagattgttgtactagaaattgttgtgggccgtcaagaccttttacattgagaattatagataatatgggccaggaagttatcaccctggaacggcctcttcgatgcagcagctgttgctgtccttgttgtcttcaggagatcgagatccaagcaccacctggtgttcccattggatatgtcattcagacgtggcacccttgcttgcccaaatttaccatccagaatgagaagagagaggatgtgttgaagataagcggcccatgcgtggtctgctcttgttgcggcgacgtggatttcgagatcaagtcatag

SEQ ID NO: 207539 - DNA, 2233 bp, Artificial Sequence
  derived and/or modified sequence
gagtcccagttcctctccttaaccaccggacaaacgtctctggagtctctccaatgagcaagaaagcaagtcgggggtaggggaggggcctcacaccagggggtgggcgcagtccctcctccagctccttcaccctccagtagtctcgtgggtccccgagcgccagcgcgggaaccgggaaaaggaaaccgtgttgtgtacgtaagattcaggaaacgaaaccaggagccgcgggtgttggcgcaaaggttactcccagacccttttccggctgacttctgagaaggttgcgcagcagctgtgcccggcagtctagaggcgcagaagaggaagccatcgcctggccccggctctctggaccttgtctcgctcgggagcggaaacagcggcagccagagaactgttttaatcatggacaaacaaaactcacagatgaatgcttctcacccggaaacaaacttgccagttgggtatcctcctcagtatccaccgacagcattccaaggacctccaggatatagtggctaccctgggccccaggtcagctacccacccccaccagccggccattcaggtcctggcccagctggctttcctgtcccaaatcagccagtgtataatcagccagtatataatcagccagttggagctgcaggggtaccatggatgccagcgccacagcctccattaaactgtccacctggattagaatatttaagtcagatagatcagatactgattcatcagcaaattgaacttctggaagttttaacaggttttgaaactaataacaaatatgaaattaagaacagctttggacagagggtttactttgcagcggaagatactgattgctgtacccgaaattgctgtgggccatctagaccttttaccttgaggattattgataatatgggtcaagaagtcataactctggagagaccactaagatgtagcagctgttgttgtccctgctgccttcaggagatagaaatccaagctcctcctggtgtaccaataggttatgttattcagacttggcacccatgtctaccaaagtttacaattcaaaatgagaaaagagaggatgtactaaaaataagtggtccatgtgttgtgtgcagctgttgtggagatgttgattttgagattaaatctcttgatgaacagtgtgtggttggcaaaatttccaagcactggactggaattttgagagaggcatttacagacgctgataactttggaatccagttccctttagaccttgatgttaaaatgaaagctgtaatgattggtgcctgtttcctcattgacttcatgttttttgaaagcactggcagccaggaacaaaaatcaggagtgtggtagtggattagtgaaagtctcctcaggaaatctgaagtctgtatattgattgagactatctaaactcatacctgtatgaattaagctgtaaggcctgtagctctggttgtatacttttgcttttcaaattatagtttatcttctgtataactgatttataaaggtttttgtacattttttaatactcattgtcaatttgagaaaaaggacatatgagtttttgcatttattaatgaaacttcctttgaaaaactgctttgaattatgatctctgattcattgtccattttactaccaaatattaactaaggccttattaatttttatataaattatatcttgtcctattaaatctagttacaatttatttcatgcataagagctaatgttattttgcaaatgccatatattcaaaaaagctcaaagataattttctttactattatgttcaaataatattcaatatgcatattatctttaaaaagttaaatgtttttttaatcttcaagaaatcatgctacacttaacttctcctagaagctaatctataccataatattttcatattcacaagatattaaattaccaattttcaaattattgttagtaaagaacaaaatgattctctcccaaagaaagacacattttaaatactccttcactctaaaactctggtattataacttttgaaagttaatatttctacatgaaatgtttagctcttacactctatccttcctagaaaatggtaattgagattactcagatattaattaaatacaatatcatatatatattcacagagtataaacctaaataatgatctattagattcaaatatttgaaataaaaacttgatttttttgta

SEQ ID NO: 207540 - DNA, 1198 bp, Artificial Sequence
  derived and/or modified sequence
gttcctctccttaaccaccggacaaacgtctctggagtctctccaatgagcaagaaagcaagtcgggggtaggggaggggcctcacaccagggggtgggcgcagtccctcctccagctccttcaccctccagtagtctcgtgggtccccgagcgccagcgcgggaaccgggaaaaggaaaccgtgttgtgtacgtaagattcaggaaacgaaaccaggagccgcgggtgttggcgcaaaggttactcccagacccttttccggctgacttctgagaaggttgcgcagcagctgtgcccggcagtctagaggcgcagaagaggaagccatcgcctggccccggctctctggaccttgtctcgctcgggagcggaaacagcggcagccagagcataaaatacacaagaggatttttatggaatggctccttgttacaagaactgttttaatcatggacaaacaaaactcacagatgaatgcttctcacccggaaacaaacttgccagttgggtatcctcctcagtatccaccgacagcattccaaggacctccaggatatagtggctaccctgggccccaggtcagctacccacccccaccagccggccattcaggtcctggcccagctggctttcctgtcccaaatcagccagtgtataatcagccagtatataatcagccagttggagctgcaggggtaccatggatgccagcgccacagcctccattaaactgtccacctggattagaatatttaagtcagatagatcagatactgattcatcagcaaattgaacttctggaagttttaacaggttttgaaactaataacaaatatgaaattaagaacagctttggacagagggtttactttgcagcggaagatactgattgctgtacccgaaattgctgtgggccatctagaccttttaccttgaggattattgataatatgggtcaagaagtcataactctggagagaccactaagatgtagcagctgttgttgtccctgctgccttcaggagatagaaatccaagctcctcctggtgtaccaataggttatgttattcagacttggcacccatgtctaccaaagtttacaattcaaaatgagaaaagagaggatgtactaaaaataagtggtccatgtgttgtgtgcagctgttgtggagatgttgattttgagattaaatctc

SEQ ID NO: 207541 - DNA, 957 bp, Artificial Sequence
  derived and/or modified sequence
atggataaacaaaactctcagatgaacgccagtcaccctgagaccaatctccccgtgggatacccaccccagtatccacccaccgcttttcagggaccccctggttattcggggtacccaggcccacaagtgtcatatccccctcctcccgctggtcacagcggcccagggccagctggcttcccagtgcccaaccaacctgtgtataaccagccagtatacaatcaaccggtgggagcggctggcgtgccatggatgccagcgcctcagccccctctgaattgtcctccgggacttgaatacctcagccagatcgaccaaatcctgatccatcagcagattgaactgctggaggtgctgactggattcgaaaccaacaacaagtatgaaatcaagaacagcttcggacagagagtctacttcgcggcagaagacacagattgctgtacaaggaactgctgtggcccatcgcgcccattcactctcagaatcattgacaatatgggccaagaggtcatcacccttgagagacccctcaggtgtagcagctgttgctgtccgtgttgtctgcaagagattgagatccaagctccccctggagtccccataggttacgtaatccagacctggcacccttgcttgccaaaattcaccattcaaaacgagaaacgagaagatgtgctcaagatttctggtccatgtgtcgtctgctcctgctgcggcgatgtggatttcgagatcaagagcctagacgagcagtgtgtggtgggaaaaattagcaaacactggaccggcattttgcgcgaagcctttaccgacgctgataactttgggatacagtttccactagacctggacgtcaaaatgaaggccgttatgatcggcgcttgcttcttaattgatttcatgtttttcgaatccaccgggtctcaagaacagaagtccggggtttggtag

SEQ ID NO: 207542 - DNA, 750 bp, Artificial Sequence
  derived and/or modified sequence
atggataagcagaactcccaaatgaacgcttcccaccccgaaacaaacttgccggtgggttatccccctcagtatcctccaacagcatttcaggggccacccggttacagcggataccccggtccgcaagtgtcttacccccctccacccgctgggcacagtggacctggacctgcaggtttccccgtgccgaatcagcccgtgtataaccaacctgtatataaccaacctgtgggcgctgctggggttccgtggatgccagccccacagcctcccctgaattgcccccctggcctggaatatctttcccagatcgaccagatcctcatacatcagcagattgagttactcgaggtgctgaccggttttgagacgaataacaaatacgagattaagaactccttcggacagcgtgtatattttgctgcggaggacaccgattgttgtacacggaattgctgtggccctagtaggcctttcacactccgcataattgataatatgggacaagaagttattacactcgagcgacctttacggtgttccagctgttgctgcccgtgttgtcttcaggagatagagattcaggcccctccaggcgtgcccattggctacgttatccagacctggcacccctgcctgccaaagttcacgattcagaacgagaaacgcgaggacgttcttaagatcagcggaccttgtgttgtctgcagctgctgtggagacgttgattttgagataaagtcgtag

SEQ ID NO: 207543 - DNA, 957 bp, Artificial Sequence
  derived and/or modified sequence
atggacaagcagaacagccagatgaacgccagccaccccgagaccaacctgcccgtgggctaccccccccagtacccccccaccgccttccagggcccccccggctacagcggctaccccggcccccaggtgagctacccccccccccccgccggccacagcggccccggccccgccggcttccccgtgcccaaccagcccgtgtacaaccagcccgtgtacaaccagcccgtgggcgccgccggcgtgccctggatgcccgccccccagccccccctgaactgcccccccggcctggagtacctgagccagatcgaccagatcctgatccaccagcagatcgagctgctggaggtgctgaccggcttcgagaccaacaacaagtacgagatcaagaacagcttcggccagagagtgtacttcgccgccgaggacaccgactgctgcaccagaaactgctgcggccccagcagacccttcaccctgagaatcatcgacaacatgggccaggaggtgatcaccctggagagacccctgagatgcagcagctgctgctgcccctgctgcctgcaggagatcgagatccaggccccccccggcgtgcccatcggctacgtgatccagacctggcacccctgcctgcccaagttcaccatccagaacgagaagagagaggacgtgctgaagatcagcggcccctgcgtggtgtgcagctgctgcggcgacgtggacttcgagatcaagagcctggacgagcagtgcgtggtgggcaagatcagcaagcactggaccggcatcctgagagaggccttcaccgacgccgacaacttcggcatccagttccccctggacctggacgtgaagatgaaggccgtgatgatcggcgcctgcttcctgatcgacttcatgttcttcgagagcaccggcagccaggagcagaagagcggcgtgtggtag

SEQ ID NO: 207544 - DNA, 750 bp, Artificial Sequence
  derived and/or modified sequence
atggacaagcagaacagccagatgaacgccagccaccccgagaccaacctgcccgtgggctaccccccccagtacccccccaccgccttccagggcccccccggctacagcggctaccccggcccccaggtgagctacccccccccccccgccggccacagcggccccggccccgccggcttccccgtgcccaaccagcccgtgtacaaccagcccgtgtacaaccagcccgtgggcgccgccggcgtgccctggatgcccgccccccagccccccctgaactgcccccccggcctggagtacctgagccagatcgaccagatcctgatccaccagcagatcgagctgctggaggtgctgaccggcttcgagaccaacaacaagtacgagatcaagaacagcttcggccagagagtgtacttcgccgccgaggacaccgactgctgcaccagaaactgctgcggccccagcagacccttcaccctgagaatcatcgacaacatgggccaggaggtgatcaccctggagagacccctgagatgcagcagctgctgctgcccctgctgcctgcaggagatcgagatccaggccccccccggcgtgcccatcggctacgtgatccagacctggcacccctgcctgcccaagttcaccatccagaacgagaagagagaggacgtgctgaagatcagcggcccctgcgtggtgtgcagctgctgcggcgacgtggacttcgagatcaagagctag

SEQ ID NO: 207545 - protein, 44 aa, Artificial Sequence
  derived and/or modified sequence
MSDKPDMAEIEKFDKSKLKKTEMQEKNPLPSKETIEQEKQASES

SEQ ID NO: 207546 - protein, 44 aa, Artificial Sequence
  derived and/or modified sequence
MSDKPDMAEIEKFDKSKLKKTETQEKNPLPSKETIEQEKQAGES

SEQ ID NO: 207547 - DNA, 135 bp, Artificial Sequence
  derived and/or modified sequence
atgagcgataagcctgacatggctgagatcgagaagtttgataaaagcaagctaaaaaagaccgagatgcaagagaagaaccctctccccagcaaggagacgattgagcaagagaagcaggctagcgagtcttag

SEQ ID NO: 207548 - DNA, 135 bp, Artificial Sequence
  derived and/or modified sequence
atgtctgacaagccagacatggccgagattgagaagtttgacaagagcaagctgaagaagacagagatgcaggagaagaaccccctgcccagcaaggagaccatcgagcaggagaagcaggccagcgagagctag

SEQ ID NO: 207549 - DNA, 135 bp, Artificial Sequence
  derived and/or modified sequence
atgagcgacaagcccgacatggccgagatcgagaagttcgacaagagcaaactaaagaaaacggagatgcaggagaagaatccactgcctagcaaggagacaatagaacaggagaagcaggctagcgagagctag

SEQ ID NO: 207550 - DNA, 135 bp, Artificial Sequence
  derived and/or modified sequence
atgtccgacaaaccggatatggcggaaatcgagaaatttgacaaatccaagcttaaaaagaccgagatgcaagagaaaaatcctctcccctctaaagaaactatcgagcaagaaaagcaggccagcgaatcttag

SEQ ID NO: 207551 - DNA, 618 bp, Artificial Sequence
  derived and/or modified sequence
ggacaactcggtggtggccactgcgcagaccagacttcgctcgttctcgcatgcctcgctccgcttttcctccgcaaccatgtctgacaaacccgatatggctgagattgagaaattcgataagtcgaaactgaagaagacagagatgcaagagaaaaatccactgccttccaaagaaacgattgaacaggagaagcaagcaagcgaatcgtaatgaggcgtgcaccgccaatatgcattgtacattccacaagtattgccttcttattttacttcttttagctgtttaactttgtaagatgcaaagaggttggatcaagtttaaatgactatgctgcccctttcacatcaaagaactactgacaacgaaggctgcgcctgcctctcccatctgtctatctggctggcagggaaggaaagaacttgcttgttggtgaaggaagaagtggggtgggacgacagtgaaatctagagtaaaaccaggctggcccaaggtgtcctgcaggctgtaatgcagtttaatcagagtgccatttttttttttgttcaaatgattttaattattggaatgcacagtttttttaatatgcaaataaaaagtttaaaaacttaaaaaaa

SEQ ID NO: 207552 - DNA, 135 bp, Artificial Sequence
  derived and/or modified sequence
atgagcgacaagcccgacatggccgagatcgagaagttcgacaagagcaagctgaagaagaccgagatgcaggagaagaaccccctgcccagcaaggagaccatcgagcaggagaagcaggccagcgagagctag

SEQ ID NO: 207553 - DNA, 135 bp, Artificial Sequence
  derived and/or modified sequence
atgagcgacaagcccgacatggccgagatcgagaagttcgacaagagcaagctgaagaagaccgagacccaggagaagaaccccctgcccagcaaggagaccatcgagcaggagaagcaggccggcgagagctag

SEQ ID NO: 207554 - DNA, 135 bp, Artificial Sequence
  derived and/or modified sequence
atgtcagataagcctgacatggccgagattgaaaagtttgataagtccaagctaaaaaaaaccgaaacccaggaaaaaaacccgctaccttccaaggaaacaatcgagcaggaaaagcaggctggagagagctag

SEQ ID NO: 207555 - DNA, 135 bp, Artificial Sequence
  derived and/or modified sequence
atgtcagataaacccgatatggccgaaatagaaaaatttgacaaatccaagctaaagaaaaccgaaacgcaggagaagaatcctctccccagcaaggaaacaatcgaacaggagaagcaggcgggggagtcttag

SEQ ID NO: 207556 - DNA, 135 bp, Artificial Sequence
  derived and/or modified sequence
atgtctgacaaaccagatatggctgagattgagaagtttgacaaatctaagctgaagaagactgagacacaagagaagaacccgctcccctctaaggagacgatagagcaggaaaagcaagccggtgagtcatag

SEQ ID NO: 207557 - DNA, 135 bp, Artificial Sequence
  derived and/or modified sequence
atgtctgacaagcctgacatggccgagatcgagaaattcgacaagtctaagctgaaaaagacggaaacccaggagaagaaccctctgcctagcaaagaaacaattgagcaggagaaacaagcgggagaatcatag

SEQ ID NO: 207558 - DNA, 135 bp, Artificial Sequence
  derived and/or modified sequence
atgtctgacaagccagacatggccgagattgagaagtttgacaagagcaagctgaagaagacagagacccaggagaagaaccccctgcccagcaaggagaccatcgagcaggagaagcaggccggggagagctag

SEQ ID NO: 207559 - DNA, 135 bp, Artificial Sequence
  derived and/or modified sequence
atgagcgacaagcccgacatggccgagatcgagaagttcgacaagagtaaactgaaaaagactgaaacgcaggagaaaaaccctcttccctccaaagaaaccatcgagcaggagaagcaggccggcgagtcttag

SEQ ID NO: 207560 - DNA, 135 bp, Artificial Sequence
  derived and/or modified sequence
atgagcgacaagcccgacatggccgagatcgagaagttcgacaagagcaagctcaaaaaaactgagacacaagagaaaaatcctctcccctcgaaagagacgatcgaacaagagaaacaagcaggcgagtcctag

SEQ ID NO: 207561 - DNA, 135 bp, Artificial Sequence
  derived and/or modified sequence
atgagcgacaagcccgacatggccgagatcgagaagttcgacaagagcaaactcaagaagacggagacacaagaaaagaatcccctaccatcaaaggaaaccattgaacaggagaaacaagctggcgagtcatag

SEQ ID NO: 207562 - DNA, 135 bp, Artificial Sequence
  derived and/or modified sequence
atgagcgacaagcccgacatggccgagatcgagaagttcgacaagagcaaactaaagaaaactgaaacgcaggagaagaatccccttccatcaaaggagacaattgagcaggagaagcaagccggcgagtcctag

SEQ ID NO: 207563 - DNA, 135 bp, Artificial Sequence
  derived and/or modified sequence
atgtcagacaagccagatatggcggaaatagaaaagttcgataaaagtaagctgaagaaaacggagacgcaagagaagaatcccctgccctcaaaagagacgatcgagcaggagaaacaagcaggggagtcttag

SEQ ID NO: 207564 - DNA, 135 bp, Artificial Sequence
  derived and/or modified sequence
atgtctgataagcccgatatggctgagatcgaaaaattcgataaaagcaagctcaaaaaaaccgaaacacaggaaaaaaatccacttccctccaaggaaaccatcgaacaggaaaagcaagccggagagtcctag

SEQ ID NO: 207565 - DNA, 135 bp, Artificial Sequence
  derived and/or modified sequence
atgtcagataaacccgatatggcagaaattgagaagtttgacaagagcaagctcaaaaaaacagagacccaggagaaaaatcccctgcctagcaaggaaaccatcgagcaggaaaagcaggcaggtgagtcctag

SEQ ID NO: 207566 - DNA, 135 bp, Artificial Sequence
  derived and/or modified sequence
atgtcagacaaaccggatatggcagaaatcgaaaagttcgataagtcaaagctgaagaaaaccgagacacaggaaaagaatcccctgcccagtaaggaaaccatagaacaagagaagcaggccggtgagagttag

SEQ ID NO: 207567 - DNA, 135 bp, Artificial Sequence
  derived and/or modified sequence
atgtccgataaaccagacatggctgagattgagaagttcgacaagtcaaagctaaaaaagaccgaaacacaagagaaaaatcccctacccagcaaagaaaccattgagcaggagaaacaggccggcgaatcatag

SEQ ID NO: 207568 - DNA, 135 bp, Artificial Sequence
  derived and/or modified sequence
atgagcgataaacccgacatggctgagatagagaagttcgataaatccaaacttaagaagaccgagacacaagagaagaatcctctccctagcaaagagaccatagagcaagaaaagcaggcaggagaaagttag

SEQ ID NO: 207569 - DNA, 135 bp, Artificial Sequence
  derived and/or modified sequence
atgagcgataaacctgatatggctgaaatagagaaattcgacaagagcaaactgaagaagaccgagacccaggagaagaatcctctgccgtcaaaagaaacaatagaacaagagaagcaagctggcgagtcgtag

SEQ ID NO: 207570 - DNA, 135 bp, Artificial Sequence
  derived and/or modified sequence
atgagtgacaagccagatatggccgaaatcgaaaagttcgacaaatctaaattaaagaaaacagaaactcaggagaagaatccattaccttctaaagaaacaatagagcaggagaaacaagcaggggagtcctag

SEQ ID NO: 207571 - DNA, 495 bp, Artificial Sequence
  derived and/or modified sequence
ggcaagaccggcttcggggcgcgcggcggccgctttgtgtgcggggctgcattgtgacgcgggcgatgaagccgcttttcctccgcaaccatgtctgacaaacccgatatggctgagatcgagaaattcgataagtcgaaactgaagaagacagagacgcaagagaaaaatccactgccttccaaagaaacgattgaacaggagaagcaagcaggcgaatcgtaatgaggcgtgcgccgccaatatgcactgtacattccacaagcattgccttcttattttacttcttttagctgtttaactttgtaagatgcaaagaggttggatcaagtttaaatgactgtgctgcccctttcacatcaaagaactactgacaacgaaggccgcgcctgcctttcccatctgtctatctatctggctggcagggaaggaaagaacttgcatgttggtgaaggaagaagtggggtggaagaagtggggtgggacgacagtgaa

SEQ ID NO: 207572 - DNA, 767 bp, Artificial Sequence
  derived and/or modified sequence
gtgaaggcattccctaaatccgagcccgagtggttctccccgggaaggctactttggggagctggggggatgcgaaacaccctagatactggataatggggtggggaaatcgatgatttaagaacaaaaccgaaaaactggcgttttgccgtgccgctcggaggggacattaaaaaatttcttagtgtttgcccgcaaagcttttcctccgcaaccatgtctgacaaacccgatatggctgagatcgagaaattcgataagtcgaaactgaagaagacagagacgcaagagaaaaatccactgccttccaaagaaacgattgaacaggagaagcaagcaggcgaatcgtaatgaggcgtgcgccgccaatatgcactgtacattccacaagcattgccttcttattttacttcttttagctgtttaactttgtaagatgcaaagaggttggatcaagtttaaatgactgtgctgcccctttcacatcaaagaactactgacaacgaaggccgcgcctgcctttcccatctgtctatctatctggctggcagggaaggaaagaacttgcatgttggtgaaggaagaagtggggtggaagaagtggggtgggacgacagtgaaatctagagtaaaaccaagctggcccaaggtgtcctgcaggctgtaatgcagtttaatcagagtgccatttttttttttgttcaaatgattttaattattggaatgcacaatttttttaatatgcaaataaaaagtttaaaaactta

SEQ ID NO: 207573 - DNA, 1702 bp, Artificial Sequence
  derived and/or modified sequence
aactcggtggtggccactgcgcagaccagacttcgctcgtactcgtgcgcctcgcttcggtgagccccagggcccctgcctccttcctcctgccgtcctgcctccgtccccgccctttcatcatccgcgtccctgtgaaggcattccctaaatccgagcccgagtggttctccccgggaaggctactttggggagctggggggatgcgaaacaccctagatactggataatggggtggggaaatcgatgatttaagaacaaaaccgaaaaactggcgttttgccgtgccgctcggaggggacattaaaaaatttcttagtgtttgcccgcaaaggtattgtgcgttgccttggaggctgagatatgggggaatagacaagtcctttgttctgaggttcatcttccgagccccgagcctcctcccagcctcggacggctgcgcgggctgcatctgtgcagcctggcggcggcggggctgtgctatgacatctttacagtccttcttgcagagacatgtgtgccagggatgccgaattgccgggagagcaggcaagaccggcttcggggcgcgcggcggccgctttgtgtgcggggctgcattgtgacgcgggcgatgaagccggtagggcggtggtcggaagctccagccgcggccgccgcctttgtgagaggactagaaagccggatccggcccgcatccttgcggagaggccgcggctaggaaatggaaacgcttttcctacctgggctccattttaggaattcttgccgatttttcccacttgaatttggaagtggctttcctcttctttccttgtcctagccagcctttaattttaaacgctgtaattaacaattcgcagtggtcaatttcctttattctgcaagattcggctttgagaggcatccgccctctttggtccacagcgttttgaaatatggggaggaggggcgcggggggtgtcgcctctttttctgtagaaagaggaagctcgtgagcgcggaacggcagcagtaggagagcgagaagggtttttttcaggctgcgggtcggagggcagaagtgcagttcccagcccagagacagcggggcgggtggctcttcctcacgctcgctcttggcttgctccctgcagcttttcctccgcaaccatgtctgacaaacccgatatggctgagatcgagaaattcgataagtcgaaactgaagaagacagagacgcaagagaaaaatccactgccttccaaagaaacgattgaacaggagaagcaagcaggcgaatcgtaatgaggcgtgcgccgccaatatgcactgtacattccacaagcattgccttcttattttacttcttttagctgtttaactttgtaagatgcaaagaggttggatcaagtttaaatgactgtgctgcccctttcacatcaaagaactactgacaacgaaggccgcgcctgcctttcccatctgtctatctatctggctggcagggaaggaaagaacttgcatgttggtgaaggaagaagtggggtggaagaagtggggtgggacgacagtgaaatctagagtaaaaccaagctggcccaaggtgtcctgcaggctgtaatgcagtttaatcagagtgccatttttttttttgttcaaatgattttaattattggaatgcacaatttttttaatatgcaaataaaaagtttaaaaactt

SEQ ID NO: 207574 - DNA, 628 bp, Artificial Sequence
  derived and/or modified sequence
acaactcggtggtggccactgcgcagaccagacttcgctcgtactcgtgcgcctcgcttcgcttttcctccgcaaccatgtctgacaaacccgatatggctgagatcgagaaattcgataagtcgaaactgaagaagacagagacgcaagagaaaaatccactgccttccaaagaaacgattgaacaggagaagcaagcaggcgaatcgtaatgaggcgtgcgccgccaatatgcactgtacattccacaagcattgccttcttattttacttcttttagctgtttaactttgtaagatgcaaagaggttggatcaagtttaaatgactgtgctgcccctttcacatcaaagaactactgacaacgaaggccgcgcctgcctttcccatctgtctatctatctggctggcagggaaggaaagaacttgcatgttggtgaaggaagaagtggggtggaagaagtggggtgggacgacagtgaaatctagagtaaaaccaagctggcccaaggtgtcctgcaggctgtaatgcagtttaatcagagtgccatttttttttttgttcaaatgattttaattattggaatgcacaatttttttaatatgcaaataaaaagtttaaaaactta

SEQ ID NO: 207575 - DNA, 657 bp, Artificial Sequence
  derived and/or modified sequence
gacaactcggtggtggccactgcgcagaccagacttcgctcgtactcgtgcgcctcgcttcgcttttcctccgcaaccatgtctgacaaacccgatatggctgagatcgagaaattcgataagtcgaaactgaagaagacagagacgcaagagaaaaatccactgccttccaaagaaacgattgaacaggagaagcaagcaggcgaatcgtaatgaggcgtgcgccgccaatatgcactgtacattccacaagcattgccttcttattttacttcttttagctgtttaactttgtaagatgcaaagaggttggatcaagtttaaatgactgtgctgcccctttcacatcaaagaactactgacaacgaaggccgcgcctgcctttcccatctgtctatctatctggctggcagggaaggaaagaacttgcatgttggtgaaggaagaagtggggtggaagaagtggggtgggacgacagtgaaatctagagtaaaaccaagctggcccaaggtgtcctgcaggctgtaatgcagtttaatcagagtgccatttttttttttgttcaaatgattttaattattggaatgcacaatttttttaatatgcaaataaaaagtttaaaaacttaaaaaaaaaaaaaaaaaaaaaaaaaaaaa

SEQ ID NO: 207576 - RNA, 135 nt, Artificial Sequence
  derived and/or modified sequence
auguccgauaaaccagacauggcugagauugagaaguucgacaagucaaagcuaaaaaagaccgaaacacaagagaaaaauccccuacccagcaaagaaaccauugagcaggagaaacaggccggcgaaucauag

SEQ ID NO: 207577 - RNA, 135 nt, Artificial Sequence
  derived and/or modified sequence
augagcgauaaacccgacauggcugagauagagaaguucgauaaauccaaacuuaagaagaccgagacacaagagaagaauccucucccuagcaaagagaccauagagcaagaaaagcaggcaggagaaaguuag

SEQ ID NO: 207578 - RNA, 135 nt, Artificial Sequence
  derived and/or modified sequence
augagcgauaaaccugauauggcugaaauagagaaauucgacaagagcaaacugaagaagaccgagacccaggagaagaauccucugccgucaaaagaaacaauagaacaagagaagcaagcuggcgagucguag

SEQ ID NO: 207579 - RNA, 135 nt, Artificial Sequence
  derived and/or modified sequence
augagugacaagccagauauggccgaaaucgaaaaguucgacaaaucuaaauuaaagaaaacagaaacucaggagaagaauccauuaccuucuaaagaaacaauagagcaggagaaacaagcaggggaguccuag

SEQ ID NO: 207580 - protein, 971 aa, Artificial Sequence
  derived and/or modified sequence
MATVRASLRGALLLLLAVAGVAEVAGGLAPGSAGALCCNHSKDNQMCRDVCEQIFSSKSESRLKHLLQRAPDYCPETMVEIWNCMNSSLPGVFKKSDGWVGLGCCELAIALECRQACKQASSKNDISKVCRKEYENALFSCISRNEMGSVCCSYAGHHTNCREYCQAIFRTDSSPGPSQIKAVENYCASISPQLIHCVNNYTQSYPMRNPTDSLYCCDRAEDHACQNACKRILMSKKTEMEIVDGLIEGCKTQPLPQDPLWQCFLESSQSVHPGVTVHPPPSTGLDGAKLHCCSKANTSTCRELCTKLYSMSWGNTQSWQEFDRFCEYNPVEVSMLTCLADVREPCQLGCRNLTYCTNFNNRPTELFRSCNAQSDQGAMNDMKLWEKGSIKMPFINIPVLDIKKCQPEMWKAIACSLQIKPCHSKSRGSIICKSDCVEILKKCGDQNKFPEDHTAESICELLSPTDDLKNCIPLDTYLRPSTLGNIVEEVTHPCNPNPCPANELCEVNRKGCPSGDPCLPYFCVQGCKLGEASDFIVRQGTLIQVPSSAGEVGCYKICSCGQSGLLENCMEMHCIDLQKSCIVGGKRKSHGTSFSIDCNVCSCFAGNLVCSTRLCLSEHSSEDDRRTFTGLPCNCADQFVPVCGQNGRTYPSACIARCVGLQDHQFEFGSCMSKDPCNPNPCQKNQRCIPKPQVCLTTFDKFGCSQYECVPRQLACDQVQDPVCDTDHMEHNNLCTLYQRGKSLSYKGPCQPFCRATEPVCGHNGETYSSVCAAYSDRVAVDYYGDCQAVGVLSEHSSVAECASVKCPSLLAAGCKPIIPPGACCPLCAGMLRVLFDKEKLDTIAKVTNKKPITVLEILQKIRMHVSVPQCDVFGYFSIESEIVILIIPVDHYPKALQIEACNKEAEKIESLINSDSPTLASHVPLSALIISQVQVSSSVPSAGVRARPSCHSLLLPLSLGLALHLLWTYN

SEQ ID NO: 207581 - DNA, 2916 bp, Artificial Sequence
  derived and/or modified sequence
atggccaccgtgagagccagcctgagaggcgccctgctgctgctgctggccgtggccggcgtggccgaggtggccggcggcctggcccccggcagcgccggcgccctgtgctgcaaccacagcaaggacaaccagatgtgcagagacgtgtgcgagcagatcttcagcagcaagagcgagagcagactgaagcacctgctgcagagagcccccgactactgccccgagaccatggtggagatctggaactgcatgaacagcagcctgcccggcgtgttcaagaagagcgacggctgggtgggcctgggctgctgcgagctggccatcgccctggagtgcagacaggcctgcaagcaggccagcagcaagaacgacatcagcaaggtgtgcagaaaggagtacgagaacgccctgttcagctgcatcagcagaaacgagatgggcagcgtgtgctgcagctacgccggccaccacaccaactgcagagagtactgccaggccatcttcagaaccgacagcagccccggccccagccagatcaaggccgtggagaactactgcgccagcatcagcccccagctgatccactgcgtgaacaactacacccagagctaccccatgagaaaccccaccgacagcctgtactgctgcgacagagccgaggaccacgcctgccagaacgcctgcaagagaatcctgatgagcaagaagaccgagatggagatcgtggacggcctgatcgagggctgcaagacccagcccctgccccaggaccccctgtggcagtgcttcctggagagcagccagagcgtgcaccccggcgtgaccgtgcaccccccccccagcaccggcctggacggcgccaagctgcactgctgcagcaaggccaacaccagcacctgcagagagctgtgcaccaagctgtacagcatgagctggggcaacacccagagctggcaggagttcgacagattctgcgagtacaaccccgtggaggtgagcatgctgacctgcctggccgacgtgagagagccctgccagctgggctgcagaaacctgacctactgcaccaacttcaacaacagacccaccgagctgttcagaagctgcaacgcccagagcgaccagggcgccatgaacgacatgaagctgtgggagaagggcagcatcaagatgcccttcatcaacatccccgtgctggacatcaagaagtgccagcccgagatgtggaaggccatcgcctgcagcctgcagatcaagccctgccacagcaagagcagaggcagcatcatctgcaagagcgactgcgtggagatcctgaagaagtgcggcgaccagaacaagttccccgaggaccacaccgccgagagcatctgcgagctgctgagccccaccgacgacctgaagaactgcatccccctggacacctacctgagacccagcaccctgggcaacatcgtggaggaggtgacccacccctgcaaccccaacccctgccccgccaacgagctgtgcgaggtgaacagaaagggctgccccagcggcgacccctgcctgccctacttctgcgtgcagggctgcaagctgggcgaggccagcgacttcatcgtgagacagggcaccctgatccaggtgcccagcagcgccggcgaggtgggctgctacaagatctgcagctgcggccagagcggcctgctggagaactgcatggagatgcactgcatcgacctgcagaagagctgcatcgtgggcggcaagagaaagagccacggcaccagcttcagcatcgactgcaacgtgtgcagctgcttcgccggcaacctggtgtgcagcaccagactgtgcctgagcgagcacagcagcgaggacgacagaagaaccttcaccggcctgccctgcaactgcgccgaccagttcgtgcccgtgtgcggccagaacggcagaacctaccccagcgcctgcatcgccagatgcgtgggcctgcaggaccaccagttcgagttcggcagctgcatgagcaaggacccctgcaaccccaacccctgccagaagaaccagagatgcatccccaagccccaggtgtgcctgaccaccttcgacaagttcggctgcagccagtacgagtgcgtgcccagacagctggcctgcgaccaggtgcaggaccccgtgtgcgacaccgaccacatggagcacaacaacctgtgcaccctgtaccagagaggcaagagcctgagctacaagggcccctgccagcccttctgcagagccaccgagcccgtgtgcggccacaacggcgagacctacagcagcgtgtgcgccgcctacagcgacagagtggccgtggactactacggcgactgccaggccgtgggcgtgctgagcgagcacagcagcgtggccgagtgcgccagcgtgaagtgccccagcctgctggccgccggctgcaagcccatcatcccccccggcgcctgctgccccctgtgcgccggcatgctgagagtgctgttcgacaaggagaagctggacaccatcgccaaggtgaccaacaagaagcccatcaccgtgctggagatcctgcagaagatcagaatgcacgtgagcgtgccccagtgcgacgtgttcggctacttcagcatcgagagcgagatcgtgatcctgatcatccccgtggaccactaccccaaggccctgcagatcgaggcctgcaacaaggaggccgagaagatcgagagcctgatcaacagcgacagccccaccctggccagccacgtgcccctgagcgccctgatcatcagccaggtgcaggtgagcagcagcgtgcccagcgccggcgtgagagccagacccagctgccacagcctgctgctgcccctgagcctgggcctggccctgcacctgctgtggacctacaactag

SEQ ID NO: 207582 - DNA, 2916 bp, Artificial Sequence
  derived and/or modified sequence
atggctaccgtgcgcgcatctctaaggggagcactgctactgcttctggccgttgccggagtcgctgaagtggccggtggcctggcacccggtagtgcgggggcgctgtgttgcaatcacagtaaagacaaccagatgtgcagggatgtgtgcgaacagatattttcatctaaatctgagagccgcttaaagcatttgctgcagagggcgcccgactactgccccgagacgatggtggagatttggaactgcatgaactcctctctccccggcgtgttcaagaagtcggacggctgggtgggtctgggttgctgtgagctggcaatcgctctggagtgtcgacaggcatgcaaacaggcaagctcaaaaaatgacatctcaaaagtatgtcggaaagaatatgaaaacgccctcttcagctgtatcagccgaaacgaaatgggatctgtctgttgttcttacgcagggcatcacactaattgccgcgaatactgccaggcaattttccgcaccgactcatcaccgggaccctcccagatcaaagccgtggagaattactgtgcttctatctcaccacagttgatacactgtgtcaacaactacacccagagttaccctatgaggaatccgaccgactctctttattgttgcgacagagccgaggatcacgcttgccagaacgcatgtaaacggattttgatgagcaaaaaaaccgagatggaaatagtggacggcttgatcgagggttgtaaaacccaacctctccctcaggacccgctgtggcagtgcttcctggagtcctctcaaagcgtgcatcccggagtaacagtacatccaccaccgtcaaccggactggacggagctaaactgcattgttgctcaaaggctaatacctctacatgccgtgagctatgcactaagctctattccatgtcgtggggaaatacacagtcttggcaggaattcgaccgcttctgtgagtacaatcccgtagaagtcagtatgcttacatgcttggcggacgttagagagccctgccaacttgggtgcaggaatctcacctattgtaccaactttaataaccgaccgacggagctctttcggtcatgtaacgcccaatccgaccagggtgcaatgaatgacatgaagttgtgggaaaaaggtagcattaagatgcctttcatcaatatacccgtgcttgatatcaaaaagtgtcagccagaaatgtggaaggctattgcctgcagtctgcagattaagccctgtcatagtaagtctaggggctccataatctgtaagagtgattgtgtcgagatcctgaaaaaatgtggagatcagaacaaatttccggaagatcataccgctgaatcaatctgcgagctgctatcgcccaccgacgatctgaagaattgtatccctctggatacctatcttcggccttccacactgggcaatatcgtggaagaggtgacccatccatgcaacccaaatccgtgccctgccaatgagctttgcgaagtcaatcgcaagggctgtccatccggagacccttgtctcccatacttttgcgttcaggggtgtaaactaggggaagcatcagatttcatcgttcgccagggcacactcatacaggtgccttcttctgccggggaagtgggttgctacaagatctgctcgtgtggacaaagcgggctcttggagaactgtatggaaatgcattgtatcgatctgcagaagagctgtatagtcggtgggaaacggaaatctcatggaacctctttctctatcgactgcaatgtgtgcagctgcttcgctggcaatctagtatgcagcacccgactttgcctgagcgagcactcctctgaagacgacagaaggacgttcaccgggctaccgtgtaactgtgctgatcaattcgtccccgtctgtggccaaaatggccgtacttatccatcggcctgcattgcacggtgcgtgggcttgcaggatcatcagtttgagttcgggagctgcatgtctaaagatccttgcaacccgaatccttgtcaaaaaaaccaaagatgtataccaaagcctcaagtgtgtctcaccaccttcgataagttcggctgctcgcaatatgagtgcgttcccagacagctcgcatgtgaccaggttcaagatcctgtgtgtgatacagatcatatggaacacaataacttgtgcactctgtatcagcggggtaaaagtctgtcctataagggcccatgccagccattctgccgggccaccgaacctgtgtgcggtcacaacggcgaaacttatagcagcgtctgtgctgcctactccgatcgggtggccgtagattactacggcgattgtcaggccgttggcgtcctgtctgagcacagctccgtggctgaatgcgcttccgtgaagtgtccgtccctgttagccgccggctgcaaacccattataccccctggagcttgttgtccactgtgcgccggcatgcttcgcgtcctctttgataaagagaagcttgacactattgccaaggtgaccaacaaaaagccaattaccgtcttggaaatccttcagaagattaggatgcacgtgtctgtcccccagtgtgacgtgtttggttatttctcgatagagtctgagatcgtgattcttattattcctgttgatcattatcccaaggctctgcagattgaagcctgtaataaggaggccgaaaaaattgaatctctaatcaattccgattctccgactttagcctcccatgtcccgctgtctgcgctgatcatctcacaggtgcaagtcagctcttcagtcccttcggccggcgttagggctagacccagctgccattctttgctgctgcccttaagcttggggctggctctgcacctcctctggacctacaactag

SEQ ID NO: 207583 - DNA, 2916 bp, Artificial Sequence
  derived and/or modified sequence
atggccaccgtgcgggccagcctgcggggggccctgctgctgctgctggccgtggccggcgtggccgaggtggccggcggcctggcccctggcagcgctggggccctgtgctgcaaccacagcaaggacaaccagatgtgcagagatgtgtgtgagcagatcttcagcagcaagtctgagagccggctgaagcacctgctgcagagggccccagactactgcccagagaccatggtggagatctggaactgcatgaacagcagcctgcccggggtcttcaagaagagtgatggctgggtgggcctgggctgctgtgagctggccatcgccctggagtgccggcaggcctgcaagcaggccagcagcaagaatgacatcagcaaggtgtgcaggaaggagtatgaaaatgccctcttcagctgcatcagcagaaatgagatgggctctgtgtgctgcagctatgccggccaccacaccaactgccgggagtactgccaggccatcttcagaacagacagcagccctggccccagccagatcaaggctgtggagaactactgtgccagcatcagcccccagctgatccactgtgtgaacaactacacccagagctaccccatgaggaaccccacagacagcctgtactgctgtgacagagcagaagatcatgcctgccagaatgcctgcaagaggatcctgatgagcaagaagacagagatggagatcgtggatggcctgattgagggctgcaagacccagcccctgccccaggaccccctgtggcagtgcttcctggagagcagccagagcgtgcaccctggggtgacagtgcaccccccacccagcacaggcctggatggagccaagctgcactgctgcagcaaggccaacaccagcacctgccgggagctgtgcaccaagctgtacagcatgtcctggggcaacacccagagctggcaggagtttgaccgcttctgtgagtacaaccctgtggaggtgtccatgctgacctgcctggctgatgtgcgggagccctgccagctgggctgcaggaacctgacctactgcaccaacttcaacaaccggcccacagagctgttccgcagctgcaatgcccagagcgaccagggcgccatgaatgacatgaagctgtgggagaagggcagcatcaagatgcccttcatcaacatccctgtgctggacatcaagaagtgccagcctgagatgtggaaggccatcgcctgcagcctgcagatcaagccctgccacagcaagagccggggcagcatcatctgcaagagtgactgtgtggagatcctgaagaagtgtggggaccagaacaagtttcctgaggaccacacagctgagagcatctgtgagctgctgagccccacagatgacctgaagaactgcatccccctggacacctacctgcggcccagcaccctgggcaacatcgtggaggaggtgacccacccctgcaaccccaacccctgcccagccaatgagctgtgtgaggtgaacaggaagggctgccccagcggggacccctgcctgccctacttctgtgtgcagggctgcaagctgggggaggccagtgacttcatcgtgcggcagggcaccctcatccaggtgcccagcagcgctggggaggtgggctgctacaagatctgcagctgtggccagagcggcctgctggagaactgcatggagatgcactgcatcgacctgcagaagagctgcatcgtgggcggcaagaggaagagccacggcaccagcttcagcattgactgcaatgtgtgcagctgctttgctggcaacctggtgtgcagcacccggctgtgcctgtctgagcacagcagtgaagatgacaggaggaccttcaccggcctgccctgcaactgtgccgaccagtttgtgcctgtgtgtggccagaatggccgcacctaccccagcgcctgcatcgcccgctgtgtgggcctgcaggaccaccagtttgaatttggcagctgcatgagcaaggacccctgcaaccccaacccctgccagaagaaccagcgctgcatccccaagccccaggtgtgcctgaccacctttgacaagtttggctgcagccagtatgaatgtgtgccccggcagctggcctgtgaccaggtgcaggaccctgtgtgtgacacagaccacatggagcacaacaacctgtgcaccctgtaccagaggggcaagagcctgagctacaagggcccctgccagcccttctgccgggccacagagcctgtgtgtggccacaacggggagacctacagctctgtgtgtgccgcctacagcgacagagtggccgtggactactacggggactgccaggccgtgggcgtgctgtctgagcacagctctgtggctgaatgtgcctctgtgaagtgccccagcctgctggccgccggctgcaagcccatcatccccccaggggcctgctgccccctgtgtgccggcatgctgcgggtgctgtttgacaaggagaagctggacaccatcgccaaggtgaccaacaagaagcccatcaccgtgctggagatcctgcagaagatccgcatgcacgtgtctgtgccccagtgtgatgtgtttggctacttcagcattgaaagtgaaattgtcatcctgatcatccctgtggaccactaccccaaggccctgcagatcgaggcctgcaacaaggaggccgagaagattgagagcctcatcaacagcgacagccccaccctggccagccacgtgcccctgagcgccctgatcatcagccaggtgcaggtgagcagctctgtgcccagcgctggggtgcgggcccggcccagctgccacagcctgctgctgcccctgagcctgggcctggccctgcacctgctgtggacctacaactag

SEQ ID NO: 207584 - DNA, 2916 bp, Artificial Sequence
  derived and/or modified sequence
atggccaccgtgcgggccagcctgcggggcgccctgctgctgctgcttgccgtggcgggagttgccgaggtggctggcggtcttgcgcctggctccgcaggtgctctgtgctgtaatcacagtaaagacaatcaaatgtgcagggatgtttgcgagcagatcttttcttccaagtctgagtcacgactgaagcacctgctgcagcgggcccccgactattgccctgagaccatggtggaaatttggaattgcatgaattcctcacttccgggtgtgttcaaaaagtctgacgggtgggtgggcctgggatgctgtgagctggccatcgccctggagtgtcgccaagcgtgtaagcaggcttcttccaagaatgatatctccaaggtgtgcagaaaggagtatgaaaacgccctcttttcatgcatctctcggaacgagatggggagtgtgtgttgctcttacgcaggccaccataccaactgccgcgagtattgccaggccatcttccgcactgacagtagccccggccccagccagatcaaagctgttgaaaactattgtgcctcaatcagcccacagttgatccattgcgtcaataactacactcagagctaccccatgcggaacccaactgactcattgtattgctgcgatcgcgccgaagaccacgcatgtcagaacgcatgcaagcgaattttaatgtcaaaaaaaacagaaatggagattgttgacgggttgatcgaggggtgcaaaacccagccacttccgcaggatcctctctggcagtgcttcctggaaagcagtcaaagtgtgcacccaggagttactgtccatcctcctccaagcacaggcctcgacggagctaaactgcactgctgctcaaaggcaaatacctccacctgtcgggaactgtgcactaagctgtattcgatgagctgggggaatacgcaaagttggcaggaatttgatcgcttctgtgagtacaatcccgtcgaagttagtatgctcacctgtctggctgatgtacgtgagccgtgccagcttggttgccgcaatctgacctactgtacaaactttaataatcgccctacagaattgttccgatcatgtaacgcccagagcgatcagggagccatgaacgacatgaagttgtgggagaagggaagtattaaaatgccttttatcaatatcccagtgctggatatcaagaagtgccaacctgaaatgtggaaggccatcgcctgctcgctgcagatcaaaccttgtcacagcaaatccaggggcagcataatttgtaagtccgactgcgtcgagatcttaaagaagtgtggagatcaaaataagttccccgaggatcatacagccgagtctatttgtgaactgttatccccaactgatgatctgaagaactgcattcccttagatacctacctgcggcctagcacactgggcaatatcgtcgaagaggtgactcacccttgcaacccaaacccatgtcccgccaacgagctgtgcgaggttaatcgtaaaggatgccccagtggagacccttgcttaccatacttctgtgttcagggctgcaaactcggggaggcgtcagacttcatcgtcagacagggaacactgattcaggtaccttcatcggcgggagaagtcgggtgctataagatctgcagctgcggtcaaagcggcctgctggagaactgtatggagatgcactgtattgatttacagaaatcgtgtattgtcggggggaagaggaagtctcacggaacaagctttagtatcgattgcaatgtatgttcttgttttgctgggaatctggtatgtagtacccgattgtgtctttccgagcactctagtgaagatgaccggaggacatttaccggcctgccctgcaattgcgccgatcagttcgtgcccgtgtgtggtcagaacggcaggacatacccctcggcctgcattgcccggtgtgtgggactacaggatcaccagttcgagtttggctcctgcatgagcaaagatccgtgcaaccccaatccgtgtcaaaagaatcagaggtgtatccccaagcctcaggtgtgtctgacaacattcgataagttcggatgttcacaatatgaatgtgtacctcggcagctagcctgtgatcaggtgcaggaccccgtctgcgatacagaccacatggaacacaataatttgtgcaccctatatcagaggggtaagtctctgtcgtacaaaggaccgtgccagccattttgcagggccactgagccagtgtgcggtcataatggagaaacatacagctctgtgtgcgcagcctattccgatagagtcgccgttgactactacggagactgccaagccgtaggtgttctcagcgagcacagttccgtggctgagtgcgccagtgttaaatgcccatccctcctggcagccgggtgcaagccgatcatcccccctggcgcctgttgtccactttgcgctgggatgctgagggtgctcttcgacaaagagaagttagacaccatcgcaaaagtgaccaacaaaaaacctattaccgtactggagatccttcagaagatccggatgcatgtatctgtcccccagtgtgatgtatttggctacttctcgatcgaatccgagatcgtaatcctcataattcccgtggaccactatccaaaggctctccagatcgaagcttgtaataaggaggctgagaagattgagtcattgatcaatagcgatagccccacccttgcctcccacgtgcccttaagcgcattaataatcagccaggtgcaggtgtcgtcctctgtgccctccgcaggggtaagggccaggccttcctgccacagcctgctgctgcctcttagcttgggtctagcgctgcatttactgtggacatacaattag

SEQ ID NO: 207585 - DNA, 2916 bp, Artificial Sequence
  derived and/or modified sequence
atggcaacagttagggcaagcctgcgcggagcactcctactgctcctcgccgtggctggggttgccgaggtggcaggcggtttagcacctggcagcgccggtgcgttgtgttgtaaccactctaaagacaaccagatgtgtcgggatgtgtgtgagcaaatattcagctcgaaaagtgagtcccgcctgaaacatttgttgcagagagccccagactactgccccgaaacgatggtggagatatggaactgtatgaacagttcgctcccgggtgtctttaaaaaatcagacggttgggtgggacttgggtgctgtgagctggctatagcactggagtgccgtcaagcctgtaaacaggcatcaagtaaaaatgacatctccaaggtttgtagaaaggagtacgagaatgccctcttctcctgcatcagccgcaacgagatgggttccgtgtgttgcagctacgccggacaccacactaactgccgcgaatactgccaggctatctttagaaccgacagctcccccggaccttcccagatcaaagccgtggaaaattattgtgcaagtatctccccgcagctaattcactgtgtgaacaactacactcagtcttacccaatgcgcaaccccacggactcactctactgttgtgaccgagcagaggaccatgcctgtcagaacgcatgtaagcggatcctaatgagcaaaaagacagaaatggaaattgttgatggactaatcgaagggtgcaaaacccagccgctaccgcaagatcccctctggcagtgctttctggagagttcccagtccgtccaccctggcgtaactgtgcaccctccaccttcaaccggattagacggcgcaaaactgcactgctgctcaaaggccaacacgagcacttgccgggagttatgcactaaactttatagtatgtcctggggcaacacgcagagttggcaggaattcgatagattctgtgagtataaccctgtggaggtgtctatgctgacatgcctagctgatgtaagagaaccctgccagctggggtgccgtaatctgacatattgcaccaatttcaataatcgacccacagagctgtttcgatcctgcaacgctcaatctgaccagggagccatgaatgacatgaaactgtgggagaagggtagcataaagatgccgttcataaacattccagtgctggatatcaaaaagtgccagcccgagatgtggaaggccatcgcctgctcattacagattaagccttgtcactcaaagagccgcggtagcattatttgcaagagtgactgcgtggaaatactgaaaaagtgcggggatcagaataaatttcccgaggatcataccgcggaatctatttgcgagctgctgagccctacggacgatctgaagaactgtattccccttgatacatatctgaggccgtctacactgggtaacattgtcgaggaggtgacccacccttgcaacccaaacccatgccccgcaaatgagttgtgcgaagtcaaccgaaagggctgtccctcgggtgatccttgtctcccttatttttgcgtccaagggtgtaaactgggagaagccagcgactttatcgtaagacagggcaccctgatccaggtgccttcttccgctggtgaagtggggtgctacaaaatctgttcatgcggccagagcgggctgctcgagaactgtatggagatgcattgcattgatctgcagaagagctgcatcgtgggaggaaagcggaaatcacacgggacgagcttttccatagattgcaatgtctgtagttgttttgccggaaatctcgtgtgttctacaagactttgtctaagtgagcattccagcgaagacgatcgaaggacattcaccgggctgccctgtaattgcgccgatcagttcgtcccagtttgcggccagaacggacgcacctatccttccgcctgtatcgcacgttgcgtaggcctccaggaccaccaatttgaattcggaagctgtatgtccaaggacccctgcaaccctaatccatgccagaagaatcaacggtgcatccctaagccccaggtgtgcctcaccaccttcgacaagttcggatgcagccagtacgaatgcgtcccacgccagctagcttgcgatcaggtgcaggaccctgtgtgtgatactgatcacatggaacacaataacctgtgcaccctgtaccagcgaggcaagtcactgagctataaggggccttgtcaaccgttctgtcgcgctacggaacctgtctgtggccataacggagagacttatagctcagtctgcgccgcttattcagaccgagtggctgtcgattattacggggattgccaggctgtgggagtgctatcagaacatagtagtgtcgccgagtgcgctagcgtgaagtgcccaagtctcttggccgctgggtgcaagcccataataccacctggagcgtgctgtcccctatgcgccggaatgctgcgggtgctcttcgataaggagaagcttgacaccatcgcgaaggtgacaaataaaaaacccattaccgtgctcgagatccttcagaagatacgaatgcatgtgtccgtcccgcaatgcgatgtattcgggtatttttccatcgaatctgagatcgtgattttgattatacccgtggatcactaccctaaagcactccaaattgaagcgtgtaataaggaagccgaaaagatcgaaagcctaattaatagcgactccccgacgttggcatctcacgtccctctcagcgctttgatcatctctcaggtccaagtctcctctagcgtgcccagtgccggagtccgggctagaccgtcctgtcactctctgctgttacctttaagcctcgggctggcattgcatttgttgtggacgtacaactag

SEQ ID NO: 207586 - DNA, 4888 bp, Artificial Sequence
  derived and/or modified sequence
gatgaacccttgtcagggggccgtgtctgcgggaggccgaaggatcccgggtgacatgctttctttgggtgcgaggcagcgtctcggcagaaagaatattgcgagtattactgagggtacatgaaggagagaagcccctttggttcggccttggactaagcccttgttctcaggtgaacttgcagtgtgatcttgagtaaggtcagtctcctctctcacctcagtggcccgaaacctcaggaggtggcagaggttttctaatgactctcccagctctgacatcctctgacttcactctgggagaacgtgggctggtggactcctggcagaagccgacacacagttgggccataacaaagagccctggtacggggcacgttcccgcccccgggaggttttggaaacactgtgaggcagggggcggggcttgagcgggccgcagccagtcaccaaagggccgggcgctgggggcggggcctcgcgcgagcggcggcggtagcggcggcagcggctgcggccaagctgggtccgagcatcccgcggctctggagccgcccggcccggacatggcgaccgtccgggcctctctgcgaggtgcgctgctccttctgctggccgtggcgggggtcgcggaggtggcagggggcctggctccgggcagtgcgggtgcattgtgttgtaatcattcaaaggataaccaaatgtgccgtgatgtatgtgaacagattttctcctcaaaaagtgaatcccgactaaaacatctgttgcagcgagccccagattattgcccagagacaatggttgaaatttggaattgtatgaattcatctttgccaggtgtgtttaagaagtctgatggctgggttggcttaggctgctgtgaactggctattgccttggagtgtcgacaggcatgcaagcaggcatcttcaaagaatgatatttccaaagtttgcagaaaagaatatgagaatgctcttttcagttgcattagcagaaatgaaatgggctcggtttgttgcagttatgcaggtcatcacacaaactgccgagaatactgtcaagccatttttcgaacagactcttctcctggtccatctcagataaaagcagtggaaaattattgcgcctctattagtccacaattaatacattgtgtgaacaattatactcaatcttatccaatgaggaacccaacggatagtttatattgctgtgacagagctgaagaccatgcttgccaaaatgcctgcaagagaatcctgatgtccaagaaaacggaaatggagattgttgatggtctcatcgagggttgtaagacccagcccttgcctcaagatcctctttggcaatgttttcttgaaagctcacaatctgttcaccctggagtcactgtacaccctcctccctctacaggcctcgatggggctaaattgcattgttgttctaaagcaaacacttcaacatgtagggaactctgcactaaactttacagcatgagctggggcaatacacagagttggcaagagtttgatcgcttttgtgaatataatccagtggaagtgtccatgttgacctgtttagcggatgtccgggaaccttgccagttgggctgtagaaaccttacttactgtactaattttaacaacaggccaacagaacttttcaggagttgtaatgcacagtcagatcaaggagccatgaatgacatgaagttgtgggagaaaggaagcataaagatgccatttatcaatatacctgttcttgatattaaaaagtgccagccagagatgtggaaagcaatagcttgttcactgcagattaaaccttgtcatagtaaatctcggggaagtattatttgcaaatcagattgtgtggagattcttaaaaaatgtggagaccagaacaaattccctgaagaccacacagctgaaagtatttgtgagcttctgtcacctacagatgatctgaagaattgtatacctttggatacatacctcaggccaagtactttaggtaacattgtagaagaagtgactcatccctgtaacccaaatccttgccctgccaatgagctctgtgaagtaaaccgaaaaggatgtccatctggagatccctgtcttccatacttttgtgttcaaggttgcaaactgggagaagcttctgatttcattgtccgtcaagggacactaatccaggtgccatcatctgcaggggaagttggttgttataaaatctgttcatgtggacaaagtggactcttagaaaactgtatggaaatgcactgtatagacctccagaagtcttgtattgttggaggaaaaagaaaaagtcatggaacatcctttagtattgactgcaatgtctgttcttgttttgctggcaatttggtgtgctctacccgcctttgcctcagtgagcacagttcagaagatgaccgtcgtaccttcacaggtctgccctgtaactgtgcagatcagtttgtccctgtatgtgggcagaatgggcgcacttaccccagtgcctgcattgctcgctgtgtgggcctccaagaccatcagtttgagtttggatcatgcatgtcaaaggatccatgtaatcctaatccctgccaaaaaaaccaaaggtgcatacccaaaccacaggtctgcctgacgacttttgataaatttggatgtagccagtatgagtgtgtaccaagacagctcgcgtgtgaccaggtccaagatcctgtttgtgacacagaccacatggagcacaacaatctctgcactttataccaaagaggaaaaagcctctcttacaaaggtccctgccagcccttttgcagagcaaccgagcccgtatgtgggcacaatggtgagacctacagcagtgtgtgtgctgcctactcggatcgcgtggcagtcgattactatggggactgccaggccgtcggagtcctctcagagcacagctccgtcgccgagtgtgcttctgtcaagtgtccttcgctcttggcagctggatgcaaacccatcatcccaccgggtgcttgttgcccattatgtgctgggatgttaagagttttatttgacaaagaaaaactggatactattgctaaggtaacaaataaaaagccaataacagttctggaaatacttcagaaaatccgcatgcacgtgtctgtcccacagtgtgatgtgtttggatacttcagcattgaatcagaaattgtgatcctgatcattcccgtcgatcactatccaaaagctctgcagattgaagcctgcaataaagaagcagagaagattgagtcccttatcaactctgacagcccgactttggcgtcccatgtccctctctctgccctcatcatttcccaggtacaggtctccagcagtgtgccatcggccggtgtcagggccaggccttcttgccactccctcctccttcccctcagcttgggccttgccttgcacttgctctggacatataactgactgcccacggaaagtgcagaatgctcctccacctcactctcctgccttgaaaaagacattcaggactgctggtttgtagttgaatattggccaaggaaaggcacatgtcacctctattcgccacacagtatttttttttttaatccgccaatattagtaggatttttgttttgtttttacaaatgttaaaatgtgttgttccaaatactaatgaaaacagaatgtctcttcctggtagaccactgccatatgatttacatttcctcaccataagggtcccccactctaaagcaaatttatcgctgggaaatgagatgaccactttttagaaagataattcactgtactatcaggttcacaaacttcatttcagagttctttttgaagtatttaaggttcccgttgcatttgttttgtttacagataattacctactctggctagaagctaggggtcccagtgaagagccactgccattaaagaatatgaaacatagataaaacatctttgaaattatgtaaattatgtaaattatcaggcaaatttgcattaaattacagaaatttaattcagaaccccaactactgtgttatgcaaaagcaagctgattaaatgacactcatataattatatgttgtaagcaacaggctcactggtcacggatttgtgtctgtgacttttgtgaaagggagaagtgacattgcatcaaagcatcttgcattatgcaatttttatattaaccagatatatattcatcggtattcatccaagttaaatgtagagtttttaaacatcaatctttaaaccaattgctgctacttatataattgccaaaaagtgaaataatgtgtagttcatgtaaataatacattatatttctattttattatgaagaaggtgaatagccatatttgtaaaatgacaatcatgtgtgttaacccagtgctttccattcgtgaaaacacatttgctttttgtgatatgcacaatgtagataagtgttctgtctgactttcttttttgatatagaagtataaagaattgtggtttatatatttaaaagtgtcaagctgagtattaaaatgtatgcatgttgtctaagaaattgaatactttgaatgtgtttcacagtttgaaataagctatttgatgtaatacttcttgtgtgtatgcacatgaacttagattttacatgaagtattttttcagtattatatgtaccctctgaaatacatagggatatgcgtattataccaaaatgttgctgaaaaatgggcacttaaagctttcagaatatgtcagtgctgatgtagcatgcttgttgcaattgccttttttctgtataaatgtctttaatgcaatatactggaaagcttttctattttaataaaaataatttttatatg

SEQ ID NO: 207587 - protein, 84 aa, Artificial Sequence
  derived and/or modified sequence
MALSVLRLALLLLAVTFAASLIPQFGLFSKYRTPNCSQYRLPGCPRHFNPVCGSDMSTYANECTLCMKIREGGHNIKIIRNGPC

SEQ ID NO: 207588 - DNA, 255 bp, Artificial Sequence
  derived and/or modified sequence
atggccctgtcggtgctccggcttgctctgttgctgctagccgtaacatttgcggccagcctgatcccccaattcggactgtttagtaaatacagaacacctaattgcagccagtaccgcctcccgggctgtcctcggcattttaaccctgtttgcgggtctgatatgagcacgtacgcgaacgaatgcacactttgcatgaagatccgcgagggcggccataatattaagatcatccgtaatgggccctgttag

SEQ ID NO: 207589 - DNA, 255 bp, Artificial Sequence
  derived and/or modified sequence
atggccctgtctgtgctgcggctggccctgctgctgctggccgtgacctttgctgccagcctcatcccccagtttggcctcttcagcaagtaccgcacccccaactgcagccagtaccgcctgcccggctgccccaggcacttcaaccctgtgtgtggcagtgacatgagcacctacgccaatgaatgtaccctgtgcatgaagatccgggagggcggccacaacatcaagatcatcagaaatggcccctgctag

SEQ ID NO: 207590 - DNA, 255 bp, Artificial Sequence
  derived and/or modified sequence
atggccctgagcgtgctgcggctggccctgctgctgctggccgtgacttttgctgcgagtctgatcccacagttcggtctattctcaaagtacaggacacctaattgcagtcagtataggctgcccgggtgcccccgtcactttaatcctgtctgtgggtccgatatgagcacatatgccaacgaatgcaccctgtgcatgaaaatccgagaagggggtcacaacattaaaattatcaggaacgggccatgctag

SEQ ID NO: 207591 - DNA, 255 bp, Artificial Sequence
  derived and/or modified sequence
atggcactgagtgtactgaggttggcgcttttactgctggctgtcacgtttgcagcgtcactcattccgcaattcgggctttttagtaagtatcgcacgcctaattgttcgcagtacagattgcctggatgccctcggcacttcaaccccgtgtgtggaagtgacatgtcaacctatgccaacgaatgcactctttgtatgaagattcgggaaggtggccacaacataaagattatccggaacggtccttgctag

SEQ ID NO: 207592 - DNA, 613 bp, Artificial Sequence
  derived and/or modified sequence
cgcgccccgtcgcacgagcgctccctgcgagtggcgcaggtaacagaccgcaggggcaagacagccggcgcgggaggaggatggcgctgtcggtgctgcgcttggcgctgctgctcctggcagttaccttcgcagcctctctgatccctcaatttggtctgttttcaaaatatagaacgccaaactgctctcagtatagattaccaggatgtcccagacactttaaccctgtgtgtggcagtgacatgtccacttatgccaatgaatgtactctgtgcatgaaaatcagggaaggtggtcataatattaaaatcattcgaaatggaccctgctgatggagcagtttacagaaaagaagatggagagaccaccttcactggcagactagataaattgcatttcccctttttctcttttcctgtgtttctttacatgagatttgttaacacacattttctgagagcaggtatggaagacagccatgtgtagtgatggataatttaaagaaaaaaagaatccttgtttcttggcttttgctcctggagttaagcttactgcccaggtgacttgtgcattgctttatttagttgaaataaaatcagcattgaattca

SEQ ID NO: 207593 - DNA, 255 bp, Artificial Sequence
  derived and/or modified sequence
atggccctgagcgtgctgagactggccctgctgctgctggccgtgaccttcgccgccagcctgatcccccagttcggcctgttcagcaagtacagaacccccaactgcagccagtacagactgcccggctgccccagacacttcaaccccgtgtgcggcagcgacatgagcacctacgccaacgagtgcaccctgtgcatgaagatcagagagggcggccacaacatcaagatcatcagaaacggcccctgctag

SEQ ID NO: 207594 - protein, 1024 aa, Artificial Sequence
  derived and/or modified sequence
MPAARPPAAGLRGISLFLALLLGSPAAALERDALPEGDASPLGPYLLPSGAPERGSPGKEHPEERVVTAPPSSSQSAEVLGELVLDGTAPSAHHDIPALSPLLPEEARPKHALPPKKKLPSLKQVNSARKQLRPKATSAATVQRAGSQPASQGLDLLSSSTEKPGPPGDPDPIVASEEASEVPLWLDRKESAVPTTPAPLQISPFTSQPYVAHTLPQRPEPGEPGPDMAQEAPQEDTSPMALMDKGENELTGSASEESQETTTSTIITTTVITTEQAPALCSVSFSNPEGYIDSSDYPLLPLNNFLECTYNVTVYTGYGVELQVKSVNLSDGELLSIRGVDGPTLTVLANQTLLVEGQVIRSPTNTISVYFRTFQDDGLGTFQLHYQAFMLSCNFPRRPDSGDVTVMDLHSGGVAHFHCHLGYELQGAKMLTCINASKPHWSSQEPICSAPCGGAVHNATIGRVLSPSYPENTNGSQFCIWTIEAPEGQKLHLHFERLLLHDKDRMTVHSGQTNKSALLYDSLQTESVPFEGLLSEGNTIRIEFTSDQARAASTFNIRFEAFEKGHCYEPYIQNGNFTTSDPTYNIGTIVEFTCDPGHSLEQGPAIIECINVRDPYWNDTEPLCRAMCGGELSAVAGVVLSPNWPEPYVEGEDCIWKIHVGEEKRIFLDIQFLNLSNSDILTIYDGDEVMPHILGQYLGNSGPQKLYSSTPDLTIQFHSDPAGLIFGKGQGFIMNYIEVSRNDSCSDLPEIQNGWKTTSHTELVRGARITYQCDPGYDIVGSDTLTCQWDLSWSSDPPFCEKIMYCTDPGEVDHSTRLISDPVLLVGTTIQYTCNPGFVLEGSSLLTCYSRETGTPIWTSRLPHCVSEESLACDNPGLPENGYQILYKRLYLPGESLTFMCYEGFELMGEVTIRCILGQPSHWNGPLPVCKVNQDSFEHALEVAEAAAETSLEGGNMALAIFIPVLIISLLLGGAYIYITRCRYYSNLRLPLMYSHPYSQITVETEFDNPIYETGETREYEVSI

SEQ ID NO: 207595 - DNA, 3075 bp, Artificial Sequence
  derived and/or modified sequence
atgcccgccgctagaccccctgcggctggtttgcggggaatctcccttttcctggccctgctcctgggaagccccgcagctgctctcgaaagagatgctttgccagaaggcgatgcttctccgctgggcccatatctattaccatccggcgccccagagcgcggcagcccagggaaagaacatccagaagagcgggtggttactgcacccccaagttcaagccagtcggcagaagtgctcggcgaacttgttttggacggcacagcaccgtccgcacatcacgatattcccgccctgagtccactgctccctgaggaggcgaggccaaagcacgctttgcctccgaaaaagaaactccctagccttaagcaggtgaattcagcgcgcaagcaactgaggcctaaagcaacctcagccgcaaccgtgcaacgggctggttctcagcctgcatcccaaggcctggatctcctgagctcctcgacagagaaacccgggcctcctggagaccctgatccgatagtggctagcgaagaagcaagcgaggtgccattgtggctggacaggaaggagagtgctgtgcccaccactccagctccactgcagatttctccctttacctctcaaccctacgtcgctcacacattacctcagcgtccagagcccggtgagccaggtcctgatatggcccaggaagctccacaggaggatacgtctcctatggctctcatggacaagggcgaaaacgagctgaccgggagtgcatctgaagaatctcaagagaccacaacttccaccattattacgactacggtgatcaccaccgaacaggcccctgcactctgtagcgtgagcttctcaaaccctgaagggtatattgactcaagtgactaccctttgcttcccttgaataactttctggaatgcacctataacgtaaccgtgtacaccggttatggggtggaattgcaagttaaatctgttaacctgtcagatggcgaactgctctcaattcgaggcgttgatgggccaactttgacagttctggccaaccagactctgttagtagagggccaggtaattaggtccccaacgaatactatctccgtctattttcggacatttcaggatgacggacttggcacattccagctgcactaccaggccttcatgctgtcatgtaatttccccaggcgtccggattcaggagacgtaaccgtgatggatctgcattccggaggagtggcacatttccattgtcacttgggttatgaactgcaaggtgcgaagatgttgacctgtataaatgcttcaaagccccactggtccagtcaggagccaatttgtagtgctccatgcggtggagctgtccacaatgccaccatcggaagggtcttatctccttcctatcccgagaatacgaacggcagtcagttttgtatttggacaattgaggcaccagaaggccaaaagcttcacctgcattttgaacggctgctcctgcatgataaggataggatgactgtccactctggtcagacaaacaaaagtgcgttgctgtacgacagtttgcagacagagtcggtgccattcgaagggctcctgagcgaaggcaacactattcggattgagttcacaagcgaccaggcccgtgctgcctcaacatttaacattcgctttgaagccttcgagaagggtcattgttatgagccttatatccagaacggcaacttcacaacatcggatcccacctataacatcggtactatcgtggaattcacatgtgatcccgggcactcactggagcagggccctgctatcatcgaatgcatcaacgttcgggatccatactggaatgataccgagcctctgtgtcgggcaatgtgtggcggcgagctgagtgctgtagctggtgtcgtgctctccccaaattggccagaaccctatgtcgaaggcgaggactgcatctggaaaatacatgtaggagaggaaaagcgaatatttcttgacatccagtttctgaacctctcgaacagcgatattctgactatttatgatggcgacgaggtaatgcctcacatcctcgggcagtacttaggcaattcagggccgcaaaagctgtattctagcacgcctgatctcacgatccaatttcattcagatcccgccggactgatctttgggaaaggccaaggctttattatgaattatatcgaggtgtccaggaacgatagttgtagcgacctgccagagatccagaatggctggaaaactacgtcacacactgaactggttagaggcgcaagaataacctaccaatgcgaccctggctatgacattgtgggcagcgacaccttaacctgtcagtgggacctgtcctggtcctccgaccctcccttctgcgagaagattatgtactgcactgacccaggcgaggttgatcatagtacccggctgatatccgatccagtgctactcgtcgggactaccattcaatacacctgtaatccgggctttgttctcgaaggcagcagccttcttacgtgttattcacgcgaaacaggcacaccgatctggacgtcgcggctgcctcactgtgtgtccgaggagtccctagcctgtgacaacccaggcctcccagagaatggataccaaattctgtataagagactctatctgccaggcgagtctctgacattcatgtgctacgaaggctttgagcttatgggagaggtgaccatacgatgtatcctggggcaacccagccattggaacgggcctctgcccgtctgcaaggtgaatcaagactcctttgaacatgcacttgaagtggctgaggcagccgcagagacatccctcgaaggaggcaatatggctctggccatctttatccctgtcctgataattagcttgctgctgggcggcgcttacatttacatcacccgctgtaggtattactctaacttgcgtctgcccctgatgtattcacacccttattctcaaataaccgtggaaaccgagtttgacaatcccatttatgaaacgggtgagactcgcgagtatgaggtctccatctag

SEQ ID NO: 207596 - DNA, 3075 bp, Artificial Sequence
  derived and/or modified sequence
atgcctgctgcccggcccccagctgctggcctgcggggcatcagcctcttcctggccctgctgctgggcagccctgctgctgccctggagagagatgccctgcctgaaggagatgccagccccctgggcccctacctgctgcccagcggggcccctgagcggggcagccctgggaaggagcaccctgaggagcgggtggtgacagccccacccagcagcagccagagcgctgaggtgctgggggagctggtgctggatggaacagcccccagcgcccaccacgacatcccagccctgagccccctgctgcctgaggaggcccggcccaagcacgccctgccccccaagaagaagctgcccagcctgaagcaggtgaacagcgccaggaagcagctgcggcccaaggccaccagcgctgccaccgtgcagagagctggcagccagcctgccagccagggcctggacctgctgagcagcagcacagagaagccaggccccccaggggaccctgaccccatcgtggccagcgaggaggccagcgaggtgcccctgtggctggacaggaaggagagcgctgtgcccaccaccccagcccccctgcagatcagccccttcaccagccagccctacgtggcccacaccctgccccagaggcctgagcctggagagcccggccctgacatggcccaggaggccccccaggaggacaccagccccatggccctgatggacaagggagaaaatgagctgactggaagtgccagcgaggagagccaggagaccaccaccagcaccatcatcaccaccaccgtcatcaccacagagcaggccccagccctgtgcagcgtgtccttcagcaaccctgagggctacatcgacagcagtgactaccccctgctgcccctgaacaacttcctggagtgcacctacaacgtgacagtgtacacaggctacggcgtggagctgcaggtgaagtctgtgaacctgagtgatggagagctgctgagcatccggggcgtggatggccccaccctgactgtgctggccaaccagaccctgctggtggagggccaggtgatccgcagccccaccaacaccatctctgtgtacttccgcaccttccaggatgatggcctgggcaccttccagctgcactaccaggccttcatgctgagctgcaacttccccaggaggccagattctggagatgtgacagtgatggacctgcacagcggaggagtggcccacttccactgccacctgggctatgagctgcagggcgccaagatgctgacctgcatcaatgccagcaagccccactggagcagccaggagcccatctgcagcgccccctgtggcggcgctgtgcacaatgccaccatcggccgggtgctgagccccagctacccagagaacaccaacggcagccagttctgcatctggaccatcgaggcccctgagggccagaagctgcacctgcactttgagcggctgctgctgcatgacaaggacaggatgacagtgcacagcggccagaccaacaagagcgccctgctgtatgacagcctgcagacagaatctgtgccctttgagggcctgctgtctgagggcaacaccatccgcatcgagttcaccagtgaccaggcccgggccgccagcaccttcaacatccgctttgaggcctttgagaagggccactgctatgagccctacatccagaatggaaacttcaccaccagtgaccccacctacaacatcggcaccatcgtggagttcacctgtgaccccggccacagcctggagcagggccctgccatcatcgagtgcatcaacgtgcgggacccctactggaatgacacagagcccctgtgccgggccatgtgtggcggggagctgtctgctgtggccggcgtggtgctgagccccaactggccagagccctacgtggagggggaggactgcatctggaagatccacgtgggggaggagaagaggatcttcctggacatccagttcctgaacctgagcaacagcgacatcctgaccatctatgatggagatgaggtgatgccccacatcctgggccagtacctgggcaacagcggcccccagaagctgtacagcagcaccccagacctgaccatccagttccacagcgaccctgctggcctcatctttgggaagggccagggcttcatcatgaactacatcgaggtgtccagaaatgacagctgcagcgacctgcctgagatccagaatggctggaagaccaccagccacacagagctggtgcggggggcccgcatcacctaccagtgtgaccccggctatgacatcgtgggcagtgacaccctgacctgccagtgggacctgtcctggagcagtgacccccccttctgtgagaagatcatgtactgcacagatcctggagaggtggaccacagcaccaggctcatcagtgaccctgtgctgctggtgggcaccaccatccagtacacctgcaaccctggctttgtgctggagggcagcagcctgctgacctgctacagccgggagaccggcacccccatctggaccagccggctgccccactgtgtgtctgaggagagcctggcctgtgacaaccctggcctgcctgaaaatggctaccagatcctgtacaagaggctgtacctgcctggagagagcctgaccttcatgtgctatgagggctttgagctgatgggagaggtgaccatccgctgcatcctgggccagcccagccactggaatggccccctgcctgtgtgcaaggtgaaccaggacagctttgaacatgccctggaggtggccgaggccgctgctgagaccagcctggagggcggcaacatggccctggccatcttcatccctgtgctgatcatcagcctgctgctgggcggggcctacatctacatcacccgctgccgctactacagcaacctgcggctgcccctgatgtacagccacccctacagccagatcaccgtggagacagaatttgacaaccccatctatgagaccggggagacccgggagtatgaggtgtccatctag

SEQ ID NO: 207597 - DNA, 3075 bp, Artificial Sequence
  derived and/or modified sequence
atgcccgccgcccggccccccgccgccggcctgcggggcatcagcctgtttctcgcactcctgctgggctcacccgctgcagctttggagagagatgccctgcccgaaggcgatgccagcccattgggtccttaccttttaccttcgggtgctccagagaggggcagtccagggaaggaacaccccgaagagcgggtcgtgactgcaccgccatcctcgtcgcagtctgccgaggtgctcggcgagctggttctggatggcacagcacccagtgcacatcatgacatccctgccttgtctcccctgctgccggaggaggctaggcccaagcacgccttacctcccaagaagaaactaccatcattgaagcaggtgaactccgcccggaagcagctccgtcctaaagccacctccgccgccaccgtgcagagagccggttctcaaccagcttcccagggcctggatctgttatccagttctacagaaaagccaggccctcctggagacccagatcccatagttgccagtgaagaggctagtgaggtgcctctctggctggacagaaaggaaagcgcagtgcccaccactcctgctccgctgcagatcagccctttcacaagccagccatacgtcgctcacaccctccctcagcgtcctgaaccgggcgagccaggcccagacatggcgcaggaagctccacaggaagacaccagccccatggccctgatggataaaggagagaacgaacttaccggatctgccagtgaggaaagccaggagactacaacgtccactatcatcacaacaaccgtcattactacagagcaggctccagcactgtgtagtgtctcgtttagcaatcctgaaggctatattgatagtagcgactacccactgctcccgctcaacaacttcctcgagtgcacttacaatgtgactgtgtataccggatacggggtggagctgcaagtgaagtcagttaacctctccgatggtgaactgctttctatacgcggagtggacggtcccaccctgacagtcctcgctaaccagacactgttggttgagggccaggtgatcaggagcccgacgaatactatttccgtatactttcggacctttcaggatgatgggcttggcacgtttcagttgcactaccaggcgttcatgctaagttgcaacttccctcgccggccagattcgggagatgtgacggtgatggacctgcacagcggtggagttgcccactttcattgccatttgggatacgagcttcaaggcgccaagatgcttacatgcattaacgcttcgaaaccccattggtcctctcaggagcccatctgcagtgccccctgcggtggcgccgtccacaacgcaacaatcggccgcgtgctgtccccatcataccccgagaatactaacggatcccaattttgcatttggaccattgaagctccggaaggtcagaagctgcacctgcacttcgagcgactgttgctgcacgataaagaccgaatgacagtgcactcggggcaaaccaacaaatcagctctactgtacgacagtctgcagacggaatcggtgcctttcgagggattactgtccgaaggaaacaccatcagaatcgaatttaccagcgatcaggcgagagccgccagcacattcaatatccggtttgaagcattcgaaaagggtcactgctatgagccttatattcagaatggaaactttaccaccagcgacccaacatataacatcggaacaatcgtggaatttacctgtgacccaggacattctctcgagcagggtcctgctatcattgaatgtattaatgtccgcgatccatattggaacgacactgaaccattatgtagagccatgtgcggaggggagctgtctgcagttgctggcgtggtcttgtctcccaactggcctgaaccgtatgtggaaggcgaagactgtatatggaagattcatgtgggggaagagaagagaatattcctcgacatccaatttctcaacttgtccaacagcgacatcttgaccatttacgacggcgatgaagtcatgccgcacatcctgggccagtatctggggaactccggcccacaaaagttgtatagctccactccagacttaactatccagtttcattccgatcccgccggcctgatctttggaaagggacagggcttcataatgaattatatagaggtgagccgaaatgacagctgttccgacctccccgagatccagaacggctggaaaaccacgagtcacaccgaactagttagaggggcgaggataacgtaccaatgcgatccgggctatgacattgtcggctcagacacactgacttgtcagtgggacttgtcgtggtccagtgacccacctttctgtgagaagataatgtattgcacagatccaggtgaggttgatcatagtacccgacttatttctgaccctgtgctcctcgtgggcactaccatacagtacacatgcaacccgggatttgtcctggagggatcttccttgctgacctgttactcccgcgagactggtacacccatctggacgtcacggcttcctcactgtgttagcgaggaatctctggcctgcgataaccctggtctgcctgaaaacggataccagatcctctataagcgcctgtatctacctggcgaaagtttgacattcatgtgctatgagggctttgagcttatgggtgaagtgaccataagatgcatactgggtcagccgagccactggaacgggccactccctgtgtgtaaggtgaaccaggatagcttcgagcacgcccttgaggtggccgaggcagccgctgaaacctccctcgagggtggaaatatggcattagccatattcatccccgtgctcatcattagtctgctacttggaggcgcttacatttatatcacgcgatgcaggtattatagcaatcttagactcccactgatgtattctcatccctacagccagataactgttgaaaccgagtttgacaatcccatttatgaaaccggcgaaacccgcgaatatgaggtgtcgatatag

SEQ ID NO: 207598 - DNA, 3075 bp, Artificial Sequence
  derived and/or modified sequence
atgcctgctgctaggccccctgccgctgggcttagagggatctccctcttcctggccttgcttctggggtctcccgcagcggctttggaaagagacgcactccctgagggcgacgcttccccactggggccttatttactgccgtctggtgctcctgagcggggatctccaggcaaggagcaccccgaagaaagagtggttaccgcaccacccagttccagccaatcagctgaagtgctgggagaactcgtcctggacgggacagcgcctagtgctcatcacgacatccctgctctgagcccattgcttcccgaggaggctcgtccaaagcacgcgctaccgcctaagaaaaaattgccctcgcttaagcaggtcaatagcgcaagaaaacaacttcgccctaaggctacgagcgccgcaacagttcagagagctggcagtcaaccggcaagtcaggggcttgatctattgtcatctagcaccgaaaagcccggtccccctggggatccggaccctattgtcgccagcgaagaggcgtctgaggtcccgttgtggctagaccggaaagaatctgctgtgcccactacccccgcaccactgcaaatcagtccattcactagccaaccatacgtggcccacacccttccccaacgaccggagcccggagagccaggaccagatatggcacaggaggctccgcaagaggacaccagcccaatggctctaatggataagggcgaaaatgaactgaccggaagtgccagcgaggagagtcaggagactaccacgtctaccatcattactacgacagttattaccactgagcaggcacccgctctgtgttcagtgtctttctctaatcctgagggttatattgactccagtgattatccactgctgcccctgaacaacttcttggagtgcacgtataatgtgacggtatacacagggtatggggtggagctgcaagtgaagtccgttaatctctctgatggcgagttgctgtcaataaggggtgtcgacgggcctacattgactgtcctggccaaccagacactcctggtggaaggtcaggtgattcgttctcccactaatacaatctcagtttatttcaggacattccaggatgacggcttagggaccttccaactgcactaccaggcctttatgctaagctgcaattttcccagaaggcccgattcaggagatgtgaccgtcatggatctccactctggcggagtggcccactttcactgtcacctaggctatgaacttcagggtgcaaagatgctgacttgtatcaatgcctccaagccacactggtcgtcacaggaaccgatatgctctgcgccatgcgggggtgcggtgcacaacgcgaccatcggcagggttctgtcccctagttatcccgagaacactaatggctctcagttctgcatttggactatagaggccccagagggccagaagttgcacttgcactttgagcgcctcttgctgcatgacaaggaccgtatgaccgttcactcaggccagactaacaaaagtgccctcttatacgattccctacagacagaatctgtgcccttcgaaggactcctgagcgaaggaaacacaatccgcattgagtttactagtgatcaggccagagctgccagtacctttaatatccgtttcgaagcgttcgagaaaggccattgttacgagccttatattcagaacgggaacttcactacctccgatcccacctataacattgggaccatagtcgagttcacatgcgaccctggccattcattggaacagggaccggctatcatcgagtgcatcaatgtgcgcgacccgtattggaacgataccgaaccgttatgcagggccatgtgcggaggcgagctatcagccgtggccggtgtagtgttgtctcctaattggcccgaaccatatgtggaaggagaagactgcatttggaagatccacgtgggcgaagagaagcgaattttcttggacatacagttcctgaacctgagcaattccgacattctcactatctacgacggtgacgaggtgatgcctcatattctgggtcagtatctgggaaacagcgggccacaaaagctctattcctccactcctgatctgacaatacaatttcactctgaccctgcaggcctcatttttggcaagggccaagggttcatcatgaattacattgaagtgagcaggaatgactcttgctctgacctccctgagattcagaacggttggaagactactagccacaccgaactcgtccgaggagcacgcattacgtaccagtgcgacccaggatatgacatcgtgggcagtgacaccctgacatgtcagtgggacctgtcatggagctcagatcctcctttctgcgagaagattatgtactgcacggatcctggagaagtcgaccatagtacccggttaattagcgaccctgtccttcttgtaggcacaactatacagtacacatgtaatccagggtttgtgctcgagggctctagtctgcttacatgttattctcgcgagacaggcacacccatatggacaagcaggctgccacactgtgtgtccgaggagtcactggcctgtgataatcctggactgcctgagaacggctatcagatcctgtataagagactgtacctgcctggagaaagcctaacttttatgtgttacgaaggattcgagttgatgggcgaggtgactatcaggtgcattcttggacaacccagccactggaacggccctcttccggtctgtaaggtgaatcaagacagttttgagcatgccttggaggtcgccgaagccgcagcagaaaccagcctggaaggcggaaacatggccctggccatctttattcctgtgctaatcatctccctgttacttgggggtgcctacatctatataaccagatgtagatattactccaacctgcgactgcctttaatgtattcgcacccgtattcacagatcaccgtcgagactgaatttgacaatcctatctacgagacaggtgagactagggagtatgaagtgagcatttag

SEQ ID NO: 207599 - DNA, 3248 bp, Artificial Sequence
  derived and/or modified sequence
gcttcccctttctcgctcaccgccgccctccttccccagctccctcgccgtccgcccgccccacagccagcggctccgcgccccctgcagccacgatgcccgcggcccggccgcccgccgcgggactccgcgggatctcgctgttcctcgctctgctcctggggagcccggcggcagcgctggagcgagatgctcttcccgagggagatgctagccctttgggtccttacctcctgccctcaggagccccggagagaggcagtcctggcaaagagcaccctgaagagagagtggtaacagcgccccccagttcctcacagtcggcggaagtgctgggcgagctggtgctggatgggaccgcaccctctgcacatcacgacatcccagccctgtcaccgctgcttccagaggaggcccgccccaagcacgccttgccccccaagaagaaactgccttcgctcaagcaggtgaactctgccaggaagcagctgaggcccaaggccacctccgcagccactgtccaaagggcagggtcccagccagcgtcccagggcctagatctcctctcctcctccacggagaagcctggcccaccgggggacccggaccccatcgtggcctccgaggaggcatcagaagtgcccctttggctggaccgaaaggagagtgcggtccctacaacacccgcacccctgcaaatctcccccttcacttcgcagccctatgtggcccacacactcccccagaggccagaacccggggagcctgggcctgacatggcccaggaggccccccaggaggacaccagccccatggccctgatggacaaaggtgagaatgagctgactgggtcagcctcagaggagagccaggagaccactacctccaccattatcaccaccacggtcatcaccaccgagcaggcaccagctctctgcagtgtgagcttctccaatcctgaggggtacattgactccagcgactacccactgctgcccctcaacaactttctggagtgcacatacaacgtgacagtctacactggctatggggtggagctccaggtgaagagtgtgaacctgtccgatggggaactgctctccatccgcggggtggacggccctaccctgaccgtcctggccaaccagacactcctggtggaggggcaggtaatccgaagccccaccaacaccatctccgtctacttccggaccttccaggacgacggccttgggaccttccagcttcactaccaggccttcatgctgagctgcaactttccccgccggcctgactctggggatgtcacggtgatggacctgcactcaggtggggtggcccactttcactgccacctgggctatgagctccagggcgctaagatgctgacatgcatcaatgcctccaagccgcactggagcagccaggagcccatctgctcagctccttgtggaggggcagtgcacaatgccaccatcggccgcgtcctctccccaagttaccctgaaaacacaaatgggagccaattctgcatctggacgattgaagctccagagggccagaagctgcacctgcactttgagaggctgttgctgcatgacaaggacaggatgacggttcacagcgggcagaccaacaagtcagctcttctctacgactcccttcaaaccgagagtgtcccttttgagggcctgctgagcgaaggcaacaccatccgcatcgagttcacgtccgaccaggcccgggcggcctccaccttcaacatccgatttgaagcgtttgagaaaggccactgctatgagccctacatccagaatgggaacttcactacatccgacccgacctataacattgggactatagtggagttcacctgcgaccccggccactccctggagcagggcccggccatcatcgaatgcatcaatgtgcgggacccatactggaatgacacagagcccctgtgcagagccatgtgtggtggggagctctctgctgtggctggggtggtattgtccccaaactggcccgagccctacgtggaaggtgaagattgtatctggaagatccacgtgggagaagagaaacggatcttcttagatatccagttcctgaatctgagcaacagtgacatcttgaccatctacgatggcgacgaggtcatgccccacatcttggggcagtaccttgggaacagtggcccccagaaactgtactcctccacgccagacttaaccatccagttccattcggaccctgctggcctcatctttggaaagggccagggatttatcatgaactacatagaggtatcaaggaatgactcctgctcggatttacccgagatccagaatggctggaaaaccacttctcacacggagttggtgcggggagccagaatcacctaccagtgtgaccccggctatgacatcgtggggagtgacaccctcacctgccagtgggacctcagctggagcagcgaccccccattttgtgagaaaattatgtactgcaccgaccccggagaggtggatcactcgacccgcttaatttcggatcctgtgctgctggtggggaccaccatccaatacacctgcaaccccggttttgtgcttgaagggagttctcttctgacctgctacagccgtgaaacagggactcccatctggacgtctcgcctgccccactgcgtttcggaggagtccctggcatgtgacaacccagggctgcctgaaaatggataccaaatcctgtacaagcgactctacctgccaggagagtccctcaccttcatgtgctacgaaggctttgagctcatgggtgaagtgaccatccgctgcatcctgggacagccatcccactggaacgggcccctgcccgtgtgtaaagttaatcaagacagttttgaacatgctttagaagtagcagaagcggcagcagagacgtcgctggaaggggggaacatggccctggctatcttcatcccggtcctcatcatctccttactgctgggaggagcctacatttacatcacaagatgtcgctactattccaacctccgcctgcctctgatgtactcccacccctacagccagatcaccgtggaaaccgagtttgacaaccccatttacgagacaggggaaaccagagagtatgaggtttctatctaaagagagctacacttgagaaggggacttgtgaactcaaccacaatctcctcgagacattcatccagagaccatgtggca

SEQ ID NO: 207600 - DNA, 3075 bp, Artificial Sequence
  derived and/or modified sequence
atgcccgccgccagaccccccgccgccggcctgagaggcatcagcctgttcctggccctgctgctgggcagccccgccgccgccctggagagagacgccctgcccgagggcgacgccagccccctgggcccctacctgctgcccagcggcgcccccgagagaggcagccccggcaaggagcaccccgaggagagagtggtgaccgccccccccagcagcagccagagcgccgaggtgctgggcgagctggtgctggacggcaccgcccccagcgcccaccacgacatccccgccctgagccccctgctgcccgaggaggccagacccaagcacgccctgccccccaagaagaagctgcccagcctgaagcaggtgaacagcgccagaaagcagctgagacccaaggccaccagcgccgccaccgtgcagagagccggcagccagcccgccagccagggcctggacctgctgagcagcagcaccgagaagcccggcccccccggcgaccccgaccccatcgtggccagcgaggaggccagcgaggtgcccctgtggctggacagaaaggagagcgccgtgcccaccacccccgcccccctgcagatcagccccttcaccagccagccctacgtggcccacaccctgccccagagacccgagcccggcgagcccggccccgacatggcccaggaggccccccaggaggacaccagccccatggccctgatggacaagggcgagaacgagctgaccggcagcgccagcgaggagagccaggagaccaccaccagcaccatcatcaccaccaccgtgatcaccaccgagcaggcccccgccctgtgcagcgtgagcttcagcaaccccgagggctacatcgacagcagcgactaccccctgctgcccctgaacaacttcctggagtgcacctacaacgtgaccgtgtacaccggctacggcgtggagctgcaggtgaagagcgtgaacctgagcgacggcgagctgctgagcatcagaggcgtggacggccccaccctgaccgtgctggccaaccagaccctgctggtggagggccaggtgatcagaagccccaccaacaccatcagcgtgtacttcagaaccttccaggacgacggcctgggcaccttccagctgcactaccaggccttcatgctgagctgcaacttccccagaagacccgacagcggcgacgtgaccgtgatggacctgcacagcggcggcgtggcccacttccactgccacctgggctacgagctgcagggcgccaagatgctgacctgcatcaacgccagcaagccccactggagcagccaggagcccatctgcagcgccccctgcggcggcgccgtgcacaacgccaccatcggcagagtgctgagccccagctaccccgagaacaccaacggcagccagttctgcatctggaccatcgaggcccccgagggccagaagctgcacctgcacttcgagagactgctgctgcacgacaaggacagaatgaccgtgcacagcggccagaccaacaagagcgccctgctgtacgacagcctgcagaccgagagcgtgcccttcgagggcctgctgagcgagggcaacaccatcagaatcgagttcaccagcgaccaggccagagccgccagcaccttcaacatcagattcgaggccttcgagaagggccactgctacgagccctacatccagaacggcaacttcaccaccagcgaccccacctacaacatcggcaccatcgtggagttcacctgcgaccccggccacagcctggagcagggccccgccatcatcgagtgcatcaacgtgagagacccctactggaacgacaccgagcccctgtgcagagccatgtgcggcggcgagctgagcgccgtggccggcgtggtgctgagccccaactggcccgagccctacgtggagggcgaggactgcatctggaagatccacgtgggcgaggagaagagaatcttcctggacatccagttcctgaacctgagcaacagcgacatcctgaccatctacgacggcgacgaggtgatgccccacatcctgggccagtacctgggcaacagcggcccccagaagctgtacagcagcacccccgacctgaccatccagttccacagcgaccccgccggcctgatcttcggcaagggccagggcttcatcatgaactacatcgaggtgagcagaaacgacagctgcagcgacctgcccgagatccagaacggctggaagaccaccagccacaccgagctggtgagaggcgccagaatcacctaccagtgcgaccccggctacgacatcgtgggcagcgacaccctgacctgccagtgggacctgagctggagcagcgacccccccttctgcgagaagatcatgtactgcaccgaccccggcgaggtggaccacagcaccagactgatcagcgaccccgtgctgctggtgggcaccaccatccagtacacctgcaaccccggcttcgtgctggagggcagcagcctgctgacctgctacagcagagagaccggcacccccatctggaccagcagactgccccactgcgtgagcgaggagagcctggcctgcgacaaccccggcctgcccgagaacggctaccagatcctgtacaagagactgtacctgcccggcgagagcctgaccttcatgtgctacgagggcttcgagctgatgggcgaggtgaccatcagatgcatcctgggccagcccagccactggaacggccccctgcccgtgtgcaaggtgaaccaggacagcttcgagcacgccctggaggtggccgaggccgccgccgagaccagcctggagggcggcaacatggccctggccatcttcatccccgtgctgatcatcagcctgctgctgggcggcgcctacatctacatcaccagatgcagatactacagcaacctgagactgcccctgatgtacagccacccctacagccagatcaccgtggagaccgagttcgacaaccccatctacgagaccggcgagaccagagagtacgaggtgagcatctag

SEQ ID NO: 207601 - protein, 1119 aa, Artificial Sequence
  derived and/or modified sequence
MAGAPRGGGGGGGGAGEPGGAERAAGTSRRRGLRACDEEFACPELEALFRGYTLRLEQAATLKALAVLSLLAGALALAELLGAPGPAPGLAKGSHPVHCVLFLALLVVTNVRSLQVPQLQQVGQLALLFSLTFALLCCPFALGGPARGSAGAAGGPATAEQGVWQLLLVTFVSYALLPVRSLLAIGFGLVVAASHLLVTATLVPAKRPRLWRTLGANALLFVGVNMYGVFVRILTERSQRKAFLQARSCIEDRLRLEDENEKQERLLMSLLPRNVAMEMKEDFLKPPERIFHKIYIQRHDNVSILFADIVGFTGLASQCTAQELVKLLNELFGKFDELATENHCRRIKILGDCYYCVSGLTQPKTDHAHCCVEMGLDMIDTITSVAEATEVDLNMRVGLHTGRVLCGVLGLRKWQYDVWSNDVTLANVMEAAGLPGKVHITKTTLACLNGDYEVEPGYGHERNSFLKTHNIETFFIVPSHRRKIFPGLILSDIKPAKRMKFKTVCYLLVQLMHCRKMFKAEIPFSNVMTCEDDDKRRALRTASEKLRNRSSFSTNVVYTTPGTRVNRYISRLLEARQTELEMADLNFFTLKYKHVEREQKYHQLQDEYFTSAVVLTLILAALFGLVYLLIFPQSVVVLLLLVFCICFLVACVLYLHITRVQCFPGCLTIQIRTVLCIFIVVLIYSVAQGCVVGCLPWAWSSKPNSSLVVLSSGGQRTALPTLPCESTHHALLCCLVGTLPLAIFFRVSSLPKMILLSGLTTSYILVLELSGYTRTGGGAVSGRSYEPIVAILLFSCALALHARQVDIRLRLDYLWAAQAEEEREDMEKVKLDNRRILFNLLPAHVAQHFLMSNPRNMDLYYQSYSQVGVMFASIPNFNDFYIELDGNNMGVECLRLLNEIIADFDELMEKDFYKDIEKIKTIGSTYMAAVGLAPTSGTKAKKSISSHLSTLADFAIEMFDVLDEINYQSYNDFVLRVGINVGPVVAGVIGARRPQYDIWGNTVNVASRMDSTGVQGRIQVTEEVHRLLRRCPYHFVCRGKVSVKGKGEMLTYFLEGRTDGNGSQIRSLGLDRKMCPFGRAGLQGRRPPVCPMPGVSVRAGLPPHSPGQYLPSAAAGKEA

SEQ ID NO: 207602 - protein, 1057 aa, Artificial Sequence
  derived and/or modified sequence
MAGAPRGGGGGGGGAGEPGGAERAAGTSRRRGLRACDEEFACPELEALFRGYTLRLEQAATLKALAVLSLLAGALALAELLGAPGPAPGLAKGSHPVHCVLFLALLVVTNVRSLQVPQLQQVGQLALLFSLTFALLCCPFALGGPARGSAGAAGGPATAEQGVWQLLLVTFVSYALLPVRSLLAIGFGLVVAASHLLVTATLVPAKRPRLWRTLGANALLFVGVNMYGVFVRILTERSQRKAFLQARSCIEDRLRLEDENEKQERLLMSLLPRNVAMEMKEDFLKPPERIFHKIYIQRHDNVSILFADIVGFTGLASQCTAQELVKLLNELFGKFDELATENHCRRIKILGDCYYCVSGLTQPKTDHAHCCVEMGLDMIDTITSVAEATEVDLNMRVGLHTGRVLCGVLGLRKWQYDVWSNDVTLANVMEAAGLPGKVHITKTTLACLNGDYEVEPGYGHERNSFLKTHNIETFFIVPSHRRKIFPGLILSDIKPAKRMKFKTVCYLLVQLMHCRKMFKAEIPFSNVMTCEDDDKRRALRTASEKLRNRSSFSTNVVYTTPGTRVNRYISRLLEARQTELEMADLNFFTLKYKHVEREQKYHQLQDEYFTSAVVLTLILAALFGLVYLLIFPQSVVVLLLLVFCICFLVACVLYLHITRVQCFPGCLTIQIRTVLCIFIVVLIYSVAQGCVVGCLPWAWSSKPNSSLVVLSSGGQRTALPTLPCESTHHALLCCLVGTLPLAIFFRVSSLPKMILLSGLTTSYILVLELSGYTRTGGGAVSGRSYEPIVAILLFSCALALHARQVDIRLRLDYLWAAQAEEEREDMEKVKLDNRRILFNLLPAHVAQHFLMSNPRNMDLYYQSYSQVGVMFASIPNFNDFYIELDGNNMGVECLRLLNEIIADFDELMEKDFYKDIEKIKTIGSTYMAAVGLAPTSGTKAKKSISSHLSTLADFAIEMFDVLDEINYQSYNDFVLRVGINVGPVVAGVIGARRPQYDIWGNTVNVASRMDSTGVQGRIQVTEEVHRLLRRCPPLCVPRQSQCQGQRRDVDILSRRQD

SEQ ID NO: 207603 - DNA, 87 bp, Artificial Sequence
  derived and/or modified sequence
tagcaacattttagtaacatgatagaaacaaaacagcaacatagcaatgcaatagtaacacaacagcaacatcataacatggcagca

SEQ ID NO: 207604 - DNA, 3360 bp, Artificial Sequence
  derived and/or modified sequence
atggccggggctccccgcggcggaggtgggggaggagggggtgcaggcgagccaggaggtgctgagcgtgccgcaggtacctctcgccgcagaggattgcgcgcatgcgacgaagaatttgcgtgtccggagctagaagcactgtttcgagggtacactcttagattggagcaagcagccacacttaaggccctcgccgttctctcactgttggccggcgccctggccttggcagaactgctcggtgctccaggtcccgcacctgggctcgctaaggggtcgcaccccgtccactgtgtcctctttctggcccttctggtagtgacaaacgtcagaagtctgcaggtcccacagctccagcaggtgggacagctggctctgctgtttagcctcacattcgcactcttgtgctgcccctttgcactcgggggccctgccagaggctcagccggggctgctggggggcccgccaccgctgaacagggcgtctggcagctacttctggtcacattcgttagttatgcactcctgccggtgcggtctctcctggcaatcggctttgggcttgttgtggccgcctctcacctgctcgtcacagcaacactggttcccgcaaagagaccgcggctatggaggacacttggggctaatgccctgctgttcgtgggggttaacatgtatggtgtattcgtcaggattctgacagagaggagccagcggaaggcattcctgcaggcccgctcctgcatagaagaccggctacggctcgaagacgagaatgagaagcaggagaggttattgatgtcacttctcccgaggaatgtagccatggagatgaaggaggacttcctgaagccacccgagcgcattttccataaaatctatattcagcggcatgacaacgtgtcaatcctgttcgctgacattgtgggctttaccggactcgcgagtcagtgcacagcacaggaactcgtcaaactgctgaatgaactgtttgggaagtttgacgagttggccacggaaaaccattgtagacggatcaagattctgggagactgctactattgcgtgtcaggtttaacgcagcctaagacagaccatgcccactgttgtgtggaaatgggactggatatgatcgacactattacttccgtcgccgaagccactgaagtggacctgaacatgcgtgtaggactccatacaggcagagtcctgtgtggagtgttgggattgcggaagtggcagtacgatgtttggtctaatgatgtcacccttgcaaatgtgatggaggctgcgggactccctggtaaggttcacatcacaaagacgaccctggcttgtctcaacggggactatgaggtggagccaggttacggacatgagaggaactccttcctcaaaacacacaacattgaaacctttttcatagttccctctcatagacgaaagatatttcccggcctcattctatctgacatcaagcctgcgaaaaggatgaaatttaaaaccgtctgctatctgcttgtgcaacttatgcactgcagaaaaatgtttaaagctgaaatccccttctccaacgtcatgacatgcgaggatgacgataagcgaagagcgttgaggaccgcctcggaaaaactccggaaccgaagcagcttctctactaacgtggtctataccactcccggcacgcgggtgaaccggtacataagtaggcttctggaagcaaggcagacagaactcgaaatggcagatctaaatttctttacactgaagtacaagcatgtcgaaagggaacaaaagtatcaccaattacaggatgagtactttacaagtgccgttgtgctaacgcttatactggcagcccttttcgggcttgtctatcttctcatctttccccagtcggtcgtcgtcctgctgctgctggtcttctgtatctgtttcttagttgcctgtgtattatacttgcacattacaagagtccaatgttttcccgggtgcctcactattcaaatccgtacagttctgtgcatttttattgtcgtgctcatttattccgtggcccagggatgcgtggtgggctgcctgccttgggcctggtctagtaagccaaactccagccttgtggtcctgagttccggcggacagagaaccgcgttgcctacactaccctgtgagtctacccatcacgccctgctctgctgtctggtgggtactctgcccctggccatcttcttccgtgtctcaagtctcccaaagatgatcttactgtctggactgacaacttcatacatcctggttcttgagctgtctggatacaccagaaccggcgggggagcagtgagcggtagatcctacgaaccaatcgtggcaatccttcttttttcatgcgcactcgctttgcacgcacggcaagtggacatcagactgcggctcgactacctgtgggctgctcaggccgaggaggagcgcgaagacatggaaaaagtgaagttggacaatcgccggattctcttcaacttgcttcccgcccacgtcgcccagcacttccttatgtccaatccccgcaatatggatctgtattaccaatcctacagtcaggtgggcgtgatgttcgcgtcaatcccgaatttcaacgatttctatatcgaacttgacgggaacaacatgggcgtggagtgtttgcggctgctgaatgagatcatcgcggatttcgacgagctgatggaaaaagatttctataaagacatcgagaagatcaaaaccatcggaagcacctacatggctgccgtaggcctggctccgaccagcggcaccaaagccaaaaagagtatctccagccacctctcgaccctggccgactttgccattgaaatgttcgatgtgctcgacgagattaactatcagtcatataatgacttcgtcctgcgtgtgggaataaacgtcgggcctgtagtggccggcgttatcggagctaggcgcccccagtatgacatctggggaaacaccgtgaatgtcgctagcagaatggactcgactggtgtacaaggtcgcatacaggtgactgaggaggtgcataggttgcttagacgctgtccgtatcactttgtctgtaggggtaaagtttccgttaagggtaagggggagatgctcacctacttcctggaaggcagaaccgacggcaatgggagtcaaatccggagtctgggccttgatcggaagatgtgcccattcggccgcgcaggcctgcagggacggcgcccgcccgtatgtcccatgccaggagtgtctgttcgtgctggattgccgccacactcccccggacagtacctcccatctgccgctgccgggaaagaggcatag

SEQ ID NO: 207605 - DNA, 3174 bp, Artificial Sequence
  derived and/or modified sequence
atggcgggcgcccccaggggaggggggggaggtggcggaggggctggcgagcccgggggtgctgagagagccgctgggacgagcaggaggcgggggttgcgcgcatgtgacgaagaatttgcctgccccgaactcgaggccctgtttcggggttatactttacgattagagcaggccgcaaccctgaaagcgttagccgtgctcagtctgctggcaggagccctggcccttgcagaattactcggtgcacctggcccagcaccaggactggctaaggggtcccatcccgtgcactgcgtcctgttcctggctctgctagtcgttaccaacgtccggagcttacaggtgccccagcttcagcaggtgggacaactggccctattgttcagcttgactttcgccttgctttgctgcccttttgccctgggcgggccagcccgagggagcgcaggcgctgccggaggccccgccaccgcagaacaaggtgtctggcagttgctgctggtcaccttcgtcagctatgcactcctgccagtgcggtcgctcttggcaataggtttcgggcttgtggtggcagcgtcccatttactcgtaactgcaaccctcgtaccggctaagagacccaggctgtggaggaccctgggagcgaatgctctcttgttcgtgggcgtcaatatgtacggagtcttcgtgcgcattctaacggagcgcagccagcgaaaagcctttctgcaagctcgttcctgtatcgaggatcgcctgcgactggaagacgaaaatgagaaacaggagcgcctgttgatgtctctgctgcctcgtaacgtcgccatggagatgaaggaagacttcctgaagccccccgaacgcattttccataagatttacattcagcgacatgataacgtgtccatacttttcgcagatatagtcgggtttactgggctggcctcgcagtgtaccgcgcaggagctggtgaaacttctgaacgaactgttcgggaagttcgatgaactggccaccgaaaatcactgcaggcgcattaaaattctaggagactgctattattgtgtcagtggcctgactcagccgaaaacagaccacgcgcactgctgcgtggaaatgggactagacatgatagacactatcacctcagtggccgaagctaccgaagttgatttaaacatgcgtgttggactgcacaccgggcgggtactgtgcggggtccttggcctaagaaaatggcagtatgatgtgtggtctaacgatgttaccctggcaaatgtcatggaggccgcaggcttgcctggcaaagtgcacatcacaaagaccactttagcctgccttaacggggactacgaggttgaacctgggtacggccacgagagaaacagctttctgaaaacccacaatattgagacttttttcatcgtgcctagccacagacgaaaaatctttcccggtctgatactgtccgatatcaaacctgcaaagcgaatgaagtttaagactgtctgctacctcctggtacaattgatgcactgtaggaaaatgtttaaggctgagatccctttttctaatgtaatgacctgcgaggacgacgacaagaggcgagccctacgcactgcctccgaaaagttacgcaatagatcgtctttcagcacaaatgtggtatacaccacgccaggaacccgggtaaaccgttatatctctaggctgctggaggccagacagacggagctcgaaatggcagacttgaacttttttaccctgaaatacaagcatgtggaacgagagcagaaataccaccagctccaggatgaatacttcacctctgccgttgttctgacactcatcctggctgcattgtttggcctggtttacctcctgattttcccacagagtgtagttgtgctgcttttactcgtcttctgtatctgctttttagtcgcctgtgtgctgtatctgcatattaccagggtccagtgtttccctgggtgtctgacaatccagatcagaacggttctatgtatcttcatcgtggtcctgatctacagtgtagcgcaaggatgcgtggttgggtgtctgccttgggcctggtcctccaagcccaatagtagccttgtggtcctgtcaagtggagggcagcgaacagccctgcctactctgccttgtgagagcacacaccatgcactcctctgttgtctggtgggcacactgccattagccattttcttccgggtgtcatccctgcctaaaatgatactgttatccggcctgacaacctcgtatatcctagtgctggagctgtccggctatacacggacaggggggggtgctgtttctgggcgctcctacgaacccattgtggccatcctgcttttctcttgcgcgctcgccttgcatgcaaggcaagtcgatatacggctccggctggattacctgtgggccgcccaggctgaagaagaaagggaggacatggagaaagtgaaactcgataataggaggattctctttaacctcttaccggcccatgtcgcgcagcactttttgatgtctaatccaagaaacatggacctgtactaccagtcatattctcaggtgggtgtaatgttcgctagcatacccaacttcaacgacttttacattgagctcgacggtaacaacatgggtgtagaatgtctgagactacttaatgagataatcgctgacttcgacgagctgatggaaaaagacttttacaaggacatcgagaagatcaaaaccattggatccacttacatggcggccgtggggctggccccaacttctggcacaaaagccaagaagagtattagcagccacctctcaactctggcagacttcgccatcgagatgttcgacgttctggacgagataaactaccaaagctataatgactttgtattgagagtcggcatcaacgttggccctgttgtcgcaggggtcatcggggccaggcgccctcagtacgacatctggggcaacacggtcaacgtcgcatcgaggatggactccactggagtccaaggacgcattcaagtaactgaagaagtacaccgcctactgcggaggtgcccgcctctctgtgtacccagacaatctcagtgccagggtcagaggagagatgtggacatcctttcacgcagacaagattag

SEQ ID NO: 207606 - DNA, 12503 bp, Artificial Sequence
  derived and/or modified sequence
gcggccgctgcatggcgctgagatggcgggggcgccgcgcggcggaggcggcggcggaggcggcgcgggcgagcccgggggcgccgagcgggcggccgggacaagccgccggcgcgggctccgggcgtgcgacgaggagttcgcttgcccagagctggaggcgctgttccgcggctacacgctgcggctggagcaggcggccacgctgaaggcgctggccgttctcagcctgctggcgggcgcgctggcgctggccgagctgctgggcgcgccggggcccgcgcccggcctggccaagggctcacacccggtgcactgcgtcctcttcctggcgctgctcgtggtaaccaacgtccggtccctgcaggtgccccagctgcagcaggtcggccagctggcgctgctcttcagcctcaccttcgcgctgctctgctgtcctttcgcgctgggcggccccgcccggggttccgccggggccgctggggggccagcgaccgccgaacaaggggtttggcagctccttttggtcaccttcgtgtcctatgccttgctgcccgtgcgcagcctgctggccataggctttgggctcgtggtggctgcgtcgcacttgctggtcacagccaccttggtccccgccaagcgcccacgtctctggaggacgctcggtgccaatgccttgctcttcgtcggtgtgaacatgtatggggtctttgtgcggattctgactgagcgttcacagaggaaggcgttcctgcaggcccggagctgcattgaggaccgactgaggctggaggatgagaacgagaagcaggagcggctcctcatgagcctcctgccccggaacgttgccatggagatgaaggaggacttcctgaagccccctgagaggattttccacaagatttacatccagaggcacgacaatgtgagcatcctgtttgctgacatcgtgggtttcacgggcttggcatcccagtgcacagcccaggagctggtgaaactcctcaatgagctcttcggcaagttcgatgaattagccacggagaaccactgtcgccgcatcaagattctcggggactgctactactgcgtgtcgggcctcacccagcccaagactgaccatgcccactgctgtgtggagatgggactcgacatgattgataccatcacatctgtggctgaagccaccgaggtggatctgaacatgcgtgtgggtctgcacacgggcagggtcctctgtggtgtcctgggcttgcgcaagtggcagtacgacgtgtggtccaatgatgtgaccttggccaatgtcatggaagccgctggcctgccagggaaggttcatatcacaaagacgaccctagcgtgcttgaatggggactacgaggtagaaccgggttacggacatgagaggaacagtttcttgaaaactcataacatcgaaaccttttttattgtgccatcccatcgccgaaagatatttccaggcctgattctctcagatataaaaccggccaaaaggatgaagttcaagactgtctgctacctgctggtgcagctcatgcactgccggaaaatgttcaaggccgagatccccttctccaatgtcatgacctgcgaggacgatgacaagcggagggcattaagaacagcctcggaaaaactcagaaaccgctcatctttttctaccaacgttgtctacaccaccccgggcactcgcgtcaacaggtacatcagccgcctcttagaagcccgccagacagagctggagatggcagacctgaacttctttaccctgaagtacaaacatgtcgaacgggagcaaaagtaccaccagcttcaggacgagtatttcaccagcgccgttgtcctcaccctcatcctggctgccttatttggccttgtctaccttctaatattcccacagagtgtggtcgtcctgctcctgctagtattctgcatctgcttcctggtggcctgtgtcctgtacctgcacatcacccgggtccagtgttttccagggtgcctgacgattcagattcgcactgtcctgtgtattttcatagtggtcttaatctactcagtagcccaaggttgtgtggtgggctgcctgccttgggcctggagctccaagcccaacagttccctggtggtcctttcgtctgggggccagcgcacagccctgcccaccctgccctgcgagtctacacaccatgccctgctctgctgcctggtgggcaccctcccgctagccatatttttccgggtgtcctccttgccaaaaatgatcctgctctccgggctcaccacgtcctacatcctcgttctggagctcagcggatacaccaggactgggggtggtgccgtctccgggcgcagctacgagccgattgtggccatcctgctcttctcctgtgcgctggccctgcatgccaggcaggtggacatcaggctgaggctggactacctctgggccgcacaggcagaggaggagcgagaggacatggagaaggtgaagctggacaacaggcgcatcctcttcaacctcctgccggcccacgtcgcccagcacttcctcatgtccaaccctcggaacatggacctctactaccagtcctactcccaggtgggcgtcatgtttgcctccatccccaacttcaatgacttctacatcgagctggacggcaacaacatgggggtggagtgtctgcggcttctcaacgagatcatcgccgactttgacgagctcatggaaaaagacttttacaaggacatagagaagatcaagaccatcgggagcacctacatggccgctgtggggctagcgcccacctcggggaccaaggctaagaagtccatctcctcccacctgagcacgctggcggactttgccattgagatgtttgacgttctggatgaaatcaactaccagtcttacaacgactttgtcctccgagttggcatcaatgttggccctgtggtggctggagtgattggcgctcgcaggccccagtacgacatctggggaaacacagtcaacgtggccagtcggatggatagcacaggggtccagggcagaatccaggtgactgaggaagtccaccggctgctgagaaggtgcccctaccactttgtgtgccgaggcaaagtcagtgtcaagggcaaaggcgagatgttgacatactttctagaaggcaggactgatggaaacggctcccaaatcaggtccctgggcttggatcggaaaatgtgtccatttgggagagctggccttcagggcagacgtccccccgtgtgccccatgcctggcgtctcagtcagggctgggctccctccacactccccaggccagtacctgccctctgcagcagctgggaaggaggcttagtggagcccacgtgggcctctggggtgcacatggggtgggaatgctccgggggtgacacaggccacggtggctccagccaggaccagccagaccagcagagcagggagccacttgccagggtggaggaggagcattgtccaggcatggcctgtggcccgagggccaaccaccgagcaggcacagcacagcagtgactcggtgaggggaggacacccgactgtgcacacttccaggcctccctggagaggtgtccactccatccttccctccgtggcgtagggagcactgtttctttccagcaagcctgttcaggtttggccaggtcggcatcaatgtaaggaccttcagagcatcccagggttacagcaagagccactgaggtgtggctggcagagcaactgaggagctctgcgagagtgtgccctctgagacagccctgtccgccccgcccaggtgggacctgacatacaggcggctccagccctgggcagcggcttcaagagccagagtgggaagtcaggcctctctgggaaggtcacaaggcctggggttgttcacaccacaggcacaatacagagctgtccactcttgaactggaccgtctggggagaattgagaagctgcctctcactgcatggatagtggtggctgctggctttcaagcgtggttttttgctaagagccagaggcaggtcttctggagttctcaggggggccctgtgaccccctctccacaaccatggccagcatcggcttcttgctgcacctgtgcattctccacccctccgccaatggcttccagctcctaaaacacctggacattccccatcctgcaccggcactgtgtttgttcagagaaaacgaagggtgtcatttcttcttttccctgtggcatcgtggatcctttacatttagcaacaacagtgtgaggctccacttctgttgaatatgagcggctgtcacacccatgagcaagtttccttgatggaagatgctgtttctccggcagaaccaaccctccaggacgaagtttcagaattggctgatggtcgtgagtgcaggtgtccctgttgtaatttgcagggaaattgactgcaggtgatagtgttgacgtctgacgtctgacaacctcctatgtgcatgtctaaatagtcacaatgaagatgaaaataaggatgatggggacggggtccaggagggccactgggaaggcactatccagaaatagtggacagaggtctggcatgtggaaaccttggatctcggtcacagggaggaaggcagctagaaatgggagggaagcttctgggtaggcaccatagtaggggaatgtctaaagacccactgctctgagatgtggtcagagaggtttctgtggactgcagatgaggcctgagccctgcctatgctcaaagccagcagggttgggggtccgcctcctcactgctcctcaacagctgtaaccctttcctgagggccccgacttttcagaataggagcagagagaagcccagacttccttccctggagtgtagacctgtgtgtgggacctgctccaggctgatccctgtccgcacaggtgggtgatgtccttggctgctgccgtcagaggcagccccctgcacagggaggggctgatcctgcctcagctgtgtggccatgtgggggcagcaggggcctgggccatagctgggggaggccagaccctgagggctttgcagggcggccagtgcagtgatgcctggcgcttccagctgagacaggagtccggacagaggtgggcagggtggatggcttcgggcagggaaggcgggtagaggctgcatgtgggggcccctgtctgcctgtccttagggtgtggattaggctctggcttctgtgatggtgcaagaggcaggatggtctccagacaccttcttgcagagtgattttgaccaatgcctttccagcaccttcccctggttatgacagggagctcccaggccaggccacatgaccccacaggtaggctgaccccatggacccactggagactttgagggcagagctcgggcacctttcatcttccttgggtggtcctcatgtcgctgtccgctcatgttcctggtgttctggcatcaccttgtgccggtgggggctgggctcccgtgaggtcctagggcagaaggaggtgcttgcagggcctctcgctgctactgggacatccacaggacctaatgtttatgtggaatctccaggctgccatcgagggctcctgagctcatcctgaggacccagggtccatctgagctggctgtgggctgagatcctggctggggccctgctgtcaacctctcctccaggccctgccttgtccctgctcctgtgctttcctctcttcaggacaaatggtttgtccttatggtcccctttccactaggattttctcatcctcatctgtctatcccagccggatttaaagcagtcacttcagacaggagccacagggagcctgtgagggagtagtgcggtggtggtgagtgtggctgccctggctcccccagctcaccgtggtgctgtccttgacccacgagctgttgagaagggtgcagagcccctggcacagccaaccctgttgcccccagtgccgctgcccagcttcggccatccaggtggtgggtagacagaggagtgaaccccaaaggtgtccatgccccagttctaagccctgtggccaggtgctgtcacacagcaaaggggactttgcaggtggaattagggttagggatctaaggatgggaggggaacttggtttatctgggtgggctcagtgaccccttggaatggctgagggaggcaggagagcctggaaagattcgaagtgtcacagagatggtgccgtcattgctggcttaaagacaaggggccaggagccaacaccagaggccactccacaaccccagcgccagtcagcaaggaagccgggtgtcgctcacacaaccagaaggagctgagtttggcaacaacccaagtgagcctgaagcagattcgccccagagcctccaggcgtgagtggagcccagtccagcgacaccttggtttggcctgtgagactgagaagagagccagccacgccatgctgtgcctggggtccacagagccgggaggtcacacatgtacatcctggaagctgcccaaggtgtggccacttgtagggcagtgagaggaagccgtcgcggggaccatgctgccttctctgggctcacgactgttctggaaaggaccccatggcagacttggcaaggtctccacttcaggggcaaacatctccatcatcagcaactccaaaccccagccacttcctgggagttcaggaactgtgtttagccataatgtcccttggggtttggtgaaaaacaacttcctttttatttgtgggaaaactgtattatattgccttatttatttttaatcatgtacaatattcatgtacaaatgttagagccattcgggtaggattctctctaaattatttattgaagaggctttgtaaatagtgcaccagtgacaggtgctgcctgtttactcgtaccaaaaatgaagacaagccccacacccacctcagcccttgcttggccatgctgtggccctttggaaatgaccctgtgtgctcccctcgcgacccttgcatgcctttcatgcctgatgccgtagagtagaacacagccccggaatgcttccagttgcttgcaagggaccatgccggcccgggtggtccatgcctgcggggtgtctgtatcctgcaggaggacgcccctacagacccagcaacccaagttgccagcccgtgtttctcagactttaaagccaccagggcttctggaacacctgtcatagaagcaataactctaactctatactgtagagatgagtctggtccgaagcagattagtaatttagagataagccatgcatacaagtttgccccattctctggcttggggtggtgggaggcggggagctgccactcccaaagcctccaccccttcctgaagacccagctatgaaaccgcagttcctgtgggttgggctgcccaggctggtcagagctcagcaccccaggtctggtgagcagacagagccggcgttaaaccccgatcaggtcattgtcaccacacccttgcttggatgaggaaggaaggaggcaaaggcacccactccatccaagatccgttccaattgatgagcctcagtactggcctcacactgaccaacggtggtatgctgcagtttgttggtttggtgcagagtctaaaggataacatatcaaggcttacctgtgataggccattttaaggaaatggtggcactctgaaggctgtccccattcaccttccacaatgctggtaccatcctggtagaagagccctctgaacaggacacctgttcaggcctgggggccccatgctaggcttgcctgggtgtgagaaggtcgaactgggtggcttaggccttcaaattgagcttgggggtgtccaagagaggggtcttattcgaggaactcacataccccaaataaccatcagtgcacaaatcattccatgctctttggcaccaggcaggagatgctgcaggcaggtgtccgtagttggcaaaaatgggcagtaggggaaatggagttgcttcaacctttctcagtcccggccctcactgcacccaccaagtcaagcagagctgggtgggctgagaccagcatcccagctggactgagcctggggggaggggctggagccaaggagcccccctgggtgggggcatcaggagcaggggcagggcctgaggactgctccccctgcatggagggcaggccaggatggagcccagggtagactttgaggaaggctcagtgggctcagcagaaggaaggctcttctcatagttgtggtttttcacagatggatttgggtgatctgagtgtggtcaggccctgccgttggggaatgaatgccacacggggtttgtctgtaagctgcagtgtctgtgattctgtgtgaactgacagcagggagctgaaggacaggccccggccttgggagaggacacgggcatgggctgctggatgcagggctcccagggctgtgaaggcagaggggtctctggaggcagacagggtgggctgggggccagcagcagggggcagagccccagccagggcagctgcttcctgcacatagacattcctcctgcgcagggccaagtgcccatgagcacagccccagacagacacggtggggagcttggagccctccgctcacctagaggagccctgggacacgcactggaaagtattctaggggcttcctgccttatccttctgtttgttcatacacttagtgaaagcagatcctgtactaggatgtgaggatatctgtcacctgcgtggtccattccataaacaccagattccatttcagttgccacacattttggggctagacttccctaaacaacatgccattgtgaaataatgcatatatttgtatttttaaatttccctgaaaatttaatctattctgttccatatgaagtctgtttcactaccttaaaaaatagatactccactagaggctgtgcttaattcaaatccatgtgtgtgcctgcattacatgtgtgaacacgtgtttctgtcgtgtgtgtcatgcacatctgtgtgttgcatagcataagccaaatgaaaatcatttgttcatgggattcatatgaggaacaaaattaaatttgaatacagtcagataactgccacgcagggcatttggggaaccatccccgaatgccctgatgtgatttccctcagaaaatccttgttattagaggagaaggtctgggcaggggcagcagcatctcagacatcaagtcaactttatcatctactacatcagcactgaagtccaggggcattgaggcactaactaggttccattttctttggtttggttacttattttttctttttgggttctcggtgtgcagaggctgtagagagagcctcagggcggtgaccgctgcaggaattcggccctccagctcccctccagttaccaggagccgatttggaggccaggccttcccagctgagtgtctgtcagcttcattctctctcagctgtgcagtggaagagcaacaacagacaggtgaccttcttgggttgtgcttcacaatggactgggaaaaacatctttgaaatcaggaaatcaggccgggcgcagtggctcatgcctgtaagcccagcactttgggaggcggaggcgggtggatccattgaggtcaggagctcaagaccagcctggtcaacatggtgaaaccccgtctctactaaaaatacaaaaaaaaaattagctgggcgtgttggcgggagcctgtagtcccagctacacgggaggctaaggtgggagaattgcttgaacccgggaggcggaggttgcagtgagctgagattgcaccattgcactccagcctgggcgacagagcaagactctctcaaaaaaaaaaaaaaaagaaagaaagaaatcagaaaatcgaccacagtggtagccacctggcctaatgctgtgtttttgtacctgacaggggtcactcattttaggcacaactccttcattctttgtgaaattagtgagtttccttctacccgtcaccagattcaatatgttctattaatacaccgataaccacaggggaagggcacttgtcgctctcccacctggttaccacagtctccatgggtcttttgccgtgaccacaaataaaggaaacactcatcactagtatctaagtcgggctttacagtaactatgcaccttctgtgtgcttcacctcactctctacttcaaacagcccatggagggaggtattattatactccttatgttgacagtgaagaatctgaggcccagagaggttggggacttgagtaaagtcacacagccctgagaggcaggaccagggttccattcctgctctatccagttccaagcccttgtgttttccattatgtttagtgcctctttgctaacagcaacatctgcaagatttgtgttggttttgatggagaactctagctcatccacatgctagtgcccaagtggtggaggggccacctcagcaggtgggttctgaatgcagccaaggctgtccccgcaatgggtgagactcgctccaactgcccgccctcagagcaggtgcctaagtcctccctggcactggcaggccttacctcacattgctaaattaaagcaatgcaattcctcttgggtaagaggaattcctccttctttactaactgatccccagcaaggaaataaaatgttaggctttaaaaatccctactttgtcatatcagactatattctaaaactatatttgagcgaaacctgtcattgcgtctaatttcaaatatacagaatctccttaagagctgttgccttatttttttgtaaagcctctctgacatcaaatggggagaaatggtggcacctccagacaccctgaaactacacaccatttcttccctgctcagcttctgctcaggagttctgtgagctatgggaaggccattggttgtatttgctacttttactttcatcttcctctgctgtagagccatttaatgttattgtcatatgctgctggtgaggtaaaggtgggtccgggtgccttcccaggggttagaggatgttcaaagggccgatttcagcaggagttcagagggcttatgatggatggtgagagatttgacaaccaccagagcacatgtgctctgaccctctcctgggcattggttcctgctggtaccgggcggttcagaccttcaaataggttgctttcaaaagagctttcaggcacttattgagaattaatgtttaaacagacataatagcctagatgaactcccaagagatctattaaatcttgtgggctgaataaatatctcgtgcaggactgtgcaacagtagcccagagcatcctgcctgtgggcatccacctcccaggtgagggcagtgggaagctggcccgacggcagccagaacttgtttctcacctcccaccagcaaccccccacccaactctgggccccaggcacacgaagcacaagtctcaggggaccattcccacattgggggatcctgagggagcccatcaccgcctcttgcatacaactgtccactaggaggcacgcccagtgtgggagagatgtatggtcttgccttccacctgtaaaaactgcacatatgcaagccatttgcactctggaactgcatgccgtgaaaactcctaatggtgtggaacttagtttgaatttgaaatcacgccgcatgcacaaagggacaggcccaggcccgacctcaggtcatccgcccgctggctgcagagcatccctgggagccaaggcgaggcccgtggagcctgagctttgtgtagctcgagctttgtgtagctcgtgcacttattatgcaccacctcccttcagtcaccactcctcttcctccgccatcctcatttatactgattgcacaccccccgctcaaacaacaatgtccttattatgatgaccatctcgtagtggtacattccattcctatttaaggtaagcccaaagcccacttttggattttctcgactgtccgagaaaagttgtgtaagcgcctgcgttcttctgggtttggctagatagggttgtgtccctctatggaatggagagtgatgtgggcaagggtgtcattttctcgcacaatacaactcactgaggatgcttctgtagaagtgagaaacacgatgagtacattcagaattacaataactcactctcactgggtaacttctcatgatagatttgtatgatcaatacgggtctatttttatgtcaactgaacactgtagggtaccttccagtctttttcaagattgttaaattgagacaagtaattgaataatttgtcctatttttattttaaaaaaagtgaatggactgaaatgttaaatgtgaatgtacatttcttaattgcaacttttctactgagtgtttgcactatactttctggaatcttatttaacaaaaataaagggaaaaaattgcttgactaaa

SEQ ID NO: 207607 - DNA, 12497 bp, Artificial Sequence
  derived and/or modified sequence
ccgctgcatggcgctgagatggcgggggcgccgcgcggcggaggcggcggcggaggcggcgcgggcgagcccgggggcgccgagcgggcggccgggacaagccgccggcgcgggctccgggcgtgcgacgaggagttcgcttgcccagagctggaggcgctgttccgcggctacacgctgcggctggagcaggcggccacgctgaaggcgctggccgttctcagcctgctggcgggcgcgctggcgctggccgagctgctgggcgcgccggggcccgcgcccggcctggccaagggctcacacccggtgcactgcgtcctcttcctggcgctgctcgtggtaaccaacgtccggtccctgcaggtgccccagctgcagcaggtcggccagctggcgctgctcttcagcctcaccttcgcgctgctctgctgtcctttcgcgctgggcggccccgcccggggttccgccggggccgctggggggccagcgaccgccgaacaaggggtttggcagctccttttggtcaccttcgtgtcctatgccttgctgcccgtgcgcagcctgctggccataggctttgggctcgtggtggctgcgtcgcacttgctggtcacagccaccttggtccccgccaagcgcccacgtctctggaggacgctcggtgccaatgccttgctcttcgtcggtgtgaacatgtatggggtctttgtgcggattctgactgagcgttcacagaggaaggcgttcctgcaggcccggagctgcattgaggaccgactgaggctggaggatgagaacgagaagcaggagcggctcctcatgagcctcctgccccggaacgttgccatggagatgaaggaggacttcctgaagccccctgagaggattttccacaagatttacatccagaggcacgacaatgtgagcatcctgtttgctgacatcgtgggtttcacgggcttggcatcccagtgcacagcccaggagctggtgaaactcctcaatgagctcttcggcaagttcgatgaattagccacggagaaccactgtcgccgcatcaagattctcggggactgctactactgcgtgtcgggcctcacccagcccaagactgaccatgcccactgctgtgtggagatgggactcgacatgattgataccatcacatctgtggctgaagccaccgaggtggatctgaacatgcgtgtgggtctgcacacgggcagggtcctctgtggtgtcctgggcttgcgcaagtggcagtacgacgtgtggtccaatgatgtgaccttggccaatgtcatggaagccgctggcctgccagggaaggttcatatcacaaagacgaccctagcgtgcttgaatggggactacgaggtagaaccgggttacggacatgagaggaacagtttcttgaaaactcataacatcgaaaccttttttattgtgccatcccatcgccgaaagatatttccaggcctgattctctcagatataaaaccggccaaaaggatgaagttcaagactgtctgctacctgctggtgcagctcatgcactgccggaaaatgttcaaggccgagatccccttctccaatgtcatgacctgcgaggacgatgacaagcggagggcattaagaacagcctcggaaaaactcagaaaccgctcatctttttctaccaacgttgtctacaccaccccgggcactcgcgtcaacaggtacatcagccgcctcttagaagcccgccagacagagctggagatggcagacctgaacttctttaccctgaagtacaaacatgtcgaacgggagcaaaagtaccaccagcttcaggacgagtatttcaccagcgccgttgtcctcaccctcatcctggctgccttatttggccttgtctaccttctaatattcccacagagtgtggtcgtcctgctcctgctagtattctgcatctgcttcctggtggcctgtgtcctgtacctgcacatcacccgggtccagtgttttccagggtgcctgacgattcagattcgcactgtcctgtgtattttcatagtggtcttaatctactcagtagcccaaggttgtgtggtgggctgcctgccttgggcctggagctccaagcccaacagttccctggtggtcctttcgtctgggggccagcgcacagccctgcccaccctgccctgcgagtctacacaccatgccctgctctgctgcctggtgggcaccctcccgctagccatatttttccgggtgtcctccttgccaaaaatgatcctgctctccgggctcaccacgtcctacatcctcgttctggagctcagcggatacaccaggactgggggtggtgccgtctccgggcgcagctacgagccgattgtggccatcctgctcttctcctgtgcgctggccctgcatgccaggcaggtggacatcaggctgaggctggactacctctgggccgcacaggcagaggaggagcgagaggacatggagaaggtgaagctggacaacaggcgcatcctcttcaacctcctgccggcccacgtcgcccagcacttcctcatgtccaaccctcggaacatggacctctactaccagtcctactcccaggtgggcgtcatgtttgcctccatccccaacttcaatgacttctacatcgagctggacggcaacaacatgggggtggagtgtctgcggcttctcaacgagatcatcgccgactttgacgagctcatggaaaaagacttttacaaggacatagagaagatcaagaccatcgggagcacctacatggccgctgtggggctagcgcccacctcggggaccaaggctaagaagtccatctcctcccacctgagcacgctggcggactttgccattgagatgtttgacgttctggatgaaatcaactaccagtcttacaacgactttgtcctccgagttggcatcaatgttggccctgtggtggctggagtgattggcgctcgcaggccccagtacgacatctggggaaacacagtcaacgtggccagtcggatggatagcacaggggtccagggcagaatccaggtgactgaggaagtccaccggctgctgagaaggtgccccccactttgtgtgccgaggcaaagtcagtgtcaagggcaaaggcgagatgttgacatactttctagaaggcaggactgatggaaacggctcccaaatcaggtccctgggcttggatcggaaaatgtgtccatttgggagagctggccttcagggcagacgtccccccgtgtgccccatgcctggcgtctcagtcagggctgggctccctccacactccccaggccagtacctgccctctgcagcagctgggaaggaggcttagtggagcccacgtgggcctctggggtgcacatggggtgggaatgctccgggggtgacacaggccacggtggctccagccaggaccagccagaccagcagagcagggagccacttgccagggtggaggaggagcattgtccaggcatggcctgtggcccgagggccaaccaccgagcaggcacagcacagcagtgactcggtgaggggaggacacccgactgtgcacacttccaggcctccctggagaggtgtccactccatccttccctccgtggcgtagggagcactgtttctttccagcaagcctgttcaggtttggccaggtcggcatcaatgtaaggaccttcagagcatcccagggttacagcaagagccactgaggtgtggctggcagagcaactgaggagctctgcgagagtgtgccctctgagacagccctgtccgccccgcccaggtgggacctgacatacaggcggctccagccctgggcagcggcttcaagagccagagtgggaagtcaggcctctctgggaaggtcacaaggcctggggttgttcacaccacaggcacaatacagagctgtccactcttgaactggaccgtctggggagaattgagaagctgcctctcactgcatggatagtggtggctgctggctttcaagcgtggttttttgctaagagccagaggcaggtcttctggagttctcaggggggccctgtgaccccctctccacaaccatggccagcatcggcttcttgctgcacctgtgcattctccacccctccgccaatggcttccagctcctaaaacacctggacattccccatcctgcaccggcactgtgtttgttcagagaaaacgaagggtgtcatttcttcttttccctgtggcatcgtggatcctttacatttagcaacaacagtgtgaggctccacttctgttgaatatgagcggctgtcacacccatgagcaagtttccttgatggaagatgctgtttctccggcagaaccaaccctccaggacgaagtttcagaattggctgatggtcgtgagtgcaggtgtccctgttgtaatttgcagggaaattgactgcaggtgatagtgttgacgtctgacgtctgacaacctcctatgtgcatgtctaaatagtcacaatgaagatgaaaataaggatgatggggacggggtccaggagggccactgggaaggcactatccagaaatagtggacagaggtctggcatgtggaaaccttggatctcggtcacagggaggaaggcagctagaaatgggagggaagcttctgggtaggcaccatagtaggggaatgtctaaagacccactgctctgagatgtggtcagagaggtttctgtggactgcagatgaggcctgagccctgcctatgctcaaagccagcagggttgggggtccgcctcctcactgctcctcaacagctgtaaccctttcctgagggccccgacttttcagaataggagcagagagaagcccagacttccttccctggagtgtagacctgtgtgtgggacctgctccaggctgatccctgtccgcacaggtgggtgatgtccttggctgctgccgtcagaggcagccccctgcacagggaggggctgatcctgcctcagctgtgtggccatgtgggggcagcaggggcctgggccatagctgggggaggccagaccctgagggctttgcagggcggccagtgcagtgatgcctggcgcttccagctgagacaggagtccggacagaggtgggcagggtggatggcttcgggcagggaaggcgggtagaggctgcatgtgggggcccctgtctgcctgtccttagggtgtggattaggctctggcttctgtgatggtgcaagaggcaggatggtctccagacaccttcttgcagagtgattttgaccaatgcctttccagcaccttcccctggttatgacagggagctcccaggccaggccacatgaccccacaggtaggctgaccccatggacccactggagactttgagggcagagctcgggcacctttcatcttccttgggtggtcctcatgtcgctgtccgctcatgttcctggtgttctggcatcaccttgtgccggtgggggctgggctcccgtgaggtcctagggcagaaggaggtgcttgcagggcctctcgctgctactgggacatccacaggacctaatgtttatgtggaatctccaggctgccatcgagggctcctgagctcatcctgaggacccagggtccatctgagctggctgtgggctgagatcctggctggggccctgctgtcaacctctcctccaggccctgccttgtccctgctcctgtgctttcctctcttcaggacaaatggtttgtccttatggtcccctttccactaggattttctcatcctcatctgtctatcccagccggatttaaagcagtcacttcagacaggagccacagggagcctgtgagggagtagtgcggtggtggtgagtgtggctgccctggctcccccagctcaccgtggtgctgtccttgacccacgagctgttgagaagggtgcagagcccctggcacagccaaccctgttgcccccagtgccgctgcccagcttcggccatccaggtggtgggtagacagaggagtgaaccccaaaggtgtccatgccccagttctaagccctgtggccaggtgctgtcacacagcaaaggggactttgcaggtggaattagggttagggatctaaggatgggaggggaacttggtttatctgggtgggctcagtgaccccttggaatggctgagggaggcaggagagcctggaaagattcgaagtgtcacagagatggtgccgtcattgctggcttaaagacaaggggccaggagccaacaccagaggccactccacaaccccagcgccagtcagcaaggaagccgggtgtcgctcacacaaccagaaggagctgagtttggcaacaacccaagtgagcctgaagcagattcgccccagagcctccaggcgtgagtggagcccagtccagcgacaccttggtttggcctgtgagactgagaagagagccagccacgccatgctgtgcctggggtccacagagccgggaggtcacacatgtacatcctggaagctgcccaaggtgtggccacttgtagggcagtgagaggaagccgtcgcggggaccatgctgccttctctgggctcacgactgttctggaaaggaccccatggcagacttggcaaggtctccacttcaggggcaaacatctccatcatcagcaactccaaaccccagccacttcctgggagttcaggaactgtgtttagccataatgtcccttggggtttggtgaaaaacaacttcctttttatttgtgggaaaactgtattatattgccttatttatttttaatcatgtacaatattcatgtacaaatgttagagccattcgggtaggattctctctaaattatttattgaagaggctttgtaaatagtgcaccagtgacaggtgctgcctgtttactcgtaccaaaaatgaagacaagccccacacccacctcagcccttgcttggccatgctgtggccctttggaaatgaccctgtgtgctcccctcgcgacccttgcatgcctttcatgcctgatgccgtagagtagaacacagccccggaatgcttccagttgcttgcaagggaccatgccggcccgggtggtccatgcctgcggggtgtctgtatcctgcaggaggacgcccctacagacccagcaacccaagttgccagcccgtgtttctcagactttaaagccaccagggcttctggaacacctgtcatagaagcaataactctaactctatactgtagagatgagtctggtccgaagcagattagtaatttagagataagccatgcatacaagtttgccccattctctggcttggggtggtgggaggcggggagctgccactcccaaagcctccaccccttcctgaagacccagctatgaaaccgcagttcctgtgggttgggctgcccaggctggtcagagctcagcaccccaggtctggtgagcagacagagccggcgttaaaccccgatcaggtcattgtcaccacacccttgcttggatgaggaaggaaggaggcaaaggcacccactccatccaagatccgttccaattgatgagcctcagtactggcctcacactgaccaacggtggtatgctgcagtttgttggtttggtgcagagtctaaaggataacatatcaaggcttacctgtgataggccattttaaggaaatggtggcactctgaaggctgtccccattcaccttccacaatgctggtaccatcctggtagaagagccctctgaacaggacacctgttcaggcctgggggccccatgctaggcttgcctgggtgtgagaaggtcgaactgggtggcttaggccttcaaattgagcttgggggtgtccaagagaggggtcttattcgaggaactcacataccccaaataaccatcagtgcacaaatcattccatgctctttggcaccaggcaggagatgctgcaggcaggtgtccgtagttggcaaaaatgggcagtaggggaaatggagttgcttcaacctttctcagtcccggccctcactgcacccaccaagtcaagcagagctgggtgggctgagaccagcatcccagctggactgagcctggggggaggggctggagccaaggagcccccctgggtgggggcatcaggagcaggggcagggcctgaggactgctccccctgcatggagggcaggccaggatggagcccagggtagactttgaggaaggctcagtgggctcagcagaaggaaggctcttctcatagttgtggtttttcacagatggatttgggtgatctgagtgtggtcaggccctgccgttggggaatgaatgccacacggggtttgtctgtaagctgcagtgtctgtgattctgtgtgaactgacagcagggagctgaaggacaggccccggccttgggagaggacacgggcatgggctgctggatgcagggctcccagggctgtgaaggcagaggggtctctggaggcagacagggtgggctgggggccagcagcagggggcagagccccagccagggcagctgcttcctgcacatagacattcctcctgcgcagggccaagtgcccatgagcacagccccagacagacacggtggggagcttggagccctccgctcacctagaggagccctgggacacgcactggaaagtattctaggggcttcctgccttatccttctgtttgttcatacacttagtgaaagcagatcctgtactaggatgtgaggatatctgtcacctgcgtggtccattccataaacaccagattccatttcagttgccacacattttggggctagacttccctaaacaacatgccattgtgaaataatgcatatatttgtatttttaaatttccctgaaaatttaatctattctgttccatatgaagtctgtttcactaccttaaaaaatagatactccactagaggctgtgcttaattcaaatccatgtgtgtgcctgcattacatgtgtgaacacgtgtttctgtcgtgtgtgtcatgcacatctgtgtgttgcatagcataagccaaatgaaaatcatttgttcatgggattcatatgaggaacaaaattaaatttgaatacagtcagataactgccacgcagggcatttggggaaccatccccgaatgccctgatgtgatttccctcagaaaatccttgttattagaggagaaggtctgggcaggggcagcagcatctcagacatcaagtcaactttatcatctactacatcagcactgaagtccaggggcattgaggcactaactaggttccattttctttggtttggttacttattttttctttttgggttctcggtgtgcagaggctgtagagagagcctcagggcggtgaccgctgcaggaattcggccctccagctcccctccagttaccaggagccgatttggaggccaggccttcccagctgagtgtctgtcagcttcattctctctcagctgtgcagtggaagagcaacaacagacaggtgaccttcttgggttgtgcttcacaatggactgggaaaaacatctttgaaatcaggaaatcaggccgggcgcagtggctcatgcctgtaagcccagcactttgggaggcggaggcgggtggatccattgaggtcaggagctcaagaccagcctggtcaacatggtgaaaccccgtctctactaaaaatacaaaaaaaaaattagctgggcgtgttggcgggagcctgtagtcccagctacacgggaggctaaggtgggagaattgcttgaacccgggaggcggaggttgcagtgagctgagattgcaccattgcactccagcctgggcgacagagcaagactctctcaaaaaaaaaaaaaaaagaaagaaagaaatcagaaaatcgaccacagtggtagccacctggcctaatgctgtgtttttgtacctgacaggggtcactcattttaggcacaactccttcattctttgtgaaattagtgagtttccttctacccgtcaccagattcaatatgttctattaatacaccgataaccacaggggaagggcacttgtcgctctcccacctggttaccacagtctccatgggtcttttgccgtgaccacaaataaaggaaacactcatcactagtatctaagtcgggctttacagtaactatgcaccttctgtgtgcttcacctcactctctacttcaaacagcccatggagggaggtattattatactccttatgttgacagtgaagaatctgaggcccagagaggttggggacttgagtaaagtcacacagccctgagaggcaggaccagggttccattcctgctctatccagttccaagcccttgtgttttccattatgtttagtgcctctttgctaacagcaacatctgcaagatttgtgttggttttgatggagaactctagctcatccacatgctagtgcccaagtggtggaggggccacctcagcaggtgggttctgaatgcagccaaggctgtccccgcaatgggtgagactcgctccaactgcccgccctcagagcaggtgcctaagtcctccctggcactggcaggccttacctcacattgctaaattaaagcaatgcaattcctcttgggtaagaggaattcctccttctttactaactgatccccagcaaggaaataaaatgttaggctttaaaaatccctactttgtcatatcagactatattctaaaactatatttgagcgaaacctgtcattgcgtctaatttcaaatatacagaatctccttaagagctgttgccttatttttttgtaaagcctctctgacatcaaatggggagaaatggtggcacctccagacaccctgaaactacacaccatttcttccctgctcagcttctgctcaggagttctgtgagctatgggaaggccattggttgtatttgctacttttactttcatcttcctctgctgtagagccatttaatgttattgtcatatgctgctggtgaggtaaaggtgggtccgggtgccttcccaggggttagaggatgttcaaagggccgatttcagcaggagttcagagggcttatgatggatggtgagagatttgacaaccaccagagcacatgtgctctgaccctctcctgggcattggttcctgctggtaccgggcggttcagaccttcaaataggttgctttcaaaagagctttcaggcacttattgagaattaatgtttaaacagacataatagcctagatgaactcccaagagatctattaaatcttgtgggctgaataaatatctcgtgcaggactgtgcaacagtagcccagagcatcctgcctgtgggcatccacctcccaggtgagggcagtgggaagctggcccgacggcagccagaacttgtttctcacctcccaccagcaaccccccacccaactctgggccccaggcacacgaagcacaagtctcaggggaccattcccacattgggggatcctgagggagcccatcaccgcctcttgcatacaactgtccactaggaggcacgcccagtgtgggagagatgtatggtcttgccttccacctgtaaaaactgcacatatgcaagccatttgcactctggaactgcatgccgtgaaaactcctaatggtgtggaacttagtttgaatttgaaatcacgccgcatgcacaaagggacaggcccaggcccgacctcaggtcatccgcccgctggctgcagagcatccctgggagccaaggcgaggcccgtggagcctgagctttgtgtagctcgagctttgtgtagctcgtgcacttattatgcaccacctcccttcagtcaccactcctcttcctccgccatcctcatttatactgattgcacaccccccgctcaaacaacaatgtccttattatgatgaccatctcgtagtggtacattccattcctatttaaggtaagcccaaagcccacttttggattttctcgactgtccgagaaaagttgtgtaagcgcctgcgttcttctgggtttggctagatagggttgtgtccctctatggaatggagagtgatgtgggcaagggtgtcattttctcgcacaatacaactcactgaggatgcttctgtagaagtgagaaacacgatgagtacattcagaattacaataactcactctcactgggtaacttctcatgatagatttgtatgatcaatacgggtctatttttatgtcaactgaacactgtagggtaccttccagtctttttcaagattgttaaattgagacaagtaattgaataatttgtcctatttttattttaaaaaaagtgaatggactgaaatgttaaatgtgaatgtacatttcttaattgcaacttttctactgagtgtttgcactatactttctggaatcttatttaacaaaaataaagggaaaaaattgcttgactaaa

SEQ ID NO: 207608 - DNA, 3360 bp, Artificial Sequence
  derived and/or modified sequence
atggccggggccccccggggcggcggcggcggcggcggcggggccggggagcccggcggcgctgagagagctgctggcaccagcagaagaagaggcctgcgggcctgtgatgaggagtttgcctgcccagagctggaggccctcttccggggctacaccctgcggctggagcaggccgccaccctgaaggccctggccgtgctgagcctgctggccggggccctggccctggccgagctgctgggcgcccctggccctgcccctggcctggccaagggcagccaccctgtgcactgtgtgctcttcctggccctgctggtggtgaccaacgtgcgcagcctgcaggtgccccagctgcagcaggtgggccagctggccctgctcttcagcctgacctttgccctgctgtgctgcccctttgccctgggcggccctgcccggggcagcgctggagctgctgggggccctgccacagctgagcagggcgtgtggcagctgctgctggtgacctttgtgtcctatgccctgctgcctgtgcgcagcctgctggccatcggcttcggcctggtggtggccgccagccacctgctggtgacagccaccctggtgcctgccaagaggccccggctgtggaggaccctgggcgccaatgccctgctgtttgtgggcgtgaacatgtatggagtgtttgtgcgcatcctgacagagaggagccagaggaaggccttcctgcaggcccggagctgcattgaagatcggctgcggctggaggatgaaaatgagaagcaggagcggctgctgatgagcctgctgcccagaaatgtggccatggagatgaaggaggacttcctgaagcccccagagcgcatcttccacaagatctacatccagagacatgacaacgtgtccatcctgtttgctgacatcgtgggcttcaccggcctggccagccagtgcacagcccaggagctggtgaagctgctgaatgagctgtttgggaagtttgatgagctggccacagagaaccactgccgccgcatcaagatcctgggggactgctactactgtgtgtctggcctgacccagcccaagacagaccacgcccactgctgcgtggagatgggcctggacatgattgacaccatcacctctgtggccgaggccacagaggtggacctgaacatgagggtgggcctgcacacaggccgggtgctgtgtggggtgctgggcctgaggaagtggcagtatgatgtgtggagcaatgatgtgaccctggccaacgtgatggaggccgccggcctgcccgggaaggtgcacatcaccaagaccaccctggcctgcctgaatggagactatgaggtggagcccggctacggccacgagaggaacagcttcctgaagacccacaacatcgagaccttcttcatcgtgcccagccacaggaggaagatcttccctggcctcatcctgagtgacatcaagccagccaagaggatgaagttcaagacagtgtgctacctgctggtgcagctgatgcactgcaggaagatgttcaaggccgagatccccttcagcaatgtgatgacctgtgaagatgatgacaagaggcgggccctgaggacagccagcgagaagctgaggaacagaagcagcttcagcaccaacgtggtgtacaccaccccaggcaccagggtgaaccgctacatcagccggctgctggaggcccggcagacagagctggagatggctgacctgaacttcttcaccctgaagtacaagcacgtggagcgggagcagaagtaccaccagctgcaggatgagtacttcaccagcgctgtggtgctgaccctcatcctggccgccctgtttggcctggtgtacctgctgatcttcccccagagcgtggtggtgctgctgctgctggtgttctgcatctgcttcctggtggcctgtgtgctgtacctgcacatcaccagggtgcagtgcttccctggctgcctgaccatccagatcagaacagtgctgtgcatcttcatcgtggtgctgatctacagcgtggcccagggctgtgtggtgggctgcctgccctgggcctggagcagcaagcccaacagcagcctggtggtgctgagcagcggcggccagaggacagccctgcccaccctgccctgtgagagcacccaccacgccctgctgtgctgcctggtgggcaccctgcccctggccatcttcttccgggtgagcagcctgcccaagatgatcctgctgagcggcctgaccaccagctacatcctggtgctggagctgagcggctacaccaggactggaggcggcgctgtgtctggccgctcctatgagcccatcgtggccatcctgctcttcagctgtgccctggccctgcacgcccggcaggtggacatccggctgcggctggactacctgtgggccgcccaggccgaggaggagcgggaggacatggagaaggtgaagctggacaacagacgcatcctcttcaacctgctgcctgcccacgtggcccagcacttcctgatgagcaaccccaggaacatggacctgtactaccagagctacagccaggtgggcgtgatgtttgccagcatccccaacttcaatgacttctacatcgagctggatggcaacaacatgggcgtggagtgcctgcggctgctgaatgagatcatcgctgactttgatgagctgatggagaaggacttctacaaggacatcgagaagatcaagaccatcggcagcacctacatggctgctgtgggcctggcccccaccagcggcaccaaggccaagaagagcatcagcagccacctgagcaccctggccgactttgccatcgagatgtttgatgtgctggatgagatcaactaccagagctacaatgactttgtgctgcgggtgggcatcaacgtgggccctgtggtggccggcgtgattggagcccggcggccccagtatgacatctggggcaacacagtgaatgtggccagcaggatggacagcactggagtgcagggccgcatccaggtgacagaggaggtgcaccggctgctgcggcgctgcccctaccactttgtgtgccggggcaaggtgtctgtgaagggcaagggggagatgctgacctacttcctggagggccgcacagatggaaatggcagccagatccgcagcctgggcctggacaggaagatgtgccccttcggccgggccggcctgcagggcagaagacctcctgtgtgccccatgcctggggtgtctgtgcgggccggcctgcccccccacagccctggccagtacctgcccagcgctgctgctgggaaggaggcctag

SEQ ID NO: 207609 - DNA, 3174 bp, Artificial Sequence
  derived and/or modified sequence
atggccggggccccccggggcggcggcggcggcggcggcggggccggggagcccggcggcgctgagagagctgctggcaccagcagaagaagaggcctgcgggcctgtgatgaggagtttgcctgcccagagctggaggccctcttccggggctacaccctgcggctggagcaggccgccaccctgaaggccctggccgtgctgagcctgctggccggggccctggccctggccgagctgctgggcgcccctggccctgcccctggcctggccaagggcagccaccctgtgcactgtgtgctcttcctggccctgctggtggtgaccaacgtgcgcagcctgcaggtgccccagctgcagcaggtgggccagctggccctgctcttcagcctgacctttgccctgctgtgctgcccctttgccctgggcggccctgcccggggcagcgctggagctgctgggggccctgccacagctgagcagggcgtgtggcagctgctgctggtgacctttgtgtcctatgccctgctgcctgtgcgcagcctgctggccatcggcttcggcctggtggtggccgccagccacctgctggtgacagccaccctggtgcctgccaagaggccccggctgtggaggaccctgggcgccaatgccctgctgtttgtgggcgtgaacatgtatggagtgtttgtgcgcatcctgacagagaggagccagaggaaggccttcctgcaggcccggagctgcattgaagatcggctgcggctggaggatgaaaatgagaagcaggagcggctgctgatgagcctgctgcccagaaatgtggccatggagatgaaggaggacttcctgaagcccccagagcgcatcttccacaagatctacatccagagacatgacaacgtgtccatcctgtttgctgacatcgtgggcttcaccggcctggccagccagtgcacagcccaggagctggtgaagctgctgaatgagctgtttgggaagtttgatgagctggccacagagaaccactgccgccgcatcaagatcctgggggactgctactactgtgtgtctggcctgacccagcccaagacagaccacgcccactgctgcgtggagatgggcctggacatgattgacaccatcacctctgtggccgaggccacagaggtggacctgaacatgagggtgggcctgcacacaggccgggtgctgtgtggggtgctgggcctgaggaagtggcagtatgatgtgtggagcaatgatgtgaccctggccaacgtgatggaggccgccggcctgcccgggaaggtgcacatcaccaagaccaccctggcctgcctgaatggagactatgaggtggagcccggctacggccacgagaggaacagcttcctgaagacccacaacatcgagaccttcttcatcgtgcccagccacaggaggaagatcttccctggcctcatcctgagtgacatcaagccagccaagaggatgaagttcaagacagtgtgctacctgctggtgcagctgatgcactgcaggaagatgttcaaggccgagatccccttcagcaatgtgatgacctgtgaagatgatgacaagaggcgggccctgaggacagccagcgagaagctgaggaacagaagcagcttcagcaccaacgtggtgtacaccaccccaggcaccagggtgaaccgctacatcagccggctgctggaggcccggcagacagagctggagatggctgacctgaacttcttcaccctgaagtacaagcacgtggagcgggagcagaagtaccaccagctgcaggatgagtacttcaccagcgctgtggtgctgaccctcatcctggccgccctgtttggcctggtgtacctgctgatcttcccccagagcgtggtggtgctgctgctgctggtgttctgcatctgcttcctggtggcctgtgtgctgtacctgcacatcaccagggtgcagtgcttccctggctgcctgaccatccagatcagaacagtgctgtgcatcttcatcgtggtgctgatctacagcgtggcccagggctgtgtggtgggctgcctgccctgggcctggagcagcaagcccaacagcagcctggtggtgctgagcagcggcggccagaggacagccctgcccaccctgccctgtgagagcacccaccacgccctgctgtgctgcctggtgggcaccctgcccctggccatcttcttccgggtgagcagcctgcccaagatgatcctgctgagcggcctgaccaccagctacatcctggtgctggagctgagcggctacaccaggactggaggcggcgctgtgtctggccgctcctatgagcccatcgtggccatcctgctcttcagctgtgccctggccctgcacgcccggcaggtggacatccggctgcggctggactacctgtgggccgcccaggccgaggaggagcgggaggacatggagaaggtgaagctggacaacagacgcatcctcttcaacctgctgcctgcccacgtggcccagcacttcctgatgagcaaccccaggaacatggacctgtactaccagagctacagccaggtgggcgtgatgtttgccagcatccccaacttcaatgacttctacatcgagctggatggcaacaacatgggcgtggagtgcctgcggctgctgaatgagatcatcgctgactttgatgagctgatggagaaggacttctacaaggacatcgagaagatcaagaccatcggcagcacctacatggctgctgtgggcctggcccccaccagcggcaccaaggccaagaagagcatcagcagccacctgagcaccctggccgactttgccatcgagatgtttgatgtgctggatgagatcaactaccagagctacaatgactttgtgctgcgggtgggcatcaacgtgggccctgtggtggccggcgtgattggagcccggcggccccagtatgacatctggggcaacacagtgaatgtggccagcaggatggacagcactggagtgcagggccgcatccaggtgacagaggaggtgcaccggctgctgcggcgctgcccccccctgtgtgtgccccggcagagccagtgccagggccagaggagagatgtggacatcctgagccggcggcaggactag

SEQ ID NO: 207610 - DNA, 3360 bp, Artificial Sequence
  derived and/or modified sequence
atggccggcgccccccggggcggcggcggcggcggcggcggcgccggggagcctggcggtgctgaacgagctgcgggtacgtcacgccggaggggcctaagagcgtgtgacgaagaattcgcctgcccggagttggaggccttattccggggctatacactcagactggaacaggctgccacactgaaggcactggccgtgctcagtctgttggcgggggctctggcactggccgaactcctgggtgcacctgggcccgccccaggcctcgctaaaggttcacaccccgtccactgcgtactctttcttgctctgcttgtggtgaccaatgtgcgctcgttacaagtcccgcagctgcaacaggtgggccaacttgccttgttattctccctcacattcgccttgctgtgttgtccctttgcactaggcggacccgcccgtggcagcgccggcgccgctggcggtcccgccacagctgaacaaggagtatggcaattactactggtcaccttcgtctcgtatgccctactgcccgtccgctctcttctggcaatcggcttcgggctggtagtcgccgctagccatttgctggtcacagccacgctggtgccagccaagaggccgaggttgtggcgtaccttaggcgccaatgcattgctgtttgtgggggtcaacatgtacggtgtgttcgtcaggatactgaccgagcggagtcaacgcaaggccttccttcaggcgcgtagttgtatcgaggatagactgaggctggaggatgaaaacgagaaacaggaacggctgctcatgagtctcctgccgagaaatgtggcgatggagatgaaggaagattttctcaaaccccccgagcggattttccacaagatctacatccagcgacacgacaatgtgagcattctgttcgctgacattgtggggttcaccggcctggccagccagtgcactgcccaggagttggtgaagctgctcaatgagttatttggtaagtttgatgagctggcaaccgaaaaccactgccggcgcattaaaatactcggcgactgctactattgcgtgagtggtctcacccaaccgaagacggaccatgcacactgctgcgtcgagatgggactggacatgattgacaccataacgagcgtcgccgaggcaaccgaggtggacttgaatatgagggtaggactccacaccggccgcgtcctttgtggcgttctcggtctgagaaagtggcagtacgatgtgtggtccaacgatgtaacattagcaaacgtaatggaagccgcaggacttcccggcaaagtgcatattaccaaaactaccctggcttgtttgaatggggattatgaagtcgagccggggtatgggcacgagcggaatagctttctgaaaacacataatatcgagaccttttttatagtgccatcacatcgcagaaagattttccctggcttaatcttgtctgatattaagcctgccaagaggatgaaattcaaaacggtgtgctatcttctggtacagcttatgcactgccggaaaatgttcaaggccgaaatccccttctcaaacgtaatgacatgcgaggatgacgataagcggagagcgctgcggacggcaagcgaaaagctgcggaacagaagttcgttctctaccaacgtggtgtacacaacccctgggacacgagtgaacaggtatatctctcgcctacttgaggccagacagacagagcttgaaatggctgatttgaacttcttcactctcaaatataaacatgtcgaacgagagcagaagtatcaccaacttcaggacgagtactttacttccgcggtggtactgaccctgatcctcgccgctttgttcggcctggtttatctgctcatcttccctcagagtgttgtggtcttactgcttttggtgttttgtatctgttttctagttgcttgcgtgctctacttgcatataacccgagtccagtgcttccccggttgcctgacaatacaaattaggaccgtgctttgtattttcattgtcgtactcatctacagtgtcgcgcagggatgcgtcgtgggctgtctgccctgggcgtggtcctctaagccaaatagtagtctggtggttctttcgtccggcggtcaacgcacggccctccctacactcccatgtgaatcgacgcaccacgccctactgtgttgcctcgttggaacacttcctctggctatattctttcgggtctcctcgctgccgaaaatgattctgctgtctgggcttactacttcctacatcctggttcttgaattaagtggatacactcgaaccggcggcggcgccgtgtctggacgctcctacgagcctattgtggccattcttctgttctcctgtgccttagctcttcacgctcgtcaggtcgacatccgattgaggcttgactacctgtgggcagcgcaggcagaagaggagagggaggatatggaaaaggtgaagcttgacaaccggaggatcctcttcaatcttctgcctgcacacgtggcacagcacttcctgatgtcgaaccctcgaaatatggacctctactatcaatcctactcacaggtgggggtgatgttcgcgtcgatcccaaatttcaatgatttctatatcgaacttgacggcaacaatatgggcgtggagtgtcttaggttgctcaatgaaatcatagcagatttcgacgaactgatggaaaaggatttttacaaagacattgaaaaaattaagactattggttctacctacatggccgccgtgggcctcgctccgacctccggcacgaaggctaagaagagcatttcgtcccacctctcaactctcgccgattttgctattgaaatgttcgatgttcttgatgaaatcaactaccaatcctataacgacttcgtgctcagagtggggattaacgtcggcccagtagtcgccggcgtgatcggggcccggagaccgcagtacgacatatggggaaacaccgtgaatgtggcttcccggatggactccacaggcgtgcaggggcgcattcaggttaccgaggaggtgcacagattgctgagacgatgcccttaccacttcgtgtgtcgggggaaggttagcgtgaaggggaagggtgagatgttgacctattttctggaggggcgcacggatggaaatggctcccagattcggagcctgggtctagatcgaaagatgtgccctttcggccgcgctgggctgcagggcagaagaccaccggtgtgccccatgccaggcgtgtctgtcagggccggactgcccccgcactctcccgggcagtatctgccaagcgccgccgcaggcaaggaagcctag

SEQ ID NO: 207611 - DNA, 3174 bp, Artificial Sequence
  derived and/or modified sequence
atggccggcgccccccggggcggcggcggcggcggcggcggcgccggggaacccggtggtgccgagcgcgccgccggcaccagtcgacggcgcggcctaagggcctgcgatgaggagttcgcctgtccagagttagaggcacttttccgaggctacactttaagactggagcaggctgctactctgaaagctctcgcagtgctcagccttcttgcaggggccctcgccctggcggagctcttaggcgctcccggaccggccccaggtctcgccaagggtagccatccagtacattgcgtgttgttccttgctctgctggttgtcacgaatgtgcgatctttacaagtcccccagcttcagcaagtgggccagctcgcgcttctgtttagcctcacttttgcgctgctctgctgccccttcgccctgggcggccctgcccgggggagcgccggtgcagcaggcgggcccgcgaccgccgagcagggggtgtggcagcttctgctggtaacatttgtcagctatgcgcttcttccagtgcgaagcctcttggcaataggtttcggtctcgtcgtggcagctagtcacctcctagttacagctactctcgtccctgcaaagcgaccacgcctctggcgtaccctgggcgcaaacgctttactgtttgtgggagtcaacatgtacggagtctttgtgcgaatactcaccgagaggtcccagcgaaaagcattcctacaagcaaggtcctgtatcgaggatcgactgcgactggaggatgaaaatgagaagcaggaaaggctcctcatgagcctgctgccccgcaatgtcgccatggaaatgaaagaagattttttgaaaccccctgagcgcatctttcataagatctacatacaaagacatgacaatgtatccatcctgtttgccgacatcgtgggtttcacgggtttggcctctcaatgcacggcccaggaactggttaaactgttgaacgaactttttggtaaattcgatgagctcgcaaccgaaaatcattgtaggcgcataaaaatccttggcgattgttattactgtgtgagcgggcttactcagccgaagactgatcatgcccactgttgcgttgaaatgggcctggacatgattgataccatcacctcagtagctgaggccacagaggtggatctgaacatgcgggtgggcctccatacaggaagagtgctctgtggagtactcggcttgcgtaaatggcagtacgacgtgtggtctaatgatgtgaccctggcgaacgttatggaagcagctggtttgcccggcaaagtacacatcaccaaaaccaccctggcttgcttgaatggggattatgaagtggaaccaggatatgggcacgagcggaactcattcttaaagacacataatattgagactttctttattgtcccttcccatcggaggaaaatcttcccaggcctgattctgtcagacataaaacccgccaagcgcatgaaattcaagacagtatgctacctgcttgtgcagttgatgcattgtaggaagatgttcaaagccgagattcccttctccaatgtgatgacctgtgaggacgacgacaaacgccgcgcacttaggacagctagtgaaaagctaagaaatagaagctccttctccaccaacgtggtctatacaactccaggaacaagggtgaaccgatatatctcccggcttctagaggcccgccaaacagagctcgaaatggctgacctgaatttcttcaccctcaaatacaaacatgttgagagagaacagaagtatcatcagctccaggacgagtatttcacttccgccgttgtcctaaccctcattctagccgcattgtttgggctggtctacttactcatatttccccaatctgttgtggttctcttactgcttgtgttttgcatctgctttttggttgcatgcgttctgtacctacatataactagagtgcagtgttttcctggatgtctgactatccagatccgaaccgtcctgtgtatattcatcgtcgtgctgatatactcagtcgcccagggctgtgtcgtgggctgtctgccttgggcctggtcttcaaagcctaactcctccctggtggtgctttcttctggaggccagaggaccgccctgcccactctgccttgcgaatcaacacaccatgccttgctatgttgtctggtgggaaccctgccattggccatttttttccgggtcagcagcctccctaagatgatcctcctgtccggccttaccacctcgtatattctggtcttggagctgagcgggtacaccaggacagggggtggcgctgtcagcggccggtcttatgaacctattgtggccatcctcctcttcagttgcgcgctggcgttacacgctagacaggtagacataaggttgcggttagattacctttgggctgcccaagcagaagaggagagagaggacatggagaaggtcaagcttgataacagacggatattattcaacttgcttcctgctcatgtagctcagcactttctcatgtctaatcctagaaatatggacttatactaccaatcttactctcaggtcggcgtgatgtttgcatctatccccaactttaatgatttctacatcgaactggatggaaataacatgggagtggagtgtcttcggctcctgaacgagatcatcgccgatttcgacgagttgatggaaaaggacttttataaagatattgagaaaatcaaaaccatcggttccacctacatggccgcggtcggcctcgctccgacatctgggacaaaggcaaaaaagtccattagtagtcatctgtccaccctggctgatttcgcgatcgagatgttcgacgtgctggatgaaatcaactaccaaagctataatgacttcgtactgagagtgggcatcaacgtcggtccggtggtcgccggcgttatcggggcacgcagaccgcagtatgatatttgggggaatacggtaaacgtcgctagtcggatggatagtacgggagttcagggccggattcaggtgacggaggaagtacaccgtcttctgagaaggtgtcccccactgtgcgttcccaggcagtcgcagtgtcaggggcaaaggagggatgttgacatcctgtccaggagacaggactag

SEQ ID NO: 207612 - DNA, 3360 bp, Artificial Sequence
  derived and/or modified sequence
atggccggagccccacggggaggcggtggtgggggaggtggagcaggagagcctgggggagctgagcgcgcagctggtacgagtcgccgacgcggactccgcgcttgcgacgaggaattcgcctgccccgaactagaggccctgtttagagggtacactttgcgcttagagcaggctgctacactgaaagccttggcagtgcttagtttgctggctggcgcactggcactggcagaattgctgggggctcccggtcctgcgcctggactcgccaagggaagccatccagtccattgcgtgttgttcttggccctattggtggtgacaaatgtgaggtctctgcaagtgccccaactgcagcaagtgggtcagctcgctctcctattctcactcacttttgctctgttgtgctgcccatttgcgcttggtggaccagctcgtggctccgctggggcagccggtggaccagctacggccgagcagggggtgtggcaactcctgcttgtcacgttcgtctcctatgctcttctccccgtgcggtccctactggcgatcggattcggccttgttgtggccgcatcacacctcttggtgaccgccacattggtgcccgcaaagagacccagactgtggagaacactgggagcgaacgcgctcttgttcgttggcgtcaatatgtatggcgtattcgtcagaattttgacggagcgttctcagcggaaggccttcttgcaagcgagatcatgcattgaggaccgactgaggctcgaggatgaaaacgaaaagcaggagaggttgctgatgtcgctgttaccgagaaacgtcgcgatggaaatgaaggaagattttctcaaaccgcctgaaagaatcttccataagatttatatacagaggcacgacaatgtcagtattctgttcgcagatatagtcggtttcactggacttgcgagtcagtgcactgcacaggagctcgtgaaacttctgaatgaactgtttggcaaatttgacgagcttgccaccgagaaccattgccgaaggatcaaaatcctgggcgactgttactactgcgtctctggactgacacagcccaagaccgaccacgcccactgttgcgtggagatgggacttgatatgatcgatacaattacctcagtcgctgaagctaccgaggtggatctaaatatgcgggttggcctgcatacgggacgcgtgctctgtggagtgctcggactccgtaagtggcagtatgacgtgtggtctaacgacgtcaccctggccaacgtcatggaagctgccggattgcccggaaaagtgcatataacaaagactacattagcctgcctgaacggcgactatgaagtcgaaccgggatacggccacgagcggaattcttttctcaagacacataatattgagacttttttcatagtgccctctcaccggaggaaaatcttcccgggacttattctttctgatataaaaccagctaagagaatgaagttcaagactgtttgttacctgctggttcagctgatgcattgtcgcaaaatgtttaaggctgagataccctttagcaatgttatgacctgtgaagacgatgataaacggagagcgctacgcacagcctctgagaaactacgcaataggagttcatttagcactaacgttgtatacactacacctggaacacgcgtgaatcgctacatctctaggctgctggaggctaggcaaacagagctggaaatggccgaccttaacttttttaccctgaagtataagcatgtcgaacgagagcaaaaataccaccagctgcaggatgaatacttcaccagcgcggtagtgttgactctcattttagctgcccttttcggcctagtgtatcttctgattttcccccaatctgtggtggtgctactgttacttgtgttttgcatttgcttcctggttgcttgtgtgctttacttacacataactcgggtacaatgtttccccggatgtcttacaatccagattagaactgtcttgtgcattttcatcgtggtgctgatctattcagttgcccagggttgcgtggtgggctgcctgccttgggcctggtcatcaaaacccaatagtagcttggttgtgctaagcagtgggggacagcggaccgcgttacccactctcccttgtgagtcaacccaccacgcactcctgtgctgcctggtgggaactcttcctctcgccatattcttcagggtctccagcctgcccaaaatgatcctcctgagtgggctgacaacgagctacattctcgttttagagctgtctgggtacacgcgaaccggcggtggagctgtgagcggccgaagttatgagcccattgtagccattttgttattttcctgcgcactcgccctccatgcacgtcaggtcgacatccgactcaggctggattacctgtgggccgcacaggctgaggaggagcgggaagatatggagaaggtaaagctggataaccgtcgcatcttgttcaacctcctccctgctcatgtggcgcagcactttttgatgtcaaatccacgaaacatggatctgtattatcagagctactcccaagtcggtgttatgtttgcatctattccaaactttaacgacttctacattgaactggatggcaataatatgggcgtcgaatgtctgagattactgaatgagatcattgcagattttgatgagctgatggagaaagacttttacaaggacatcgagaagatcaaaacgatcggctccacctacatggctgctgtggggctcgctcccaccagcgggactaaggcaaaaaaaagtatctcctctcacttgtccacattggccgattttgcaatcgagatgtttgacgtcttagatgagattaactaccagagttataacgactttgtgttgcgggtcggtataaatgtgggcccagttgtcgcaggcgtcataggagctaggagaccccagtatgatatctggggaaacaccgtcaatgtggcctcaagaatggactcaactggcgtccaggggagaatccaggttacggaggaagtccatcgcctcctccgccgatgtccataccacttcgtctgtagaggaaaagtctcggtcaagggaaaaggcgagatgttaacgtatttcctggagggcaggaccgacgggaacggttcccaaattaggtcgttgggccttgatcggaaaatgtgtccatttggcagggctggcctccaaggacggcgtccacccgtttgccctatgccaggcgtgagcgtgagggccggtctgccccctcactctcccggacagtacctcccttccgcagccgctggaaaagaagcatag

SEQ ID NO: 207613 - DNA, 3174 bp, Artificial Sequence
  derived and/or modified sequence
atggcaggagcccctcggggagggggaggcggtgggggaggcgcaggagagccgggaggtgccgaacgcgcagcaggaaccagccgacgcagaggattgcgagcctgtgacgaagaatttgcctgcccagagctcgaggctctatttcggggatatactctgcgcctggagcaggcagctacgctgaaggcgctcgccgtccttagtctgctcgcaggcgcactagcccttgcagagctgttgggcgctcctgggccagcaccgggtctggcaaagggatcccaccccgtgcactgtgtattgttccttgctctgctagttgtgactaacgttaggtccctgcaggttcctcaactgcagcaagtggggcaattagccctgctttttagcctgactttcgccctgttatgctgtcccttcgccctgggaggcccagcgaggggctctgctggcgctgctgggggacccgctaccgcggagcaaggcgtgtggcaactgctgcttgttaccttcgtcagctacgcactgctaccagttcggtctctattggcgattgggttcggactagtagttgccgctagccatctgctggtgaccgcgaccctcgtgccggctaagaggccccgtctctggcgtaccctgggagctaatgccctcctcttcgtgggagtgaatatgtatggtgtgttcgttcgaatcttaacagagaggagccagcgaaaggcatttcttcaggcacgctcgtgtatcgaggatagactgagattagaagatgagaacgagaagcaggaaaggcttctcatgtctctgctcccgagaaatgtcgccatggagatgaaggaagacttcctgaaaccacccgagaggattttccataaaatatatatccagagacacgataatgtttcaattttgtttgctgatattgtgggcttcacaggcctagccagccagtgtacggcccaggaattggtgaaactgcttaatgaattgtttggtaagttcgacgaactcgccactgagaatcactgcagaaggattaaaattcttggggactgctactattgtgtgtccggtctaacacagccaaagacagaccatgcccactgttgtgtggaaatggggctggatatgatcgacaccattacttccgtggccgaagctacagaggtggacctcaatatgagggtgggactccacacaggcagggtgctgtgcggggtgctgggtctgagaaaatggcagtacgatgtgtggagtaacgatgtgacattggccaatgtgatggaggcggctggactcccgggtaaggtccacattacgaagactaccttagcctgcctaaatggggattacgaggtcgaaccgggttatgggcacgagaggaacagctttttaaagacacacaatattgagaccttcttcattgtgccttcgcataggcgcaaaatcttcccaggactgatcctgagcgacattaagcccgctaaacgcatgaaatttaagactgtatgttacttgctggtgcagttgatgcattgtagaaagatgtttaaggccgagataccattcagtaatgttatgacctgcgaagacgacgacaagcgcagagccctcagaaccgcttccgaaaaattgaggaaccggagctcttttagcaccaacgtggtgtataccacccctggtacccgtgtaaacagatacatctccagactcctggaggccaggcagacggagttggaaatggccgaccttaacttctttactcttaaatataagcatgttgaaagggaacaaaaatatcatcagttacaggacgagtactttacgtccgcagttgttctgaccctcatccttgccgcactcttcggacttgtgtatctccttattttcccgcagagcgtggtcgtcctactgttgctggttttttgcatttgttttctcgtcgcatgcgtgctctacctgcacatcacgagagtccagtgctttcctggttgtctgaccatccagattagaaccgtactttgcatcttcatcgttgttttgatttactctgtcgcccagggctgcgtagtggggtgtctgccatgggcatggagcagtaagccgaattctagtctcgtcgtcctttcctcagggggacagcgtacagccttaccgaccctgccgtgcgagtcaactcaccatgccctgctgtgctgcctcgtgggaacgctgccactcgctatattttttagagtaagtagcttgccgaagatgatcctcctttctggcctgaccacaagctatattctcgtcctggagctatccggatacacccgaaccggcggtggagccgtgagcggccgatcttacgagccaattgttgcaattctgctgttctcctgcgccctcgccttacacgctagacaggtggacattcgtctgagattggactatctatgggcggcacaggcagaggaggaacgagaggacatggagaaggtcaagctggataatcgacgcatactgttcaacttgctgcctgcacatgtggcacagcactttctgatgagtaaccccagaaatatggatttgtactaccaaagttattcgcaagtgggggtcatgttcgcctccatcccaaatttcaacgacttctatattgaactggacggcaacaacatgggagtagagtgtctgcgcctgcttaacgagattattgccgatttcgatgagctcatggaaaaagatttttacaaagatatcgaaaaaatcaagacaatcgggtccacctacatggcggcagtggggctggcccctacatcaggcaccaaggccaaaaaatccatatcatcacacctgagtacacttgccgactttgctattgaaatgttcgatgtcttggacgaaatcaattaccaatcatataatgacttcgtcctccgcgtgggcatcaacgtagggccagtggtggcaggagtaatcggggctaggaggcctcaatatgacatctgggggaataccgtgaacgtcgcatcacggatggattctactggcgtccagggcagaatccaagtgaccgaagaggtccatcgcctgctgaggaggtgccccccactgtgtgtgcctcgccaatcccagtgtcagggtcagaggcgagacgttgatatcctgagtcgtaggcaggactag

SEQ ID NO: 207614 - DNA, 3360 bp, Artificial Sequence
  derived and/or modified sequence
atggccggcgcccccagaggcggcggcggcggcggcggcggcgccggcgagcccggcggcgccgagagagccgccggcaccagcagaagaagaggcctgagagcctgcgacgaggagttcgcctgccccgagctggaggccctgttcagaggctacaccctgagactggagcaggccgccaccctgaaggccctggccgtgctgagcctgctggccggcgccctggccctggccgagctgctgggcgcccccggccccgcccccggcctggccaagggcagccaccccgtgcactgcgtgctgttcctggccctgctggtggtgaccaacgtgagaagcctgcaggtgccccagctgcagcaggtgggccagctggccctgctgttcagcctgaccttcgccctgctgtgctgccccttcgccctgggcggccccgccagaggcagcgccggcgccgccggcggccccgccaccgccgagcagggcgtgtggcagctgctgctggtgaccttcgtgagctacgccctgctgcccgtgagaagcctgctggccatcggcttcggcctggtggtggccgccagccacctgctggtgaccgccaccctggtgcccgccaagagacccagactgtggagaaccctgggcgccaacgccctgctgttcgtgggcgtgaacatgtacggcgtgttcgtgagaatcctgaccgagagaagccagagaaaggccttcctgcaggccagaagctgcatcgaggacagactgagactggaggacgagaacgagaagcaggagagactgctgatgagcctgctgcccagaaacgtggccatggagatgaaggaggacttcctgaagccccccgagagaatcttccacaagatctacatccagagacacgacaacgtgagcatcctgttcgccgacatcgtgggcttcaccggcctggccagccagtgcaccgcccaggagctggtgaagctgctgaacgagctgttcggcaagttcgacgagctggccaccgagaaccactgcagaagaatcaagatcctgggcgactgctactactgcgtgagcggcctgacccagcccaagaccgaccacgcccactgctgcgtggagatgggcctggacatgatcgacaccatcaccagcgtggccgaggccaccgaggtggacctgaacatgagagtgggcctgcacaccggcagagtgctgtgcggcgtgctgggcctgagaaagtggcagtacgacgtgtggagcaacgacgtgaccctggccaacgtgatggaggccgccggcctgcccggcaaggtgcacatcaccaagaccaccctggcctgcctgaacggcgactacgaggtggagcccggctacggccacgagagaaacagcttcctgaagacccacaacatcgagaccttcttcatcgtgcccagccacagaagaaagatcttccccggcctgatcctgagcgacatcaagcccgccaagagaatgaagttcaagaccgtgtgctacctgctggtgcagctgatgcactgcagaaagatgttcaaggccgagatccccttcagcaacgtgatgacctgcgaggacgacgacaagagaagagccctgagaaccgccagcgagaagctgagaaacagaagcagcttcagcaccaacgtggtgtacaccacccccggcaccagagtgaacagatacatcagcagactgctggaggccagacagaccgagctggagatggccgacctgaacttcttcaccctgaagtacaagcacgtggagagagagcagaagtaccaccagctgcaggacgagtacttcaccagcgccgtggtgctgaccctgatcctggccgccctgttcggcctggtgtacctgctgatcttcccccagagcgtggtggtgctgctgctgctggtgttctgcatctgcttcctggtggcctgcgtgctgtacctgcacatcaccagagtgcagtgcttccccggctgcctgaccatccagatcagaaccgtgctgtgcatcttcatcgtggtgctgatctacagcgtggcccagggctgcgtggtgggctgcctgccctgggcctggagcagcaagcccaacagcagcctggtggtgctgagcagcggcggccagagaaccgccctgcccaccctgccctgcgagagcacccaccacgccctgctgtgctgcctggtgggcaccctgcccctggccatcttcttcagagtgagcagcctgcccaagatgatcctgctgagcggcctgaccaccagctacatcctggtgctggagctgagcggctacaccagaaccggcggcggcgccgtgagcggcagaagctacgagcccatcgtggccatcctgctgttcagctgcgccctggccctgcacgccagacaggtggacatcagactgagactggactacctgtgggccgcccaggccgaggaggagagagaggacatggagaaggtgaagctggacaacagaagaatcctgttcaacctgctgcccgcccacgtggcccagcacttcctgatgagcaaccccagaaacatggacctgtactaccagagctacagccaggtgggcgtgatgttcgccagcatccccaacttcaacgacttctacatcgagctggacggcaacaacatgggcgtggagtgcctgagactgctgaacgagatcatcgccgacttcgacgagctgatggagaaggacttctacaaggacatcgagaagatcaagaccatcggcagcacctacatggccgccgtgggcctggcccccaccagcggcaccaaggccaagaagagcatcagcagccacctgagcaccctggccgacttcgccatcgagatgttcgacgtgctggacgagatcaactaccagagctacaacgacttcgtgctgagagtgggcatcaacgtgggccccgtggtggccggcgtgatcggcgccagaagaccccagtacgacatctggggcaacaccgtgaacgtggccagcagaatggacagcaccggcgtgcagggcagaatccaggtgaccgaggaggtgcacagactgctgagaagatgcccctaccacttcgtgtgcagaggcaaggtgagcgtgaagggcaagggcgagatgctgacctacttcctggagggcagaaccgacggcaacggcagccagatcagaagcctgggcctggacagaaagatgtgccccttcggcagagccggcctgcagggcagaagaccccccgtgtgccccatgcccggcgtgagcgtgagagccggcctgcccccccacagccccggccagtacctgcccagcgccgccgccggcaaggaggcctag

SEQ ID NO: 207615 - DNA, 3174 bp, Artificial Sequence
  derived and/or modified sequence
atggccggcgcccccagaggcggcggcggcggcggcggcggcgccggcgagcccggcggcgccgagagagccgccggcaccagcagaagaagaggcctgagagcctgcgacgaggagttcgcctgccccgagctggaggccctgttcagaggctacaccctgagactggagcaggccgccaccctgaaggccctggccgtgctgagcctgctggccggcgccctggccctggccgagctgctgggcgcccccggccccgcccccggcctggccaagggcagccaccccgtgcactgcgtgctgttcctggccctgctggtggtgaccaacgtgagaagcctgcaggtgccccagctgcagcaggtgggccagctggccctgctgttcagcctgaccttcgccctgctgtgctgccccttcgccctgggcggccccgccagaggcagcgccggcgccgccggcggccccgccaccgccgagcagggcgtgtggcagctgctgctggtgaccttcgtgagctacgccctgctgcccgtgagaagcctgctggccatcggcttcggcctggtggtggccgccagccacctgctggtgaccgccaccctggtgcccgccaagagacccagactgtggagaaccctgggcgccaacgccctgctgttcgtgggcgtgaacatgtacggcgtgttcgtgagaatcctgaccgagagaagccagagaaaggccttcctgcaggccagaagctgcatcgaggacagactgagactggaggacgagaacgagaagcaggagagactgctgatgagcctgctgcccagaaacgtggccatggagatgaaggaggacttcctgaagccccccgagagaatcttccacaagatctacatccagagacacgacaacgtgagcatcctgttcgccgacatcgtgggcttcaccggcctggccagccagtgcaccgcccaggagctggtgaagctgctgaacgagctgttcggcaagttcgacgagctggccaccgagaaccactgcagaagaatcaagatcctgggcgactgctactactgcgtgagcggcctgacccagcccaagaccgaccacgcccactgctgcgtggagatgggcctggacatgatcgacaccatcaccagcgtggccgaggccaccgaggtggacctgaacatgagagtgggcctgcacaccggcagagtgctgtgcggcgtgctgggcctgagaaagtggcagtacgacgtgtggagcaacgacgtgaccctggccaacgtgatggaggccgccggcctgcccggcaaggtgcacatcaccaagaccaccctggcctgcctgaacggcgactacgaggtggagcccggctacggccacgagagaaacagcttcctgaagacccacaacatcgagaccttcttcatcgtgcccagccacagaagaaagatcttccccggcctgatcctgagcgacatcaagcccgccaagagaatgaagttcaagaccgtgtgctacctgctggtgcagctgatgcactgcagaaagatgttcaaggccgagatccccttcagcaacgtgatgacctgcgaggacgacgacaagagaagagccctgagaaccgccagcgagaagctgagaaacagaagcagcttcagcaccaacgtggtgtacaccacccccggcaccagagtgaacagatacatcagcagactgctggaggccagacagaccgagctggagatggccgacctgaacttcttcaccctgaagtacaagcacgtggagagagagcagaagtaccaccagctgcaggacgagtacttcaccagcgccgtggtgctgaccctgatcctggccgccctgttcggcctggtgtacctgctgatcttcccccagagcgtggtggtgctgctgctgctggtgttctgcatctgcttcctggtggcctgcgtgctgtacctgcacatcaccagagtgcagtgcttccccggctgcctgaccatccagatcagaaccgtgctgtgcatcttcatcgtggtgctgatctacagcgtggcccagggctgcgtggtgggctgcctgccctgggcctggagcagcaagcccaacagcagcctggtggtgctgagcagcggcggccagagaaccgccctgcccaccctgccctgcgagagcacccaccacgccctgctgtgctgcctggtgggcaccctgcccctggccatcttcttcagagtgagcagcctgcccaagatgatcctgctgagcggcctgaccaccagctacatcctggtgctggagctgagcggctacaccagaaccggcggcggcgccgtgagcggcagaagctacgagcccatcgtggccatcctgctgttcagctgcgccctggccctgcacgccagacaggtggacatcagactgagactggactacctgtgggccgcccaggccgaggaggagagagaggacatggagaaggtgaagctggacaacagaagaatcctgttcaacctgctgcccgcccacgtggcccagcacttcctgatgagcaaccccagaaacatggacctgtactaccagagctacagccaggtgggcgtgatgttcgccagcatccccaacttcaacgacttctacatcgagctggacggcaacaacatgggcgtggagtgcctgagactgctgaacgagatcatcgccgacttcgacgagctgatggagaaggacttctacaaggacatcgagaagatcaagaccatcggcagcacctacatggccgccgtgggcctggcccccaccagcggcaccaaggccaagaagagcatcagcagccacctgagcaccctggccgacttcgccatcgagatgttcgacgtgctggacgagatcaactaccagagctacaacgacttcgtgctgagagtgggcatcaacgtgggccccgtggtggccggcgtgatcggcgccagaagaccccagtacgacatctggggcaacaccgtgaacgtggccagcagaatggacagcaccggcgtgcagggcagaatccaggtgaccgaggaggtgcacagactgctgagaagatgcccccccctgtgcgtgcccagacagagccagtgccagggccagagaagagacgtggacatcctgagcagaagacaggactag

SEQ ID NO: 207616 - protein, 614 aa, Artificial Sequence
  derived and/or modified sequence
MGGVHVAYRGGAGVAGAVWTVMAATVATAAAVAPAPAPGTDSASSVHWFRKGLRLHDNPALLAAVRGARCVRCVYILDPWFAASSSVGINRWRFLLQSLEDLDTSLRKLNSRLFVVRGQPADVFPRLFKEWGVTRLTFEYDSEPFGKERDAAIMKMAKEAGVEVVTENSHTLYDLDRIIELNGQKPPLTYKRFQAIISRMELPKKPVGLVTSQQMESCRAEIQENHDETYGVPSLEELGFPTEGLGPAVWQGGETEALARLDKHLERKAWVANYERPRMNANSLLASPTGLSPYLRFGCLSCRLFYYRLWDLYKKVKRNSTPPLSLFGQLLWREFFYTAATNNPRFDRMEGNPICIQIPWDRNPEALAKWAEGKTGFPWIDAIMTQLRQEGWIHHLARHAVACFLTRGDLWVSWESGVRVFDELLLDADFSVNAGSWMWLSCSAFFQQFFHCYCPVGFGRRTDPSGDYIRRYLPKLKAFPSRYIYEPWNAPESIQKAAKCIIGVDYPRPIVNHAETSRLNIERMKQIYQQLSRYRGLCLLASVPSCVEDLSHPVAEPSSSQAGSMSSAGPRPLPSGPASPKRKLEAAEEPPGEELSKRARVAELPTPELPSKDA

SEQ ID NO: 207617 - DNA, 1845 bp, Artificial Sequence
  derived and/or modified sequence
atgggcggagtacatgtggcctacagaggcggcgcaggcgttgccggtgcagtgtggaccgtgatggcggctaccgtggctacagccgccgctgttgccccggcccctgctcccgggaccgactccgcctcctcagttcattggttccgcaaaggcctccgactgcatgacaatcctgccctgctggccgccgttaggggcgccaggtgtgtcagatgtgtctatattctggacccgtggttcgccgcctcttcgtccgtgggaataaatcgttggcggtttctcctacagtctctggaagacctcgataccagtcttagaaagctaaacagccgactcttcgtcgtgagagggcagccagccgatgtctttccaagacttttcaaggagtggggggttacccggcttacttttgagtacgactctgagccattcggcaaggaaagggacgccgccataatgaagatggcaaaagaagccggagtagaagtggtcaccgaaaacagtcacaccctgtacgatctggacaggatcatcgagctcaacggacagaagccgccacttacctataaaagattccaggccataattagcagaatggaactcccaaagaagcctgttggcctggtcacctcccagcagatggagtcctgtagagcagagatccaggaaaaccacgatgaaacttacggagtccccagtctggaagaactgggcttcccgaccgaaggtctgggcccggctgtttggcagggaggcgagactgaggcgttagcccgcctcgataagcacctcgaacgcaaagcatgggtggcgaactacgaacgaccccggatgaacgcaaatagccttctggcaagtccaaccgggctgtctccttatctgagatttggctgcttaagttgccgtctcttctactacaggttgtgggatctttataagaaagtgaaacgtaacagcaccccgccattaagtctttttggccagctgttatggagagagtttttctacaccgcggccaccaacaacccccgctttgatcgaatggaaggcaaccctatttgtatccagatcccttgggacagaaatcctgaagctctagccaagtgggctgaagggaagacgggatttccatggatcgatgctatcatgactcagctgaggcaggaaggatggattcatcatctcgcccgccatgctgtggcctgttttctcacccgtggagatctttgggtctcgtgggagtcaggcgttagagtgtttgatgaactgcttctcgatgcagacttcagtgttaatgccggttcgtggatgtggttgagctgtagcgcattctttcagcaatttttccactgctactgccccgtcggctttgggcgacgcacagacccctccggagactatatcaggcgctacctcccaaaactgaaggcttttccatcacgctacatctatgagccatggaacgcccccgagtccatccagaaagccgctaagtgtatcattggcgtggactatccaaggcccatcgttaaccacgccgagacctccagactgaatattgagagaatgaagcagatctatcaacagcttagccggtatagaggtctgtgcctgctggcatcggtgccctcctgcgtcgaagacctgtcacaccctgtagcggagcccagcagtagccaggcggggtcaatgagctcggccggccccagacctctgcccagcggacctgccagcccgaaaagaaagctggaggcagcagaggagccccctggtgaggagttgagcaagagagcacgcgtcgcagaattgcccacccctgaactacccagcaaagatgcctag

SEQ ID NO: 207618 - DNA, 1845 bp, Artificial Sequence
  derived and/or modified sequence
atgggcggcgtgcacgtggcctaccggggcggggccggcgtggccggggctgtgtggacagtgatggccgccaccgtggccacagctgctgctgtggccccagccccagcccctggaacagacagcgccagctctgtgcactggttcaggaagggcctgcggctgcatgacaacccagccctgctggccgctgtgcggggggcccgctgtgtgcgctgtgtgtacatcctggacccctggtttgctgccagcagctctgtgggcatcaaccgctggaggttcctgctgcagagcctggaggacctggacaccagcctgaggaagctgaacagccggctgtttgtggtgcggggccagcctgcagatgtgttccccaggctcttcaaggagtggggcgtgacccggctgacctttgaatatgacagcgagccctttgggaaggagagagatgctgccatcatgaagatggccaaggaggccggcgtggaggtggtgacagagaacagccacaccctgtatgacctggaccgcatcatcgagctgaatggccagaagccacccctgacctacaagcgcttccaggccatcatcagcaggatggagctgcccaagaagcctgtgggcctggtgaccagccagcagatggagagctgcagagctgagatccaggagaaccatgatgagacctacggcgtgcccagcctggaggagctgggcttccccacagagggcctgggccctgctgtgtggcagggcggggagacagaggccctggcccggctggacaagcacctggagaggaaggcctgggtggccaactatgaaagacccaggatgaatgccaacagcctgctggccagccccaccggcctgagcccctacctgcgcttcggctgcctgagctgccgcctcttctactaccgcctgtgggacctgtacaagaaggtgaagaggaacagcaccccacccctgagcctgtttggccagctgctgtggagggagttcttctacacagctgccaccaacaaccccaggtttgacaggatggagggcaaccccatctgcatccagatcccctgggacaggaaccctgaggccctggccaagtgggccgagggcaagacaggcttcccctggattgatgccatcatgacccagctgcggcaggagggctggatccaccacctggcccggcatgctgtggcctgcttcctgaccaggggggacctgtgggtgtcctgggagagcggcgtgcgggtgtttgatgagctgctgctggatgctgacttctctgtgaatgccggctcctggatgtggctgagctgcagcgccttcttccagcagttcttccactgctactgccctgtgggcttcggccgcaggacagaccccagcggggactacatccgccgctacctgcccaagctgaaggccttccccagccgctacatctatgagccctggaatgcccctgagagcatccagaaggccgccaagtgcatcatcggcgtggactacccccggcccatcgtgaaccacgccgagaccagccggctgaacattgaaagaatgaagcagatctaccagcagctgagccgctaccggggcctgtgcctgctggcctctgtgcccagctgtgtggaggacctgagccaccctgtggccgagcccagcagcagccaggccggctccatgagcagcgctggcccccggcccctgcccagcggccctgccagccccaagaggaagctggaggccgctgaggagcccccaggagaggagctgagcaagagggcccgggtggccgagctgcccaccccagagctgcccagcaaggatgcctag

SEQ ID NO: 207619 - DNA, 1845 bp, Artificial Sequence
  derived and/or modified sequence
atgggcggcgtgcacgtggcctaccggggcggcgccggcgtggccggcgccgtatggacggttatggctgccacagttgctaccgcagccgccgtcgctcctgcacctgctcctggcacagactctgcctcatccgtgcactggttccggaagggattgaggcttcacgacaacccggctttattggcagccgtgcggggcgccagatgcgtgaggtgcgtctatatcttggacccgtggttcgccgcaagttcatccgtgggcatcaatcgctggcgcttcctgttgcagtcgcttgaggacctcgatacctcgctgcgaaagttgaatagtcgactgtttgtagtacgcggtcagcctgctgatgtcttcccaaggctgtttaaggaatggggggtgacgcggttaacctttgagtacgattcagagccctttggcaaggagcgggatgctgccattatgaaaatggctaaagaggctggagtggaagtggtgacagagaattcacacacattgtacgatttagaccggatcatcgagctgaatgggcagaagcctcccctgacctataaacgtttccaggcaataatctcccgcatggaattgcctaaaaaacctgtgggcctggtgaccagtcagcagatggagtcctgcagggctgaaatacaggaaaaccacgatgaaacctatggtgtcccctcgcttgaagaactcggattcccgactgagggcctgggacctgctgtatggcaaggaggagaaacggaggctcttgccagactggataaacacttggagaggaaggcatgggtcgccaactatgaacggcctagaatgaacgccaactctctgttggcaagtccaacaggtttgtccccctacctccggttcggctgcttaagctgccgactcttttattaccggctctgggacctgtataaaaaggtgaaacggaactctacacctcccctctcactgttcgggcagctgctatggagggagttcttctacacagcagccacaaataaccccagatttgaccgtatggagggaaaccccatttgtatccaaatcccttgggatcgtaacccggaggcacttgccaaatgggccgagggtaagacaggattcccttggatcgacgctattatgacccaactgcggcaggaggggtggatccatcaccttgcccgccatgccgtagcctgcttcttgacccggggggatctttgggtgtcctgggagtcaggcgttagagtgtttgacgaattgctgctggatgcagatttctcagttaatgccggatcgtggatgtggctttcatgctcggcgttcttccagcagttctttcactgctattgtccagttggctttggtcgacgcactgatccttcaggtgattatatccgtaggtacctgccgaagttaaaggcctttccgtctcgctacatttacgaaccctggaacgctcctgaatctatacagaaggccgctaaatgtattattggtgtggactatcctaggcccatagtgaaccacgctgaaaccagccggctgaatatcgagcgcatgaaacaaatctatcagcagctctcccggtaccgtgggttatgtcttctcgcctctgtgccctcatgcgtcgaggacctgagccaccccgttgccgaaccctcttcctcccaagcagggtcaatgtccagtgccggaccaagacccctacccagcggccctgcttcacccaagcggaaactggaggcggcagaagagcctcccggcgaagagctctccaagcgggcacgggtggcagagttgccgactcctgaattgccctctaaagatgcctag

SEQ ID NO: 207620 - DNA, 1845 bp, Artificial Sequence
  derived and/or modified sequence
atgggtggggtgcacgttgcatacagaggaggggcaggcgttgccggtgccgtgtggaccgtcatggcagctactgtggccacagcagccgctgtcgctcctgctcctgcgccagggactgatagcgcatcatcagtccactggttccgcaaaggacttcggctgcacgataacccggcactgctagcagcagttcgaggcgcaaggtgtgtgaggtgtgtgtacattctcgatccatggttcgctgctagcagctcagtggggatcaaccgctggagatttctcctccagtcactggaggacctggatacttctttgcgtaagctcaactcccggcttttcgttgttcgaggacagccggctgatgtgttccctcggctgttcaaagagtggggcgtcactcgactcacattcgaatatgactccgagcctttcggaaaagagagggacgccgcaatcatgaaaatggccaaagaagccggtgtggaagtggtgacggagaatagtcacacactctacgacctcgatcggattatcgagctcaatgggcagaagcctccgttgacctacaagcgttttcaggcaattatctcccggatggagttgccaaaaaaaccagtgggactcgtgacttcccaacagatggagagctgcagagccgagatacaggaaaatcatgacgagacgtacggtgttccatctttggaagagctcggattcccaacagagggcctcggaccggcagtatggcaaggcggagaaacggaagctcttgctcgactcgacaaacatctggaacgaaaagcatgggtggccaactacgaacgccctcgaatgaacgccaattctctgctcgcttcgcccaccggcttgtcaccttacctgagatttgggtgcttaagttgcaggctattctactacagattgtgggatctctacaaaaaagttaaacgcaactcaactccgccactatccctctttggacaacttctgtggagggagttcttttacacagctgccaccaataatcctcgatttgataggatggagggtaaccccatttgtatccagatcccctgggacagaaaccccgaagcactagccaaatgggcagaagggaagaccgggtttccctggatcgacgcaatcatgacacagctgcgccaggagggatggatacatcatttggccagacatgccgtggcatgttttcttacacgaggcgacctctgggtgtcctgggagagcggggttcgggtttttgacgagctgttactggacgccgacttcagcgtaaacgctggcagctggatgtggctatcctgctctgctttcttccagcagttcttccattgctactgtcccgtcggattcgggcgtcgcactgacccatcaggcgactacattcgtagatacctccctaagctcaaggctttccccagtcgctacatctatgaaccgtggaacgccccagaaagtattcagaaagccgcaaagtgcattattggagtcgactatcccaggccaatcgttaaccatgctgagacctcgcgcttaaacattgagagaatgaagcagatttatcaacagctgtctaggtatcgcggactgtgtctgttagcgagcgtaccgtcctgcgtggaggacttgtcccatcccgtagcagaaccaagttcatcacaggccggttccatgtcctccgcaggcccaaggccgctgcccagcggcccagctagtccgaagcggaaactggaagcggcagaggagcccccaggggaggagttgtccaaacgggcacgggttgccgaactgcctacccctgagcttcctagtaaggacgcctag

SEQ ID NO: 207621 - DNA, 4203 bp, Artificial Sequence
  derived and/or modified sequence
gtcataggtcactgggcgggctatgggcggggtccacgtcgcctaccggggcggagcgggggtggctggagcagtctggacagtcatggcggcgactgtggcgacggcggcagctgtggccccggcgccagcgcccggcacggacagcgcctcttcggtgcactggttccgcaaagggctgcgactccacgacaacccggcgttgctggcggccgtgcgcggggcgcgctgcgtgcgctgcgtttacattctcgacccgtggttcgcggcctcctcctcagtcgggatcaaccgatggaggttcctacttcagtctctggaagatttggacacaagtttaaggaaactgaactcccgcctgtttgtagtccggggacagccagccgacgtgttcccaaggctgttcaaggaatggggagtgacccgcttgacctttgaatatgactctgaaccctttgggaaagaacgggatgcagccatcatgaagatggccaaggaggctggtgtggaagtagtgacggagaattctcataccctctatgacctggacaggatcattgagctgaatgggcagaagccaccccttacatacaagcgctttcaggccatcatcagccgcatggagctgcccaagaagccagtgggcttggtgaccagccagcagatggagagctgcagggccgagatccaggagaaccacgacgagacctacggcgtgccctccctggaggagctggggttccccactgaaggacttggtccagctgtctggcagggaggagagacagaagctctggcccgcctggataagcacttggaacggaaggcctgggttgccaactatgagagaccccgaatgaacgccaactccctcctggccagccccacaggcctcagcccctacctgcgctttggttgtctctcctgccgcctcttctactaccgcctgtgggacctgtataaaaaggtgaagcggaacagcacacctcccctctccctatttgggcaactcctatggcgagagttcttctacacggcagctaccaacaaccccaggtttgaccgcatggaggggaaccccatctgcatccagatcccctgggaccgcaatcctgaggccctggccaagtgggctgagggcaagacaggcttcccttggattgatgccatcatgacccaactgaggcaggagggctggatccaccacctggcccggcatgccgtggcctgcttcctgacccgcggggacctctgggtcagctgggagagcggggtccgggtatttgatgagctgctcctggatgcagatttcagcgtgaacgcaggcagctggatgtggctgtcctgcagtgctttcttccagcagttcttccactgctactgccctgtgggctttggccgtcgcacggaccccagtggggactacatcaggcgatacctgcccaaattgaaagcgttcccctctcgatacatctatgagccctggaatgccccagagtcaattcagaaggcagccaagtgcatcattggtgtggactacccacggcccatcgtcaaccatgccgagaccagccggcttaacattgaacgaatgaagcagatttaccagcagctttcgcgctaccggggactctgtctactggcatctgtcccttcctgtgtggaagacctcagtcaccctgtggcagagcccagctcgagccaggctggcagcatgagcagtgcaggcccaagaccactacccagtggcccagcatcccccaaacgcaagctggaagcagccgaggaaccacctggtgaagaactcagcaaacgggcccgggtggcagagttgccaaccccagagctgccgagcaaggatgcctgagactgcagagcccttgctccgtgagcaaagcctgggtgcccaagcagccaccgcagcagcagagtacaacctgcagagaagctgatcaccgggcagagatagagcgagcatgtgtgtgtgtgtgcgcgtgtgcagaggagggagtggtgtgcctgtttgtgtgtgcatgcatctgttgacactcatgattctgaatgttgcctgggctgggggagtacctgtagcacgccagtgctgtttcccggcctccagacacaaggctcgaggttatggcagtgactttcagctgagacctgttcctgcaagccagctgccttgtctgaacagaacgtagtggtaggaccctagctgggattctggcatctgcctccctagacctccttccctccctcctcacgtcaggctgtggagcaggagcacagcagttctggctgttgtccaaagcatgggattctggaggcagccagagccctgctgagttcctgctttctgacctggaggctgagcaggccggagtggatggatgctgtccagacgtagccacctggcctctgtttcttattttaaaattctctgctactgggctcagtcccaggcccttccttgggcttctgggactgagcatgaggccatagacagatctaaaaagtttccaccaccctacagaagtacacacagatacctgactggtgtggggtatgcctggtactgtaataggagcctaagacagcacacctaccttttcaggatttagaacctaaaattagaaagagaatcccagctgtcattgttccttccccagaagctaagagccagcctcagagcctacccaggagctgtgaaggggcaagggtcaaactgactcactctaccaggaggagaccaggttgcagtggcgtaaggccccctggtttctctggccacactccaaggcaccacagtgctgccagtgaggacagctgacacccagccagggaaaccattctagtctttattctgttggcttccagggcctgtcctggacttgtcagcatccagactgccatgtcagctatcccagtagctgagctccaaggactcaggcagagggactcagggatggggactgccaggggcagttggcaaaagtccaagtagagattacacccagaacaccattccttccaggagcagtaggtgggaggtttgacccagagaagccaatccttgcattccaggagtggcctgtgcctcccacctcttccttcccactgccaaaggcctgtgttgagaaagatgtcatgcaaaaggacgacggtggccaactaaagcaagtcttccttccaccctgtggcctgcacttgagccacaaagtgtgtgtgtgtgtgtgcgtgtgtggtacgtgtgtgtgtgtgtggctatgaggctgattcctgtttggatttttgtcctcacgtgtatcattaagctggcctttgggccttttcctttctacctcccctgtgacctttcctagcctcagatctgttaattcttttggccccagccctgtccctcactgtcctctgtccttggaccagaaccctggggtcagacccatctcctgtagctgtccatcacactgacaggcttcttcctgagatatcctcaggttttctcagccagagagctgcctttagagtccaactgttgtacgtatgtcaccttcactagaaatgtcccatcatcgtgggaggggagcagggcacaggggatggtgtgcattcagagcattgggttgggggcttccctgttccctcagccccagtcgagaggaaagagaatcgggccactgccagaaagagagtcaagcaaacctggaagggcaaatctgagagtgggaaggccaaaggccgaggcccagatttagtattcactagcagcgccttcgggtagcaggatgattccttttcctgcctgtctgctgctggctctcttccctaaggtacaggttggcaggaccacctccgcctacttctccaccatccctagcatgtcagcccgttcccagatcaacctgccagtggagtcaggcagtgcactcctggagccaagagggaagggcagggtagagagggtatgtccagtagcctggagctccatggtggcttcatgcctcccttctcccagctcaggtggccctgagggctccctcggaacagtgcctcaaatcctgacccaagggccagcatggggaagagatggttgcaggcaaaatgcactttatagagattttctattgctgggaaggtgtgtttctcccacaatttgtttgtgaatattcacttgttttataaatgtctgacctgtcttgagta

SEQ ID NO: 207622 - DNA, 1845 bp, Artificial Sequence
  derived and/or modified sequence
atgggcggcgtgcacgtggcctacagaggcggcgccggcgtggccggcgccgtgtggaccgtgatggccgccaccgtggccaccgccgccgccgtggcccccgcccccgcccccggcaccgacagcgccagcagcgtgcactggttcagaaagggcctgagactgcacgacaaccccgccctgctggccgccgtgagaggcgccagatgcgtgagatgcgtgtacatcctggacccctggttcgccgccagcagcagcgtgggcatcaacagatggagattcctgctgcagagcctggaggacctggacaccagcctgagaaagctgaacagcagactgttcgtggtgagaggccagcccgccgacgtgttccccagactgttcaaggagtggggcgtgaccagactgaccttcgagtacgacagcgagcccttcggcaaggagagagacgccgccatcatgaagatggccaaggaggccggcgtggaggtggtgaccgagaacagccacaccctgtacgacctggacagaatcatcgagctgaacggccagaagccccccctgacctacaagagattccaggccatcatcagcagaatggagctgcccaagaagcccgtgggcctggtgaccagccagcagatggagagctgcagagccgagatccaggagaaccacgacgagacctacggcgtgcccagcctggaggagctgggcttccccaccgagggcctgggccccgccgtgtggcagggcggcgagaccgaggccctggccagactggacaagcacctggagagaaaggcctgggtggccaactacgagagacccagaatgaacgccaacagcctgctggccagccccaccggcctgagcccctacctgagattcggctgcctgagctgcagactgttctactacagactgtgggacctgtacaagaaggtgaagagaaacagcaccccccccctgagcctgttcggccagctgctgtggagagagttcttctacaccgccgccaccaacaaccccagattcgacagaatggagggcaaccccatctgcatccagatcccctgggacagaaaccccgaggccctggccaagtgggccgagggcaagaccggcttcccctggatcgacgccatcatgacccagctgagacaggagggctggatccaccacctggccagacacgccgtggcctgcttcctgaccagaggcgacctgtgggtgagctgggagagcggcgtgagagtgttcgacgagctgctgctggacgccgacttcagcgtgaacgccggcagctggatgtggctgagctgcagcgccttcttccagcagttcttccactgctactgccccgtgggcttcggcagaagaaccgaccccagcggcgactacatcagaagatacctgcccaagctgaaggccttccccagcagatacatctacgagccctggaacgcccccgagagcatccagaaggccgccaagtgcatcatcggcgtggactaccccagacccatcgtgaaccacgccgagaccagcagactgaacatcgagagaatgaagcagatctaccagcagctgagcagatacagaggcctgtgcctgctggccagcgtgcccagctgcgtggaggacctgagccaccccgtggccgagcccagcagcagccaggccggcagcatgagcagcgccggccccagacccctgcccagcggccccgccagccccaagagaaagctggaggccgccgaggagccccccggcgaggagctgagcaagagagccagagtggccgagctgcccacccccgagctgcccagcaaggacgcctag

SEQ ID NO: 207623 - protein, 651 aa, Artificial Sequence
  derived and/or modified sequence
MSLPRLLKVNIRTYDNSIPISESSRKSWNQKHFALTFPKPLQRGTNDKSRPLKSQITVTRHDKRKLEEGQKPAHKWIRHSFRKILQWPPIYTAAREQTPFRHLYTSKTHLKKAEYKKSKDEKGGTPLKKDSKKKGGSYATNPESKQIVEEKTKRQNEADKTPLKSSHENEQSKKSKSSSETNPESQNSKTVSKNCSQKDKKDSKNSKKTNTEFLHTKNNPKKDLKRSKTSNDPISEICSENSLNVDFLMLVGQSDDESINFDAWLRNYSQNNSKNYSLKYTKYTKKDTKKNAKKSSDAESEDSKDAKKDSKKVKKNVKKDDKKKDVKKDTESTDAESGDSKDERKDTKKDKKKLKKDDKKKDTKKYPESTDTESGDAKDARNDSRNLKKASKNDDKKKDAKKITFSTDSESELESKESQKDEKKDKKDSKTDNKKSVKNDEESTDADSEPKGDSKKGKKDEKKGKKDSKKDDKKKDAKKNAESTEMESDLELKKDKKHSKEKKGSKKDIKKDARKDTESTDAEFDESSKTGFKTSTKIKGSDTESEESLYKPGAKKKIDESDGTSANSKMEGLESKRGFRMSSKKTTFNEKGEKASTGRVPPSREKPPLPACEPSLPSPKVRRLCWCKMPPPPPKPRYAPLPEAPWIHKLL

SEQ ID NO: 207624 - protein, 657 aa, Artificial Sequence
  derived and/or modified sequence
MSLPRLLKVNIRTYDNSIPISESSRKSWNQKHFALTFPKPLQRGTNDKSRPLKSQITVTRHDKRKLEEGQKPAHKWIRHSFRKILQWPPIYTAAREQTPFRHLYTSKTHLKKAEYKKSKDEKGGTPLKKDSKKKGGSYATNPESKQIVEEKTKRQNEADKTPLKSSHENEQSKKSKSSSETNPESQNSKTVSKNCSQKDKKDSKNSKKTNTEFLHTKNNPKKDLKRSKTSNDPISEICSENSLNVDFLMLVGQSDDESINFDAWLRNYSQNNSKNYSLKYTKYTKKDTKKNAKKSSDAESEDSKDAKKDSKKVKKNVKKDDKKKDVKKDTESTDAESGDSKDERKDTKKDKKKLKKDDKKKDTKKYPESTDTESGDAKDARNDSRNLKKASKNDDKKKDAKKITFSTDSESELESKESQKDEKKDKKDSKTDNKKSVKNDEESTDADSEPKGDSKKGKKDEKKGKKDSKKDDKKKDAKKNAESTEMESDLELKKDKKHSKEKKGSKKDIKKDARKDTESTDAEFDESSKTGFKTSTKIKGSDTESEESLYKPGAKKKIDESDGTSANSKMEGLESKRGFRMSSKKTTFNEKGEKASTGRVPPSREKPPLPACEPSLPSPKVRRLCWCKMPPPPPKPRYAPLIQRRQRLGVRRCQLLM

SEQ ID NO: 207625 - DNA, 1956 bp, Artificial Sequence
  derived and/or modified sequence
atgtccctccctcgtcttctgaaagtgaatatacggacgtatgacaacagcatccctattagtgaatctagtcgtaaatcttggaaccagaaacatttcgccctgacattcccaaagcccttgcaaaggggcacaaatgacaaatcgagaccccttaagagccagataaccgtgacacggcacgataagcggaagctggaagaagggcagaaaccagctcacaagtggatcaggcacagtttcagaaagatcctccaatggccaccaatctatacagctgcaagagagcaaactccctttaggcacttgtatacctccaaaacacacttaaagaaggctgagtataagaagagcaaagacgaaaagggtgggacaccactaaagaaagatagtaaaaaaaaaggcgggagctacgctaccaacccagaatcaaagcagatagtcgaagagaagacaaagagacagaatgaggcggacaagacaccgctcaagagttctcacgagaatgaacagagtaagaagagcaaatcctctagtgaaacaaatcctgagtcccagaattccaagaccgtgagcaagaattgtagccaaaaggacaagaaagactcgaagaacagcaagaaaacaaataccgaatttctgcataccaagaacaacccaaaaaaagatttaaaacggtcaaagacatccaacgaccctatatcagagatttgctctgagaacagcctgaatgtcgactttcttatgctggtgggacagtctgacgacgagtcaattaacttcgatgcctggctgaggaactattctcagaataattcaaagaattactccctcaagtatactaagtataccaaaaaggatacaaaaaagaatgccaaaaagagcagcgatgctgaatcagaggattctaaggacgccaagaaggacagcaagaaggtgaagaaaaacgtcaagaaggacgacaagaaaaaagatgtcaagaaagataccgaatcaactgacgcagagtctggcgatagtaaagatgagaggaaagacactaagaaagataagaaaaaacttaagaaagatgataagaagaaggacaccaagaagtaccctgagtccactgataccgagtcaggggatgccaaggatgcaagaaatgatagcagaaacctcaaaaaggcctccaaaaatgacgataaaaaaaaggatgccaagaagatcacattttcaacagattccgagtcagagctcgagtcaaaggagagccaaaaggacgagaagaaggataaaaaggacagtaagacagacaacaaaaagtcggttaaaaatgatgaagagtccacagatgccgatagtgagcccaaaggcgattcaaagaagggaaagaaggatgaaaagaagggcaagaaggattctaaaaaagacgacaagaaaaaagatgctaagaagaacgccgagtccaccgaaatggagtccgacctggagctaaagaaagataaaaagcactccaaagagaagaaggggagcaaaaaggacattaaaaaggatgcccgtaaggacactgagagcacagatgccgagtttgacgagagtagcaagactggtttcaaaacttcaaccaagatcaagggatctgacaccgagtctgaggagtctctctataagccgggtgccaagaagaaaatcgacgagagcgacggaacatctgcgaactcgaaaatggagggactcgagagtaaacgaggattcagaatgtccagtaaaaagactacctttaatgaaaaaggagaaaaggctagcactggccgtgttcctcccagccgggagaaaccaccactgcctgcctgtgagccatccttgccatctcctaaggtgcggcggctttgctggtgcaaaatgcccccaccaccccctaaaccacggtacgcacccttgcccgaggccccttggatccacaaactgctttag

SEQ ID NO: 207626 - DNA, 1974 bp, Artificial Sequence
  derived and/or modified sequence
atgagtctccccagactgctcaaggtaaacatccgcacttacgacaacagtatacctatcagcgagagttctcgaaaatcatggaaccagaaacactttgcattgaccttccccaagccattacagcggggtaccaatgacaagtccaggcctttgaaaagtcagattaccgtgaccaggcatgataagcgaaagctggaggagggtcagaaaccagctcataaatggatccggcactcctttcggaagatcctccagtggcctcctatttacaccgctgcaagggagcagacaccctttcggcacctgtataccagcaaaacccatcttaagaaggccgagtacaaaaaatcaaaagacgagaaaggcggcactccgctgaaaaaagattctaaaaaaaagggcgggtcctatgcgaccaatccggagtccaaacagatcgtggaagagaaaactaagcgccagaatgaagccgacaagaccccactgaaatcttcacatgagaatgagcaaagcaagaaatccaaatcatcgagcgagaccaatcccgagtcccagaacagcaaaacggtctcgaaaaattgttctcaaaaggataaaaaggatagcaagaactcaaagaagacaaacaccgagttcttgcatacaaagaataatccaaagaaagacttgaaaagatccaagacatctaatgaccctatttccgagatttgtagcgagaacagtctgaatgtcgactttctcatgttggtcggtcaatctgatgatgagtctataaacttcgatgcttggctcaggaattacagccaaaataactctaaaaattattccctaaaatacaccaagtatactaaaaaggacactaagaagaacgcaaagaagagctctgatgcggagtccgaagactccaaagacgctaaaaaggactccaagaaagtcaaaaaaaacgtgaagaaagatgataagaagaaggatgtgaagaaggacaccgagagtactgacgccgagtcaggggacagcaaggatgaaaggaaggatacaaagaaagataaaaagaagctgaagaaggatgataagaagaaagataccaaaaaatacccagaaagtacagacacagagtccggcgacgctaaggatgctcgcaatgattcaagaaatttaaaaaaagcaagtaaaaacgacgataaaaagaaggacgctaagaagattacattctcgactgactccgaaagcgagctagagtctaaggagtcccagaaggatgaaaagaaagacaagaaggattcaaaaacggataataagaagtcagtaaagaacgacgaggagtccacagacgcggactctgaaccgaagggtgattcaaaaaagggaaaaaaagatgaaaagaaggggaagaaagactccaagaaggatgacaaaaaaaaagatgctaagaagaacgcagagagcactgagatggagtcagatctggagctgaagaaagacaagaagcacagcaaagaaaaaaaaggtagcaaaaaagacataaaaaaggatgctcgtaaagacacagaaagtacggacgcagagtttgatgagtcctccaagactgggtttaaaacgtctaccaagattaaagggtctgacacagagtcagaggagtccctttacaagcctggcgctaagaagaaaattgacgagagcgatggtactagcgccaatagcaagatggagggactggagagtaagagggggttccggatgtctagtaaaaagacaacttttaatgagaaaggggaaaaggctagcaccggccgtgtgcccccatcacgcgaaaaaccgccgctcccggcttgtgaaccctctctgcctagccccaaagtgagaagactgtgctggtgcaagatgccgccccctccccccaaacctcgatacgcaccactaatccagagacgacagcgcttgggcgtgaggcgctgccagctattgatgtag

SEQ ID NO: 207627 - DNA, 1956 bp, Artificial Sequence
  derived and/or modified sequence
atgagcctgccccggctgctgaaggtgaacatccgcacctatgacaacagcatccccatcagcgagagcagcaggaagtcctggaaccagaagcactttgccctgaccttccccaagcccctgcagaggggcaccaatgacaagagccggcccctgaagagccagatcaccgtgaccaggcatgacaagaggaagctggaggagggccagaagccagcccacaagtggatccgccacagcttcaggaagatcctgcagtggccacccatctacacagctgcccgggagcagacccccttccgccacctgtacaccagcaagacccacctgaagaaggccgagtacaagaagagcaaggatgagaagggcggcacccccctgaagaaggacagcaagaagaagggcggcagctatgccaccaaccctgagagcaagcagatcgtggaggagaagaccaagaggcagaatgaggccgacaagacccccctgaagagcagccatgaaaatgagcagagcaagaagagcaagagcagcagcgagaccaaccctgagagccagaacagcaagacagtgtccaagaactgcagccagaaggacaagaaggacagcaagaacagcaagaagaccaacacagagttcctgcacaccaagaacaaccccaagaaggacctgaagaggagcaagaccagcaatgaccccatcagcgagatctgcagcgagaacagcctgaatgtggacttcctgatgctggtgggccagagtgatgatgagagcatcaactttgatgcctggctgaggaactacagccagaacaacagcaagaactacagcctgaagtacaccaagtacaccaagaaggacaccaagaagaatgccaagaagagcagtgatgctgagagcgaggacagcaaggatgccaagaaggacagcaagaaggtgaagaagaatgtgaagaaggatgacaagaagaaggatgtgaagaaggacacagagagcacagatgctgagagcggggacagcaaggatgagaggaaggacaccaagaaggacaagaagaagctgaagaaggatgacaagaagaaggacaccaagaagtacccagagagcacagacacagagagcggagatgccaaggatgccagaaatgacagcaggaacctgaagaaggccagcaagaatgatgacaagaagaaggatgccaagaagatcaccttcagcacagattctgagagcgagctggagagcaaggagagccagaaggatgagaagaaggacaagaaggacagcaagacagacaacaagaagtctgtgaagaatgatgaggagagcacagatgctgacagcgagcccaagggggacagcaagaagggcaagaaggatgagaagaagggcaagaaggacagcaagaaggatgacaagaagaaggatgccaagaagaatgctgagagcacagagatggagagtgacctggagctgaagaaggacaagaagcacagcaaggagaagaagggcagcaagaaggacatcaagaaggatgccaggaaggacacagagagcacagatgctgagtttgatgagagcagcaagacaggcttcaagaccagcaccaagatcaagggcagtgacacagaaagtgaggagagcctgtacaagccaggggccaagaagaagattgatgaaagtgatggcaccagcgccaacagcaagatggagggcctggagagcaagaggggcttcaggatgagcagcaagaagaccaccttcaatgaaaaaggagagaaggccagcacaggccgggtgccccccagccgggagaagccacccctgcctgcctgtgagcccagcctgcccagccccaaggtgcggcggctgtgctggtgcaagatgcctcctcctccacccaagcccaggtatgcccccctgcctgaggccccctggatccacaagctgctgtag

SEQ ID NO: 207628 - DNA, 1974 bp, Artificial Sequence
  derived and/or modified sequence
atgagcctgccccggctgctgaaggtgaacatccgcacctatgacaacagcatccccatcagcgagagcagcaggaagtcctggaaccagaagcactttgccctgaccttccccaagcccctgcagaggggcaccaatgacaagagccggcccctgaagagccagatcaccgtgaccaggcatgacaagaggaagctggaggagggccagaagccagcccacaagtggatccgccacagcttcaggaagatcctgcagtggccacccatctacacagctgcccgggagcagacccccttccgccacctgtacaccagcaagacccacctgaagaaggccgagtacaagaagagcaaggatgagaagggcggcacccccctgaagaaggacagcaagaagaagggcggcagctatgccaccaaccctgagagcaagcagatcgtggaggagaagaccaagaggcagaatgaggccgacaagacccccctgaagagcagccatgaaaatgagcagagcaagaagagcaagagcagcagcgagaccaaccctgagagccagaacagcaagacagtgtccaagaactgcagccagaaggacaagaaggacagcaagaacagcaagaagaccaacacagagttcctgcacaccaagaacaaccccaagaaggacctgaagaggagcaagaccagcaatgaccccatcagcgagatctgcagcgagaacagcctgaatgtggacttcctgatgctggtgggccagagtgatgatgagagcatcaactttgatgcctggctgaggaactacagccagaacaacagcaagaactacagcctgaagtacaccaagtacaccaagaaggacaccaagaagaatgccaagaagagcagtgatgctgagagcgaggacagcaaggatgccaagaaggacagcaagaaggtgaagaagaatgtgaagaaggatgacaagaagaaggatgtgaagaaggacacagagagcacagatgctgagagcggggacagcaaggatgagaggaaggacaccaagaaggacaagaagaagctgaagaaggatgacaagaagaaggacaccaagaagtacccagagagcacagacacagagagcggagatgccaaggatgccagaaatgacagcaggaacctgaagaaggccagcaagaatgatgacaagaagaaggatgccaagaagatcaccttcagcacagattctgagagcgagctggagagcaaggagagccagaaggatgagaagaaggacaagaaggacagcaagacagacaacaagaagtctgtgaagaatgatgaggagagcacagatgctgacagcgagcccaagggggacagcaagaagggcaagaaggatgagaagaagggcaagaaggacagcaagaaggatgacaagaagaaggatgccaagaagaatgctgagagcacagagatggagagtgacctggagctgaagaaggacaagaagcacagcaaggagaagaagggcagcaagaaggacatcaagaaggatgccaggaaggacacagagagcacagatgctgagtttgatgagagcagcaagacaggcttcaagaccagcaccaagatcaagggcagtgacacagaaagtgaggagagcctgtacaagccaggggccaagaagaagattgatgaaagtgatggcaccagcgccaacagcaagatggagggcctggagagcaagaggggcttcaggatgagcagcaagaagaccaccttcaatgaaaaaggagagaaggccagcacaggccgggtgccccccagccgggagaagccacccctgcctgcctgtgagcccagcctgcccagccccaaggtgcggcggctgtgctggtgcaagatgcctcctcctccacccaagcccaggtatgcccccctcatccagaggcggcagaggctgggcgtgcggcgctgccagctgctgatgtag

SEQ ID NO: 207629 - DNA, 1956 bp, Artificial Sequence
  derived and/or modified sequence
atgagcctgccccggctgctgaaggtgaacatccggacctacgacaatagtatccctatatctgaatcttcacggaaatcctggaaccagaaacactttgctcttacatttcccaagccactgcagcgtggcaccaatgataagagccggccattgaagtctcagattactgtgaccaggcacgacaaaaggaagttggaagaagggcagaagcccgcccataagtggattcgccactcgttcaggaaaattcttcaatggccaccaatctatacagccgctcgcgagcagactcccttcagacacttgtacacttctaagacacatctaaaaaaagctgagtataaaaagtccaaagacgagaagggcggaacacccctgaagaaggacagcaagaagaaaggcgggtcttatgccacaaacccagagtccaaacagatcgttgaagaaaaaacaaagagacagaacgaggcggacaagacccccctgaagtcttcccatgagaatgaacagtccaagaagtctaagtcaagcagcgagaccaaccctgagtctcagaacagtaagacagtgtccaagaactgtagtcagaaggataaaaaagactccaagaactccaaaaagaccaatacggagttcctacataccaaaaacaaccccaagaaggatttgaagcgttcaaagactagcaatgaccccattagtgaaatctgtagcgaaaattcgctcaacgtcgactttctgatgctcgtgggccagagtgacgatgaatcaataaacttcgacgcttggttgaggaattacagccaaaacaactcaaaaaactacagtcttaaatacactaaatacacgaaaaaggataccaaaaaaaacgctaaaaagagctccgatgcggaatcggaggactccaaggacgctaaaaaggatagcaagaaggtcaagaagaatgtcaaaaaggacgataagaaaaaggatgttaagaaggacaccgagagcaccgacgccgagagtggcgactctaaagacgaaagaaaggatactaagaaggataaaaagaaattgaagaaggatgacaagaaaaaggatacaaaaaaatatccggagtccaccgacaccgagtctggagacgcaaaggatgcgcgcaacgattctagaaatctgaagaaagcttcgaaaaacgatgacaagaagaaagatgccaagaaaatcacattttccacagacagtgaatctgaactcgagagcaaagagtcacaaaaagacgaaaagaaggacaagaaagacagcaagacggataacaagaaaagcgtgaagaacgatgaggagtccaccgatgctgactcagaacctaagggtgacagcaagaaagggaagaaagacgagaagaagggcaagaaagattcaaaaaaagacgataagaagaaggatgccaagaagaatgccgaatctaccgaaatggagtccgatttggagctcaaaaaggataagaagcactctaaggaaaagaaagggagtaaaaaggacattaaaaaagatgcacgcaaagatactgagtccaccgacgctgaatttgatgagtctagtaaaacgggctttaaaacctctacaaagataaaaggcagcgatacggaatcagaggaaagcctgtacaagccaggcgctaagaaaaaaatcgatgaatcggacggaacctcagccaactccaagatggagggactggaaagcaaacgcgggttccgcatgagctctaaaaaaacgacctttaacgagaagggcgaaaaggcgagcacaggaagggtgccaccctcccgcgagaagccccctctgccagcctgcgagcctagtctaccgagcccaaaagttaggcgactgtgctggtgcaagatgcccccacccccccccaaaccacggtatgccccactgccagaagccccttggatccataagctgctgtag

SEQ ID NO: 207630 - DNA, 1974 bp, Artificial Sequence
  derived and/or modified sequence
atgagcctgccccggctgctgaaggtgaacatccggacctacgacaacagcatcccaatctctgagagtagcaggaaatcttggaatcagaagcatttcgccctgacattcccaaaacctctgcagaggggaacaaatgacaaaagtagaccgcttaaatcgcagatcaccgttacacgccatgataagcgtaagcttgaagaaggccagaagccggctcacaagtggatcaggcatagcttcaggaagatcctgcagtggccacctatctataccgccgccagagaacagaccccgttccgccacctatacacttcaaagactcacctcaaaaaagcagaatataagaaatctaaagatgaaaaaggaggcacaccactgaaaaaggacagcaagaaaaaaggggggtcatatgccaccaaccctgagagtaagcagatagtagaggagaaaacaaaacggcagaatgaggccgataaaacccctctgaaatccagtcacgaaaacgaacaaagcaagaagtctaagagctctagcgaaactaacccagaaagtcaaaactctaagaccgtgtcaaagaactgctcccaaaaggacaaaaaggactcaaaaaactccaagaaaacaaatacagagtttttgcacacgaaaaacaacccaaaaaaggatcttaagaggtctaagacatctaacgaccctatcagcgagatctgttcagagaactcacttaacgtggattttctgatgctggtcggccagagtgacgatgagagtatcaatttcgacgcctggctgcggaactactctcagaacaacagtaagaattactctctgaagtatactaagtacaccaaaaaagacaccaagaagaatgcaaaaaaatccagcgatgcagagtcagaagattcaaaagacgcgaaaaaggactcaaagaaggtcaaaaagaacgtgaaaaaagatgacaagaagaaggacgtgaaaaaggatactgaatccactgatgccgagagcggggattctaaggacgaaaggaaggataccaagaaggacaaaaagaagttaaaaaaggatgataaaaagaaagacactaagaaatacccggaatctacggatacggaaagtggggacgccaaagacgcaaggaatgacagtcgcaaccttaaaaaagcatccaaaaacgacgataagaaaaaggacgctaagaagattacattcagtaccgactccgagtccgagctggagagtaaagagtcccagaaagacgagaaaaaggataagaaggactctaaaactgataataaaaaatctgtcaaaaacgacgaagaaagtaccgacgctgacagcgaaccgaaaggtgactctaagaaaggcaaaaaagacgagaaaaaaggtaagaaagattccaaaaaagatgacaaaaagaaggatgccaagaagaacgcagaatctaccgagatggaaagcgatctggagctcaaaaaggacaagaagcacagcaaggagaaaaaaggcagtaagaaagacatcaaaaaagatgcacggaaagataccgaatccacggacgcagagttcgacgaatctagcaagaccggattcaagacttccaccaaaatcaaaggctccgacactgaatcagaggagagtctttacaagcccggcgccaagaagaagattgatgaaagcgatggaacttcagctaactcaaagatggaggggctcgaatccaagcgcggcttccggatgtctagcaagaagacaaccttcaatgagaaaggagagaaagccagtactgggcgggtgccaccgagcagggagaaaccccctctgcctgcctgtgagccttctctgccaagcccaaaggtaagaaggctgtgttggtgcaagatgccacctccccccccgaagcctagatacgcaccattaattcagcgtaggcagaggctgggagtgcgtaggtgtcagctcttaatgtag

SEQ ID NO: 207631 - DNA, 1956 bp, Artificial Sequence
  derived and/or modified sequence
atgtctttgccaagactgctgaaggtgaacattaggacatacgacaattccattcccatcagtgaatcgtctcgtaagtcgtggaatcagaagcatttcgccttaacatttcctaagcctctccagcgcggtactaatgacaagtcacgacctctgaagagtcaaatcaccgttacccgacatgataagaggaagttggaagaggggcaaaagccggctcataaatggatccgtcactctttccggaagattcttcagtggccgcctatttatacagccgcaagagagcaaactcccttcaggcacctatacactagtaagacccacctcaaaaaagctgagtataaaaagagcaaggatgaaaaaggtggaacacccctaaagaaggacagcaagaagaagggcggatcatatgctacgaatccagaaagcaagcagatcgtcgaggagaaaacaaagagacagaatgaggcggacaaaacacccctaaagtcctctcatgagaacgagcagtcaaaaaaaagcaaaagttcaagtgagactaacccagaaagccagaactctaagaccgtttctaaaaactgcagccagaaagacaaaaaggactcaaagaactcaaagaaaacgaatacggaattcctgcacacaaaaaacaacccgaaaaaagatctcaagcgatccaagactagcaacgacccgatatctgaaatttgttccgaaaattctctcaacgtggatttcctgatgctggtcggtcagtctgacgacgaatcaatcaacttcgatgcatggctgcgcaactactctcaaaataatagcaaaaattacagcctaaaatacactaagtacacaaaaaaggacaccaagaaaaacgctaaaaaaagcagcgacgctgagagtgaagattctaaggatgccaaaaaagattcaaaaaaagtgaaaaagaacgtaaagaaggatgacaaaaaaaaggacgtcaaaaaggataccgaatccaccgacgcagaatcgggcgactcaaaggacgagcgcaaggataccaagaaagacaagaagaaactcaaaaaggacgataagaagaaggacacaaagaaataccctgaaagtaccgacactgagagcggggatgccaaggatgcaaggaatgacagccgaaacctcaaaaaagcaagcaagaatgacgacaaaaaaaaagacgcgaaaaagattaccttctctaccgattccgagtcagagctggaaagtaaagagagtcaaaaggacgaaaaaaaggacaagaaagattccaaaacagataacaagaagtctgtgaagaacgacgaagaatccactgacgcagatagcgaaccaaagggcgattccaaaaagggcaagaaagacgagaaaaaaggcaagaaggacagtaaaaaagatgataagaaaaaagatgccaagaaaaatgcggagagcactgagatggaaagcgatctggagctgaagaaggataaaaaacacagtaaagagaagaaaggctcaaagaaggacataaagaaggacgctcgcaaagatacagagagcacagacgctgagttcgacgaaagttctaagaccgggttcaagacttctaccaaaatcaagggatccgacacagaaagtgaagaaagcctgtacaagccaggcgctaagaaaaagattgatgagtccgatggcacaagtgctaattcaaaaatggaggggctcgagtctaaacgaggcttccgcatgagttccaagaagaccacattcaatgaaaagggagagaaggcgtcaactggcagggttccaccttcccgcgaaaagccaccgcttcctgcttgcgagccctcacttccttcccctaaggtccggcgtctttgctggtgcaagatgccacccccaccacctaagccaaggtatgcaccactgccggaggccccatggatccataaactgctttag

SEQ ID NO: 207632 - DNA, 1974 bp, Artificial Sequence
  derived and/or modified sequence
atgtcactgccacgtttactcaaggtgaacattcggacgtatgacaatagtataccgatctctgaaagcagtcggaagtcttggaaccagaaacacttcgcactaacatttcctaaaccactccagagggggaccaacgataaaagtaggccgctcaagagtcagattacagttactaggcacgacaaacgcaaactggaagaagggcagaagcccgctcataagtggattagacatagctttcggaaaatcttgcagtggccacccatatacaccgcagcccgagagcaaacacctttccgtcatctctatacatccaagacacatttaaaaaaggccgagtataaaaaatccaaggacgaaaaaggcggaacccctctgaagaaagactcaaagaagaaaggcggaagttacgccaccaatcctgagtcaaaacagattgtggaagaaaaaacaaaaagacagaacgaggcagataagactcccctgaaaagctcgcatgagaatgaacaaagtaagaaatcgaagagcagtagcgaaacaaaccctgagagccagaactcgaaaactgtctctaaaaattgtagtcagaaagacaagaaggacagcaaaaattctaagaagacaaatacggagttcttgcataccaaaaataatcctaagaaagatctgaaaaggtctaaaacttccaacgatcccatcagcgagatctgcagcgagaactcccttaatgtcgactttctgatgctcgtggggcaatcagacgatgaatcaatcaacttcgatgcatggcttcggaattactcacagaacaacagcaagaattattcactcaagtataccaaatacacaaagaaggataccaaaaagaatgccaaaaaatcatccgatgccgagtcagaggacagtaaggatgccaagaaagatagcaaaaaggtgaagaagaacgtgaagaaggatgataagaaaaaagatgtaaaaaaggacaccgaatcaacagatgcggagagcggcgatagcaaagacgaaagaaaagacacgaagaaggacaaaaaaaaactcaagaaggacgacaaaaagaaggatacaaaaaagtatcccgaatccaccgatacggaatctggagatgctaaggacgctcgtaatgacagtcggaacctgaaaaaggcatccaagaatgacgataagaaaaaggacgctaaaaagataaccttctccacagactcagagagcgagttggagagtaaagagagtcagaaggacgagaaaaaagataaaaaggacagtaagacggataacaagaaatccgttaagaatgacgaagaaagcaccgacgcagactccgagccaaagggcgactctaaaaagggcaaaaaagatgaaaagaagggaaagaaagatagtaaaaaggatgataagaagaaagacgcaaagaaaaacgccgagagtacagaaatggagtctgacttggagctgaaaaaggataagaagcactctaaagaaaaaaagggatctaagaaagatataaagaaagatgccagaaaagacacggagagcacagacgctgagttcgatgagtcttccaagaccggatttaagacttccacaaaaattaaaggctcagatactgagtccgaggaatcgctctacaagccaggcgctaagaagaagattgatgaaagcgatggaacttcagccaacagcaagatggaaggactggaaagcaagcgtggctttcggatgtcatcaaaaaaaacaaccttcaatgaaaaaggcgagaaggcctcaacgggcagagtgccgccaagcagggaaaagcccccacttccagcctgcgagccctccttaccatcaccgaaggtgcggagattgtgttggtgtaagatgcctccaccccctccaaagcctagatacgccccattaatacagcgacgtcagcgcctgggagtgcgcaggtgccaattgctcatgtag

SEQ ID NO: 207633 - DNA, 2106 bp, Artificial Sequence
  derived and/or modified sequence
actatgctcaagtccaggcaacgtacaggcaggggaaatgtctcttccaaggttgctaaaagtaaacatcagaacatatgataattccattccaatcagtgaatcaagcagaaaatcatggaatcaaaaacactttgctttgacatttcccaaaccactccagagaggtacaaatgataaatcaagacctttgaaatcacaaataacagttactagacatgacaaaagaaaactagaagaaggccagaaaccagctcataaatggataaggcattctttcagaaaaattttgcaatggccacccatttacacagctgccagggaacagactccattcagacatctttatacttccaaaacccatcttaaaaaagcagaatataaaaagtccaaagatgaaaaaggaggaacacctttgaagaaagattccaagaaaaaaggaggttcatatgcaacaaatccagaatccaagcaaatagtagaagagaaaactaaaagacaaaatgaggcagataaaactcccttaaaatcatcacatgaaaatgaacaatccaagaagtcaaaatccagttcagaaactaatccagaatcccaaaattctaagacagtctcaaaaaattgttcacaaaaagataagaaagattcaaagaattccaagaagacaaacactgaattcctacatacaaagaacaatccaaagaaagatttgaagaggtcaaagactagtaatgatcccatatcagagatttgctcagaaaatagtttaaatgttgatttcctcatgttagtgggacagtctgatgatgaatccataaattttgatgcatggttaaggaattactcacagaataattcaaagaattattctttgaagtatacaaagtatacaaagaaggacacaaaaaagaatgcaaagaaaagctctgatgctgaatctgaagactcaaaggatgctaagaaagattcaaagaaagttaagaaaaatgtcaagaaagatgacaagaaaaaggatgtaaagaaggacacagagtctactgatgctgaatctggagactcaaaggatgaaaggaaagatacaaagaaggataagaaaaaattaaagaaagatgacaagaaaaaggacacaaagaagtacccagagtctactgatactgaatcaggagatgcaaaggatgcaagaaatgattcaagaaatttgaagaaagcttcaaagaatgatgacaagaaaaaggatgcaaagaaaattacattctctactgattctgaatctgaactggagtcaaaggagagtcagaaagatgaaaaaaaggataaaaaagattcaaagacagataataaaaagtctgtcaagaatgatgaagagtctactgatgctgactctgaaccgaagggagattcaaaaaagggtaaaaaggatgaaaagaaggggaagaaagattcaaagaaagatgacaaaaagaaggatgcaaagaaaaatgcagaatctactgaaatggaatctgatttggagttaaagaaggacaagaaacactcaaaggaaaagaaaggttcaaagaaagatatcaagaaggatgcaagaaaggacacagagtctactgatgctgaatttgatgaatcttccaagacaggctttaaaacatctacaaaaatcaaaggttcagatactgaatctgaagagtcactatataaacctggggctaagaagaaaattgatgaatcagatggcacatctgcaaattcaaagatggaaggactggaatcaaagagaggattcagaatgtcatccaaaaagactacattcaatgaaaaaggggaaaaagcaagtacaggtagagttcctccatcaagagaaaaaccaccactccctgcttgtgagccttctctaccatcaccaaaggtcagacgtctttgttggtgcaagatgcctcctccacctccaaaaccaagatatgctcctttgcctgaagcaccgtggattcataagctgctttaaagaacaactgagcacttggtttcacagaatggccttaccacagtaagcaccacctactctcaaatgagcatttctacctctgtggaactgaaataaaaacaagtcttccatga

SEQ ID NO: 207634 - DNA, 1995 bp, Artificial Sequence
  derived and/or modified sequence
ggcaacgtacaggcaggggaaatgtctcttccaaggttgctaaaagtaaacatcagaacatatgataattccattccaatcagtgaatcaagcagaaaatcatggaatcaaaaacactttgctttgacatttcccaaaccactccagagaggtacaaatgataaatcaagacctttgaaatcacaaataacagttactagacatgacaaaagaaaactagaagaaggccagaaaccagctcataaatggataaggcattctttcagaaaaattttgcaatggccacccatttacacagctgccagggaacagactccattcagacatctttatacttccaaaacccatcttaaaaaagcagaatataaaaagtccaaagatgaaaaaggaggaacacctttgaagaaagattccaagaaaaaaggaggttcatatgcaacaaatccagaatccaagcaaatagtagaagagaaaactaaaagacaaaatgaggcagataaaactcccttaaaatcatcacatgaaaatgaacaatccaagaagtcaaaatccagttcagaaactaatccagaatcccaaaattctaagacagtctcaaaaaattgttcacaaaaagataagaaagattcaaagaattccaagaagacaaacactgaattcctacatacaaagaacaatccaaagaaagatttgaagaggtcaaagactagtaatgatcccatatcagagatttgctcagaaaatagtttaaatgttgatttcctcatgttagtgggacagtctgatgatgaatccataaattttgatgcatggttaaggaattactcacagaataattcaaagaattattctttgaagtatacaaagtatacaaagaaggacacaaaaaagaatgcaaagaaaagctctgatgctgaatctgaagactcaaaggatgctaagaaagattcaaagaaagttaagaaaaatgtcaagaaagatgacaagaaaaaggatgtaaagaaggacacagagtctactgatgctgaatctggagactcaaaggatgaaaggaaagatacaaagaaggataagaaaaaattaaagaaagatgacaagaaaaaggacacaaagaagtacccagagtctactgatactgaatcaggagatgcaaaggatgcaagaaatgattcaagaaatttgaagaaagcttcaaagaatgatgacaagaaaaaggatgcaaagaaaattacattctctactgattctgaatctgaactggagtcaaaggagagtcagaaagatgaaaaaaaggataaaaaagattcaaagacagataataaaaagtctgtcaagaatgatgaagagtctactgatgctgactctgaaccgaagggagattcaaaaaagggtaaaaaggatgaaaagaaggggaagaaagattcaaagaaagatgacaaaaagaaggatgcaaagaaaaatgcagaatctactgaaatggaatctgatttggagttaaagaaggacaagaaacactcaaaggaaaagaaaggttcaaagaaagatatcaagaaggatgcaagaaaggacacagagtctactgatgctgaatttgatgaatcttccaagacaggctttaaaacatctacaaaaatcaaaggttcagatactgaatctgaagagtcactatataaacctggggctaagaagaaaattgatgaatcagatggcacatctgcaaattcaaagatggaaggactggaatcaaagagaggattcagaatgtcatccaaaaagactacattcaatgaaaaaggggaaaaagcaagtacaggtagagttcctccatcaagagaaaaaccaccactccctgcttgtgagccttctctaccatcaccaaaggtcagacgtctttgttggtgcaagatgcctcctccacctccaaaaccaagatatgctcctttgattcaaagaagacagcgtttaggagtcagaagatgtcaactacttatgtga

SEQ ID NO: 207635 - DNA, 1956 bp, Artificial Sequence
  derived and/or modified sequence
atgagcctgcccagactgctgaaggtgaacatcagaacctacgacaacagcatccccatcagcgagagcagcagaaagagctggaaccagaagcacttcgccctgaccttccccaagcccctgcagagaggcaccaacgacaagagcagacccctgaagagccagatcaccgtgaccagacacgacaagagaaagctggaggagggccagaagcccgcccacaagtggatcagacacagcttcagaaagatcctgcagtggccccccatctacaccgccgccagagagcagacccccttcagacacctgtacaccagcaagacccacctgaagaaggccgagtacaagaagagcaaggacgagaagggcggcacccccctgaagaaggacagcaagaagaagggcggcagctacgccaccaaccccgagagcaagcagatcgtggaggagaagaccaagagacagaacgaggccgacaagacccccctgaagagcagccacgagaacgagcagagcaagaagagcaagagcagcagcgagaccaaccccgagagccagaacagcaagaccgtgagcaagaactgcagccagaaggacaagaaggacagcaagaacagcaagaagaccaacaccgagttcctgcacaccaagaacaaccccaagaaggacctgaagagaagcaagaccagcaacgaccccatcagcgagatctgcagcgagaacagcctgaacgtggacttcctgatgctggtgggccagagcgacgacgagagcatcaacttcgacgcctggctgagaaactacagccagaacaacagcaagaactacagcctgaagtacaccaagtacaccaagaaggacaccaagaagaacgccaagaagagcagcgacgccgagagcgaggacagcaaggacgccaagaaggacagcaagaaggtgaagaagaacgtgaagaaggacgacaagaagaaggacgtgaagaaggacaccgagagcaccgacgccgagagcggcgacagcaaggacgagagaaaggacaccaagaaggacaagaagaagctgaagaaggacgacaagaagaaggacaccaagaagtaccccgagagcaccgacaccgagagcggcgacgccaaggacgccagaaacgacagcagaaacctgaagaaggccagcaagaacgacgacaagaagaaggacgccaagaagatcaccttcagcaccgacagcgagagcgagctggagagcaaggagagccagaaggacgagaagaaggacaagaaggacagcaagaccgacaacaagaagagcgtgaagaacgacgaggagagcaccgacgccgacagcgagcccaagggcgacagcaagaagggcaagaaggacgagaagaagggcaagaaggacagcaagaaggacgacaagaagaaggacgccaagaagaacgccgagagcaccgagatggagagcgacctggagctgaagaaggacaagaagcacagcaaggagaagaagggcagcaagaaggacatcaagaaggacgccagaaaggacaccgagagcaccgacgccgagttcgacgagagcagcaagaccggcttcaagaccagcaccaagatcaagggcagcgacaccgagagcgaggagagcctgtacaagcccggcgccaagaagaagatcgacgagagcgacggcaccagcgccaacagcaagatggagggcctggagagcaagagaggcttcagaatgagcagcaagaagaccaccttcaacgagaagggcgagaaggccagcaccggcagagtgccccccagcagagagaagccccccctgcccgcctgcgagcccagcctgcccagccccaaggtgagaagactgtgctggtgcaagatgcccccccccccccccaagcccagatacgcccccctgcccgaggccccctggatccacaagctgctgtag

SEQ ID NO: 207636 - DNA, 1974 bp, Artificial Sequence
  derived and/or modified sequence
atgagcctgcccagactgctgaaggtgaacatcagaacctacgacaacagcatccccatcagcgagagcagcagaaagagctggaaccagaagcacttcgccctgaccttccccaagcccctgcagagaggcaccaacgacaagagcagacccctgaagagccagatcaccgtgaccagacacgacaagagaaagctggaggagggccagaagcccgcccacaagtggatcagacacagcttcagaaagatcctgcagtggccccccatctacaccgccgccagagagcagacccccttcagacacctgtacaccagcaagacccacctgaagaaggccgagtacaagaagagcaaggacgagaagggcggcacccccctgaagaaggacagcaagaagaagggcggcagctacgccaccaaccccgagagcaagcagatcgtggaggagaagaccaagagacagaacgaggccgacaagacccccctgaagagcagccacgagaacgagcagagcaagaagagcaagagcagcagcgagaccaaccccgagagccagaacagcaagaccgtgagcaagaactgcagccagaaggacaagaaggacagcaagaacagcaagaagaccaacaccgagttcctgcacaccaagaacaaccccaagaaggacctgaagagaagcaagaccagcaacgaccccatcagcgagatctgcagcgagaacagcctgaacgtggacttcctgatgctggtgggccagagcgacgacgagagcatcaacttcgacgcctggctgagaaactacagccagaacaacagcaagaactacagcctgaagtacaccaagtacaccaagaaggacaccaagaagaacgccaagaagagcagcgacgccgagagcgaggacagcaaggacgccaagaaggacagcaagaaggtgaagaagaacgtgaagaaggacgacaagaagaaggacgtgaagaaggacaccgagagcaccgacgccgagagcggcgacagcaaggacgagagaaaggacaccaagaaggacaagaagaagctgaagaaggacgacaagaagaaggacaccaagaagtaccccgagagcaccgacaccgagagcggcgacgccaaggacgccagaaacgacagcagaaacctgaagaaggccagcaagaacgacgacaagaagaaggacgccaagaagatcaccttcagcaccgacagcgagagcgagctggagagcaaggagagccagaaggacgagaagaaggacaagaaggacagcaagaccgacaacaagaagagcgtgaagaacgacgaggagagcaccgacgccgacagcgagcccaagggcgacagcaagaagggcaagaaggacgagaagaagggcaagaaggacagcaagaaggacgacaagaagaaggacgccaagaagaacgccgagagcaccgagatggagagcgacctggagctgaagaaggacaagaagcacagcaaggagaagaagggcagcaagaaggacatcaagaaggacgccagaaaggacaccgagagcaccgacgccgagttcgacgagagcagcaagaccggcttcaagaccagcaccaagatcaagggcagcgacaccgagagcgaggagagcctgtacaagcccggcgccaagaagaagatcgacgagagcgacggcaccagcgccaacagcaagatggagggcctggagagcaagagaggcttcagaatgagcagcaagaagaccaccttcaacgagaagggcgagaaggccagcaccggcagagtgccccccagcagagagaagccccccctgcccgcctgcgagcccagcctgcccagccccaaggtgagaagactgtgctggtgcaagatgcccccccccccccccaagcccagatacgcccccctgatccagagaagacagagactgggcgtgagaagatgccagctgctgatgtag

SEQ ID NO: 207637 - protein, 817 aa, Artificial Sequence
  derived and/or modified sequence
MHKHQHCCKCPECYEVTRLAALRRLEPPGYGDWQVPDPYGPGGGNGASAGYGGYSSQTLPSQAGATPTPRTKAKLIPTGRDVGPVPPKPVPGKSTPKLNGSGPSWWPECTCTNRDWYEQVNGSDGMFKYEEIVLERGNSGLGFSIAGGIDNPHVPDDPGIFITKIIPGGAAAMDGRLGVNDCVLRVNEVDVSEVVHSRAVEALKEAGPVVRLVVRRRQPPPETIMEVNLLKGPKGLGFSIAGGIGNQHIPGDNSIYITKIIEGGAAQKDGRLQIGDRLLAVNNTNLQDVRHEEAVASLKNTSDMVYLKVAKPGSLHLNDMYAPPDYASTFTALADNHISHNSSLGYLGAVESKVSYPAPPQVPPTRYSPIPRHMLAEEDFTREPRKIILHKGSTGLGFNIVGGEDGEGIFVSFILAGGPADLSGELRRGDRILSVNGVNLRNATHEQAAAALKRAGQSVTIVAQYRPEEYSRFESKIHDLREQMMNSSMSSGSGSLRTSEKRSLYVRALFDYDRTRDSCLPSQGLSFSYGDILHVINASDDEWWQARLVTPHGESEQIGVIPSKKRVEKKERARLKTVKFHARTGMIESNRDFPGLSDDYYGAKNLKGQEDAILSYEPVTRQEIHYARPVIILGPMKDRVNDDLISEFPHKFGSCVPHTTRPRRDNEVDGQDYHFVVSREQMEKDIQDNKFIEAGQFNDNLYGTSIQSVRAVAERGKHCILDVSGNAIKRLQQAQLYPIAIFIKPKSIEALMEMNRRQTYEQANKIYDKAMKLEQEFGEYFTAIVQGDSLEEIYNKIKQIIEDQSGHYIWVPSPEKL

SEQ ID NO: 207638 - DNA, 2454 bp, Artificial Sequence
  derived and/or modified sequence
atgcataaacaccagcactgttgcaaatgccctgaatgttacgaggtcacccgactcgccgccctgcgtagattggagccccccggctacggcgactggcaggttccggacccatatggccccggcgggggaaatggtgccagtgcaggatacggcggctactcaagccagaccctccctagtcaggccggtgctactccgacccccaggaccaaagctaaactgatcccaactgggagagacgtgggtcccgtgccacccaaacccgtgccaggtaaatccacgccgaagctgaacggcagtggaccctcttggtggcctgagtgcacctgtacgaaccgggactggtacgagcaggtcaacggctcagacggtatgtttaagtacgaagaaatagtcctggaaaggggaaacagtggtttggggttcagcattgcaggtgggatcgacaacccacacgtaccagatgacccaggaattttcattactaaaattattccgggtggggccgccgccatggatggtaggcttggggtcaatgactgcgttctccgtgtgaacgaggttgacgtgtctgaggtggttcactcgcgagccgttgaagcacttaaagaagccggtccagtggtacgcctggtcgttaggcgacgacagccaccgcccgaaaccattatggaggtaaacctcctcaagggtcctaagggcctgggattctctatcgccggagggatcggaaatcagcatattccaggtgataacagcatttacatcactaagattatcgaaggcggcgccgcccaaaaagatggaagactccagatcggtgatcgtctgttggccgtgaacaacaccaatttacaagacgttcgccacgaggaagcagtggcatctctcaagaataccagcgacatggtttacttaaaggtggcaaaacccggctcccttcacctgaatgacatgtatgcacctcctgattatgcctctactttcacagctctcgctgacaatcacataagccacaatagcagtcttggataccttggggctgtcgagtccaaagtttcgtatcctgccccaccccaagtgccaccaacacgatacagtcctattcctcggcacatgctggccgaggaggactttacacgggagcccagaaagattatcttgcataaaggctcaacgggacttggtttcaatatcgtgggtggggaagatggcgagggaatcttcgtctccttcattctggcaggcggcccggctgacctttctggagaattacgccggggcgataggatcctaagtgtcaacggagtcaacctcagaaacgccacccacgagcaggcagcggcagctctaaagcgagccggacagagcgtaactattgtcgcacagtataggcctgaagagtactccagatttgagtccaaaatccacgacctaagagaacagatgatgaactccagtatgtcttcggggagtggtagtctgaggacatccgagaaaaggagtctctacgtacgtgctcttttcgattatgaccggacacgggattcctgtcttccctcacagggtctgagctttagttatggcgacatcttgcacgtaataaatgcatccgatgatgaatggtggcaggccaggctggttaccccgcatggcgagtctgagcagattggggttataccaagtaaaaaaagagtagagaagaaggaaagggcgcgccttaaaactgtgaaattccatgctagaacaggaatgatcgagtccaacagggatttcccaggactgagcgacgactactacggggcaaagaatctcaaggggcaggaagacgcaatcctgtcatacgagcccgttaccaggcaagaaatccattatgcgcgtcccgtcattatactaggcccaatgaaggacagggtgaatgatgacctgatctccgagttccctcataagttcggatcatgcgtccctcacacaacccggcctcgacgcgataatgaagtggacggccaggattaccacttcgtcgtctctcgagagcaaatggagaaagatatacaagataacaagttcatcgaagccggtcagttcaatgacaacctgtatggcacaagtattcaaagtgtcagagccgtggccgagagaggcaagcactgcattctcgatgtctccggcaatgccatcaagcgcctgcagcaggcccaactttatccaattgcgattttcatcaaacctaaatcaatcgaggcgttaatggagatgaatagacggcagacctacgagcaagctaacaagatatatgacaaggctatgaaactggaacaggagttcggtgagtactttacggctattgtgcagggcgacagcttggaggaaatctacaacaaaatcaaacaaattatcgaagatcaatccggacactatatctgggtgccctcccccgagaagctgtag

SEQ ID NO: 207639 - DNA, 2454 bp, Artificial Sequence
  derived and/or modified sequence
atgcacaagcaccagcactgctgcaagtgcccagagtgctatgaggtgacccggctggccgccctgcggcggctggagcccccaggctacggggactggcaggtgcctgacccctacggccctgggggcggcaatggagccagcgctggctatggaggctacagcagccagaccctgcccagccaggccggggccacccccacccccaggaccaaggccaagctgatccccaccggcagagatgtgggccctgtgccccccaagcctgtgcctgggaagagcacccccaagctgaatggaagtggccccagctggtggccagagtgcacctgcaccaacagagactggtatgagcaggtgaatggaagtgatggcatgttcaagtatgaggagatcgtgctggagcggggcaacagcggcctgggcttcagcattgctgggggcatcgacaacccccacgtgcctgatgaccccggcatcttcatcaccaagatcatccctggaggagctgctgccatggatggccgcctgggcgtgaatgactgtgtgctgcgggtgaatgaggtggatgtgtctgaggtggtgcacagcagagctgtggaggccctgaaggaggccggccctgtggtgcggctggtggtgagaagacggcagcccccacctgagaccatcatggaggtgaacctgctgaagggccccaagggcctgggcttcagcattgctgggggcatcggcaaccagcacatccctggggacaacagcatctacatcaccaagatcattgaaggaggagctgcccagaaggatggccgcctgcagatcggggaccggctgctggccgtgaacaacaccaacctgcaggatgtgagacatgaggaggccgtggccagcctgaagaacaccagtgacatggtgtacctgaaggtggccaagccaggcagcctgcacctgaatgacatgtatgcccccccagactatgccagcaccttcaccgccctggccgacaaccacatcagccacaacagcagcctgggctacctgggcgctgtggagagcaaggtgtcctacccagccccaccccaggtgccccccacccgctacagccccatccccaggcacatgctggccgaggaggacttcacccgggagcccaggaagatcatcctgcacaagggcagcacaggcctgggcttcaacatcgtgggcggggaggatggagagggcatctttgtgtccttcatcctggccggcggccctgctgacctgtctggagagctgcggcggggggaccgcatcctgtctgtgaatggagtgaacctgagaaatgccacccatgagcaggccgccgccgccctgaagagagctggccagagcgtgaccatcgtggcccagtacagacctgaggagtacagcagatttgagagcaagatccatgacctgcgggagcagatgatgaacagctccatgagcagcggcagcggcagcctgcggaccagcgagaagaggagcctgtatgtgcgggccctgtttgattatgacaggacccgggacagctgcctgcccagccagggcctgtccttctcctatggagacatcctgcacgtgatcaatgccagtgatgatgagtggtggcaggcccggctggtgaccccccacggggagagcgagcagatcggggtcatccccagcaagaagagggtggagaagaaggagcgggcccggctgaagacagtgaagttccacgccaggacaggcatgattgagagcaacagagacttccctggcctgagtgatgactactatggagccaagaacctgaagggccaggaggatgccatcctgtcctatgagcctgtgacccggcaggagatccactacgcccggcctgtgatcatcctgggccccatgaaggacagagtgaatgatgacctgatcagcgagttcccccacaagtttggcagctgtgtgccccacaccacccggccccggcgggacaatgaggtggatggccaggactaccactttgtggtgtcccgggagcagatggagaaggacatccaggacaacaagttcatcgaggccggccagttcaatgacaacctgtatggcaccagcatccagagcgtgcgggctgtggccgagcggggcaagcactgcatcctggatgtgtctggaaatgccatcaagaggctgcagcaggcccagctgtaccccatcgccatcttcatcaagcccaagagcattgaggccctgatggagatgaacagacggcagacctatgagcaggccaacaagatctatgacaaggccatgaagctggagcaggagtttggagagtacttcaccgccatcgtgcagggcgacagcctggaggagatctacaacaagatcaagcagatcatcgaggaccagagcggccactacatctgggtgcccagccctgagaagctgtag

SEQ ID NO: 207640 - DNA, 2454 bp, Artificial Sequence
  derived and/or modified sequence
atgcacaagcaccagcactgctgcaagtgccccgagtgctacgaggtgacgagactggctgcactcaggcggctggagccacccggttacggggattggcaggtgcctgatccctatggaccaggcggtggtaatggcgcgtctgctggttacggaggttactcatcacagaccctcccatcacaagctggagcaacccccacgccgaggacaaaggccaagctgatacccactggccgggatgtcggccccgtccctccaaagccagtccccggaaagtctacccctaaactgaacgggagcggacccagctggtggcccgaatgcacgtgtacaaatagggactggtacgaacaagtgaacggatctgacggcatgttcaagtatgaagagattgtgctcgaaagaggcaactctgggctcggatttagtatcgcaggaggtatcgacaacccgcacgtgccagatgatcccggtatcttcataacaaagataattccaggcggggctgcagcaatggatggacggctcggcgtgaatgactgcgtactgcgagtgaacgaagtcgacgtgagtgaagtggtgcactctcgcgccgtggaagccctgaaagaagccgggcccgtggtgagactcgtcgttcgacgaaggcaaccgcctccggagaccatcatggaggttaatcttctcaaaggtccaaaaggattaggtttctctatagctggtggcatcggcaatcaacatattccgggtgataattctatctatatcactaaaatcatcgagggaggcgctgctcagaaagacggtaggctgcaaataggtgatcgcttactcgccgtgaataatacaaatctgcaggacgtgcgtcacgaagaagcagtggcgagcctgaaaaacacctccgacatggtttacttgaaggtggccaaacctgggtctttgcacttaaacgatatgtacgcccccccagactatgcttcaacattcactgcccttgccgacaatcatataagccacaattccagtcttggatacctgggggcagtcgaatcaaaggtgagttaccctgccccgccacaggtgccacccacacggtatagcccaatccctcggcatatgcttgccgaggaggatttcacaagagagcctcgcaagataattttacacaaaggctccaccggactgggcttcaacatcgtaggtggagaagacggagaaggcatttttgtgagtttcatactagctgggggtcctgccgacctgtccggtgagctccgaagaggagatcgaattctctctgtgaatggtgtgaatttgcgaaacgcgacccacgagcaggccgccgccgcactgaaacgagctggccaatccgtgacgattgtagcccaatatcgtcccgaagaatactccagatttgagtcaaaaattcatgatcttagagagcaaatgatgaatagctccatgtcatcgggctcagggtccctccgcacatccgagaagagatccctctacgtgagggcactgtttgactacgataggactagggattcctgtctgccctcccaggggctgagctttagttatggggacatcctgcatgtcatcaacgccagtgatgatgagtggtggcaggcccggctggtaaccccacatggtgaatctgaacagattggcgtgattccatccaagaagagggtagagaagaaggagcgagctaggctgaagacagtgaaattccacgccaggactggcatgatagagtccaaccgagactttcccgggttatccgacgattattatggagccaaaaacctgaaaggacaggaggatgccattctgtcctatgaacctgtgactcggcaggaaatccattacgctaggcctgtaatcatcttgggccccatgaaggacagagtgaacgatgacctgatctcagagttcccacacaagtttggctcttgtgtgccccataccacaaggccccggagagacaacgaagtggacgggcaggactaccattttgtggtcagcagagagcagatggagaaagatatccaagataataagtttatcgaggcgggccagtttaatgataatttgtacgggacatctattcagagcgtcagagcagtcgcagagcgaggtaaacattgcattctggacgtgagcggcaatgcgatcaaacgattgcagcaggcacagttgtacccaattgccatctttatcaagccgaagtccatcgaggctctgatggaaatgaacagaagacagacttatgagcaggcgaataaaatttatgacaaggccatgaaactggagcaggagttcggggaatatttcacagcaattgtgcagggggatagtctcgaggaaatttataataagattaaacagattatagaagaccagtcaggccactatatatgggttccatcccctgagaagttgtag

SEQ ID NO: 207641 - DNA, 2454 bp, Artificial Sequence
  derived and/or modified sequence
atgcataagcatcagcactgctgtaagtgtcctgagtgttatgaggtgacaaggcttgcagccttaaggcggctggagccacccggatatggcgactggcaggttccagacccatatggtcctgggggagggaatggcgctagcgcaggttatggtgggtattcctcacagaccctgccctcacaggcgggagccaccccgacccccagaaccaaggctaagctcatccctacaggcagagacgtgggccctgtgccccctaagccagtacccggaaaaagtacccctaaactgaacggatccgggcctagttggtggccagaatgcacatgcaccaaccgggactggtatgaacaagtgaacggctcagacgggatgttcaagtacgaagagattgtgttagaacggggaaacagcggactcgggttctcgatcgcgggaggcatcgacaatcctcatgtgcctgacgatccaggcatttttattactaagattattcctggtggggcagctgcaatggacggtcgtttgggagtaaacgattgcgttctgcgagtgaacgaggtggatgtttccgaggtggttcactcaagggccgtggaggctctgaaagaggcaggtcctgttgtgaggctggtcgtcagacggcgacagcctcctcctgagacaatcatggaggtaaacttgttaaagggccctaagggattggggttttctattgctggaggaatcggaaatcaacatatcccaggtgataacagcatttatattactaaaataatcgagggaggcgcagcccagaaagatggacgcctgcagattggtgataggctgctggccgtcaacaataccaacctgcaagacgtgaggcacgaggaagcggtggcaagcttaaagaacacctcggacatggtgtacctcaaggtagcaaagccaggttcactgcacctaaatgacatgtacgctccacccgactacgccagtaccttcactgcactggcagacaatcatattagccacaactcaagtttgggatatctgggcgcagtagagtccaaggtgagctaccccgcacccccacaagtcccgcctacccgatattcacccattcccaggcacatgctcgccgaagaagacttcacacgggaacctcgtaagattattctgcacaaggggtctacaggccttggatttaatatcgtgggaggggaagatggagaaggaatctttgtaagcttcatcctcgcgggagggcctgctgacctgagcggtgaactccggcgaggcgacagaattttgagcgtgaacggagtgaacttaagaaatgccactcatgaacaggccgcagccgctcttaagcgggctggccaaagtgtgaccatcgtcgctcagtatcgtcccgaagaatatagcaggttcgagtcaaaaatccacgacctgcgagaacagatgatgaattctagcatgagcagtggttctgggagccttcgcacttccgaaaaaaggtctctgtatgtgcgcgctttgtttgattatgacagaacacgcgattcttgtctgccaagccaaggcctctcttttagctatggcgacatcctccatgtgattaatgccagtgacgatgagtggtggcaggccagactcgtgacgccacatggggagtcagaacagattggtgtgatcccttccaagaagagggtggaaaaaaaagaacgcgcaaggctgaagacagtaaaatttcacgcgcgtactggcatgattgaatcaaatcgggattttccagggttatcagacgactactacggagccaagaacctaaagggacaagaagacgctattctgtcgtatgaacctgtgacccgacaggagattcactatgcgagaccagtaatcatcttgggacctatgaaagatcgcgtcaacgacgacctcatcagcgaattcccccacaaatttggctcctgcgtaccccacacaaccaggccacgaagagacaatgaagttgatggccaggactatcacttcgtcgttagccgggagcagatggagaaagatattcaggacaataaattcatcgaagccggacagtttaatgacaatctctacggtaccagtatccagagtgtccgggctgtggccgagcgcggtaagcactgtatcctggatgtttcagggaacgctatcaaacgtctccagcaagcacagttgtacccgatagcaatctttatcaagcccaaatcaatcgaagccctgatggagatgaatcgacgtcaaacctatgagcaggccaataagatctatgacaaggccatgaaactggagcaagagtttggggagtacttcaccgctattgtgcagggcgatagtctggaggagatttacaataagattaaacagatcatcgaggaccagtccggacactacatctgggtaccatcaccagaaaagttgtag

SEQ ID NO: 207642 - DNA, 2454 bp, Artificial Sequence
  derived and/or modified sequence
atgcacaagcaccagcactgctgcaagtgccccgagtgctacgaggtgaccagactggccgccctgagaagactggagccccccggctacggcgactggcaggtgcccgacccctacggccccggcggcggcaacggcgccagcgccggctacggcggctacagcagccagaccctgcccagccaggccggcgccacccccacccccagaaccaaggccaagctgatccccaccggcagagacgtgggccccgtgccccccaagcccgtgcccggcaagagcacccccaagctgaacggcagcggccccagctggtggcccgagtgcacctgcaccaacagagactggtacgagcaggtgaacggcagcgacggcatgttcaagtacgaggagatcgtgctggagagaggcaacagcggcctgggcttcagcatcgccggcggcatcgacaacccccacgtgcccgacgaccccggcatcttcatcaccaagatcatccccggcggcgccgccgccatggacggcagactgggcgtgaacgactgcgtgctgagagtgaacgaggtggacgtgagcgaggtggtgcacagcagagccgtggaggccctgaaggaggccggccccgtggtgagactggtggtgagaagaagacagcccccccccgagaccatcatggaggtgaacctgctgaagggccccaagggcctgggcttcagcatcgccggcggcatcggcaaccagcacatccccggcgacaacagcatctacatcaccaagatcatcgagggcggcgccgcccagaaggacggcagactgcagatcggcgacagactgctggccgtgaacaacaccaacctgcaggacgtgagacacgaggaggccgtggccagcctgaagaacaccagcgacatggtgtacctgaaggtggccaagcccggcagcctgcacctgaacgacatgtacgccccccccgactacgccagcaccttcaccgccctggccgacaaccacatcagccacaacagcagcctgggctacctgggcgccgtggagagcaaggtgagctaccccgcccccccccaggtgccccccaccagatacagccccatccccagacacatgctggccgaggaggacttcaccagagagcccagaaagatcatcctgcacaagggcagcaccggcctgggcttcaacatcgtgggcggcgaggacggcgagggcatcttcgtgagcttcatcctggccggcggccccgccgacctgagcggcgagctgagaagaggcgacagaatcctgagcgtgaacggcgtgaacctgagaaacgccacccacgagcaggccgccgccgccctgaagagagccggccagagcgtgaccatcgtggcccagtacagacccgaggagtacagcagattcgagagcaagatccacgacctgagagagcagatgatgaacagcagcatgagcagcggcagcggcagcctgagaaccagcgagaagagaagcctgtacgtgagagccctgttcgactacgacagaaccagagacagctgcctgcccagccagggcctgagcttcagctacggcgacatcctgcacgtgatcaacgccagcgacgacgagtggtggcaggccagactggtgaccccccacggcgagagcgagcagatcggcgtgatccccagcaagaagagagtggagaagaaggagagagccagactgaagaccgtgaagttccacgccagaaccggcatgatcgagagcaacagagacttccccggcctgagcgacgactactacggcgccaagaacctgaagggccaggaggacgccatcctgagctacgagcccgtgaccagacaggagatccactacgccagacccgtgatcatcctgggccccatgaaggacagagtgaacgacgacctgatcagcgagttcccccacaagttcggcagctgcgtgccccacaccaccagacccagaagagacaacgaggtggacggccaggactaccacttcgtggtgagcagagagcagatggagaaggacatccaggacaacaagttcatcgaggccggccagttcaacgacaacctgtacggcaccagcatccagagcgtgagagccgtggccgagagaggcaagcactgcatcctggacgtgagcggcaacgccatcaagagactgcagcaggcccagctgtaccccatcgccatcttcatcaagcccaagagcatcgaggccctgatggagatgaacagaagacagacctacgagcaggccaacaagatctacgacaaggccatgaagctggagcaggagttcggcgagtacttcaccgccatcgtgcagggcgacagcctggaggagatctacaacaagatcaagcagatcatcgaggaccagagcggccactacatctgggtgcccagccccgagaagctgtag

SEQ ID NO: 207643 - DNA, 5905 bp, Artificial Sequence
  derived and/or modified sequence
tgctggagggggagccgtgggtgcggggcagcgtgggggccgaggccccgggacgcccgcccggccccaggccccgctcagcccgggcgcccccacgggtgccccccccttcttggtccgagcagtgtgagtgtgccagggagcccggcggcggcggcggcggtggtggcggcggtggcggcggcgtggaatccggcgtgggctggggggtccgagccgcggggggcagtgccatgcacaagcaccagcactgctgtaagtgccctgagtgctatgaggtgacccgcctggccgccctgcggcgcctcgagcctccgggctacggcgactggcaagtccccgacccttacgggccaggtgggggcaacggcgccagcgcgggttatgggggctacagctcgcagaccttgccctcgcaggcgggggccacccccacccctcgcaccaaggccaagctcatccccaccggccgggatgtggggccggtgcctcctaagccagtcccgggcaagagcacccccaaactcaacggcagcggccccagctggtggccagagtgcacctgtaccaaccgggactggtatgagcaggtgaatggcagtgatggcatgttcaaatatgaggaaatcgtacttgagaggggcaactctggcctgggcttcagtatcgcaggtggcatcgacaatccccatgtccctgatgaccctggcatctttattaccaagattatccctggtggagcagctgccatggatgggaggctgggggtgaatgactgtgtgctgcgggtgaatgaggtggacgtgtcggaggtggtacacagccgggcggtggaggcgctgaaggaggcaggccctgtggtgcgattggtggtgcggaggcgacagcctccacccgagaccatcatggaggtcaacctgctcaaagggcccaaaggcctgggtttcagcattgctgggggtattggcaaccagcacatcccaggagacaacagcatctacatcaccaagatcattgaggggggtgctgctcagaaggatggacgcctacagattggggaccggctgctggcggtgaacaacaccaatctgcaggatgtgaggcacgaggaagctgtggcctcactgaagaacacatctgatatggtgtatttgaaggtggccaagccaggcagcctccacctcaacgacatgtacgctccccctgactacgccagcacttttactgccttggctgacaaccacataagccataattccagcctgggttatctcggggctgtggagagcaaggtcagctaccctgctcctcctcaggttccccccacccgctactctcctattcccaggcacatgctggctgaggaggacttcaccagagagcctcgcaagatcatcctgcacaaaggctccacaggcctgggcttcaacatcgtaggaggagaggatggagaaggcatttttgtctccttcatcctggcaggaggcccagctgacctgagtggggagctgcgcaggggagaccggatcttatcggtgaatggagtgaatctgaggaatgcaactcatgagcaggctgcagctgctctgaaacgggccggccagtcagtcaccattgtggcccagtacagacctgaagaatacagtcgctttgaatcgaagatacatgacttacgagaacaaatgatgaacagcagcatgagctctgggtctgggtccctccgaacaagtgaaaagaggtccttgtatgtcagggccctgtttgattatgatcggactcgggacagctgcctgccaagccaggggctcagcttctcttatggtgacattctgcatgtcattaatgcctctgatgatgagtggtggcaggcaaggctggtgaccccacacggagaaagtgagcagatcggtgtgatccccagtaagaagagggtggaaaagaaagaaagagctcgattgaaaactgtgaagttccatgccaggacggggatgattgagtctaacagggacttcccggggttaagtgacgattattatggagcaaagaacctgaaaggacaagaggatgctattttgtcatatgagccagtgacacggcaagaaattcactatgcaaggcctgtgatcatcctgggcccaatgaaggaccgagtcaatgatgacctgatctccgaatttccacataaatttggatcctgtgtgccacatactacccggcctcgacgtgataatgaggtggatggacaagactaccactttgtggtgtcccgagaacaaatggagaaagatattcaggacaacaagttcatcgaggcgggccaatttaatgataacctctatgggaccagcatccagtcagtgcgggcagttgcagagaggggcaagcactgcatcttagatgtttccggcaatgctatcaagagactgcagcaagcacaactttaccccattgccattttcatcaagcccaagtccattgaagcccttatggaaatgaaccgaaggcagacatatgaacaagcaaataagatctatgacaaagccatgaaactggagcaggaatttggagagtactttacagccattgtacagggtgactcactggaagagatttataacaaaatcaaacaaatcattgaggaccagtctgggcactacatttgggtcccatcccctgaaaaactctgaagaatcccctccaaccattctcttgtgaacagaagaaatcaagtccctcttccctcctccctcttcattcctgtccccatggggagaacaaatgctactgttcttgtccccttttttagatatgtcaaaaaaaattaagttttctagtcctgttctttttttttttttaagtttttgtttgtttcagtttattttttgggatgatgccatctcattcatcatgtgactgtgcccattcctgcatggacctttcccaagcgctagcacaggtgcaaaatccatcagagccattgttttcataaaaaccaagcagaagtgaagagaaaagaggaggactgatggaaagacagactctggacagctgcacggcttgtgaagtgagctaaatgcaccacatgatgagatgctcctgggcatttctccctatctgtactgctgtcttgcagctctgaacggtgcaacgtaatggcgacagaaagtatcttatttatatatagatatatatatgtaatttatataaaatatatagaaattattatatatatatattatacactctcatataatatatatatattcacacacatttgggttagaaaatctatggagacttcatcaatggtactatgttattagagaaatgctttaattttcatattccaatcagatggcatcttctatcccagctggttgggaagggattgaagatggtagcaagtgctgcactaagggcactcgcatttggtcattctcttgagagctaggaggggtcagcctgaggccggagaggaagggcttttgcctggggtgagagggtgagagacttgacctgaaagcagctgctgcccctgaggtgcagccagagtcctgtgtgcggacagagagaatggctaatgatgctccgcgtggaattgcctattgttttatgccacctgatgtgtctgcatgagaggtttcctttttgttcctttttaagctgctgttaaaccaaaaccatgttgtgctactgtgtcagccttttcattattgcaaattttacttttactatttaagtgaatgcatagaatccaatttgccaaggttctaaaggcttatgaggtcctgaaggagccaggccttgtgatggagtaggtgacacaggcctggttgtcctgtcagcagaagggaaagcaggggctgggctgagaggaggacacggagggctctgctgaggttccttcctgggttccaccaacagggacagggagtcacttgccttccagttctgtgctgggatggcgggacagcacttggcttgcttggccagctgcgtcatgagtttgatttggtttttttttttttgcagctgcttcatatgctctgctccagcccctccccaacagctggtagcttatggtttcttcaagaggaaagtagactttatgctgtacatttgagctgtagagctaagattcgcttactggtgagctgtgaaaccttgttgctttttcccagagtctgatggcagtgactgtgatcaagggaatcttcaccgccacaagtgcaggcagcaggtgtggttcaggtccccccccaccccactgtgctcctttgaagccaacgtgcctccctcgcctccatactggagggacgacgcaggggagaacagagaagtgcttggccctaggattgaggcacttgtttcctagcccgctgggttagggctggtgcaagcgaggcaatgttgaggatgctttaagcactaccagccgaatccgggaactctgttaacagttgtccaaccagcagaatgaggctaactgtataaagcatgggacccaggatgaggataaggaaaggacagcggctttccctgggcagtacaatggcttgaaggcaaaaagggataaagtgacagccgactgtgactctggtgaggaggggtgagcagggaggttgattctctgatgttaactaagtggcaaagtctcaaccgtgctcagccctccccctcccagggaagagaaacaaagattcaaagtaagcatgatactagtgggtttaccagtgtttcttccaaggagacatatattttttaataaacgatagttgcaatgaactgtggctcagagaccttcttaaagtagttgagaagggagggcgtgggcaaagcagtgggaagaacatcccaaacttttgggggccagagggctctctccttagtgatgatcagctagccgagctgggccgtcctggggatcggtacagctccctggggtggtgacaggccctttgtgaaagttgtgtgcttggtcttccaccccagccccagacactgcttcaaatagcaccaaccagatgggagtccacatctgtggtggcaaaatgctgacattttcccaagaggtacacaaggtgggagaggcctgctgtagcagaggtgtgtgttagagaaagcaggggcctgatttagtagcagagaactgggtgagaaaaatggccagagaaagtgacctgccagctaccagtgtttccgaaaatgagggtgggatgggcccatttgcagagcaggacagcagtcatccccatagccctctgaggaggggagggatgcttagagcaggcagttctggcagttctgacgtggcaggtgccattgcaacttgtgcggaggagtcttaggaagtgctgtcataattcataaggtcaagagcaacatctggatgaatgagccacctgaaatgtgtgtgggctgagccacaggaagggtgagtcctcttgcttgtggtgctttatggtgtgcaggttgcttgctttcccacattctctcatttgcttgaaggcagcctaacaaaagggagtccccaaagagctccatgagagcttaagaaaattcatctcctgaggacaaagagaacaaagatctgtcctgtggtcacactgttgaggctctgtcttcacagctgatgttctcctagtggaggtacagctgaagaacattcagccccagcacgagaagatacagagcaacttggaaaccccaaagggagacacacccttaacactgccgtgctgtgctgtgccgtgtcctgaaggaggagagagccctatctcctcctggttttgttgctgacattgcagctgatcatgccttgactccttcatctctaacagaggaagaactgtattatcaaaccttatggtctacccatgaataaataaaatatttgttcaagcac

SEQ ID NO: 207644 - protein, 297 aa, Artificial Sequence
  derived and/or modified sequence
MASPQLCRALVSAQWVAEALRAPRAGQPLQLLDASWYLPKLGRDARREFEERHIPGAAFFDIDQCSDRTSPYDHMLPGAEHFAEYAGRLGVGAATHVVIYDASDQGLYSAPRVWWMFRAFGHHAVSLLDGGLRHWLRQNLPLSSGKSQPAPAEFRAQLDPAFIKTYEDIKENLESRRFQVVDSRATGRFRGTEPEPRDGIEPGHIPGTVNIPFTDFLSQEGLEKSPEEIRHLFQEKKVDLSKPLVATCGSGVTACHVALGAYLCGKPDVPIYDGSWVEWYMRARPEDVISEGRGKTH

SEQ ID NO: 207645 - protein, 317 aa, Artificial Sequence
  derived and/or modified sequence
MAEPGSRESETRARSPSVAAMASPQLCRALVSAQWVAEALRAPRAGQPLQLLDASWYLPKLGRDARREFEERHIPGAAFFDIDQCSDRTSPYDHMLPGAEHFAEYAGRLGVGAATHVVIYDASDQGLYSAPRVWWMFRAFGHHAVSLLDGGLRHWLRQNLPLSSGKSQPAPAEFRAQLDPAFIKTYEDIKENLESRRFQVVDSRATGRFRGTEPEPRDGIEPGHIPGTVNIPFTDFLSQEGLEKSPEEIRHLFQEKKVDLSKPLVATCGSGVTACHVALGAYLCGKPDVPIYDGSWVEWYMRARPEDVISEGRGKTH

SEQ ID NO: 207646 - protein, 245 aa, Artificial Sequence
  derived and/or modified sequence
MASPQLCRALVSAQWVAEALRAPRAGQPLQLLDASWYLPKLGRDARREFEERHIPGAAFFDIDQCSDRTSPYDHMLPGAEHFAEYAGRLGVGAATHVVIYDASDQGLYSAPRVWWMFRAFGHHAVSLLDGGLRHWLRQNLPLSSGKSQPAPAEFRAQLDPAFIKTYEDIKENLESRRFQVVDSRATGRFRGTEPEPPAVGIEPGHIPGTVNIPFTDFLSQDGSWVEWYMRARPEDVISEGRGKTH

SEQ ID NO: 207647 - DNA, 954 bp, Artificial Sequence
  derived and/or modified sequence
atggcagagcccggatctcgcgaatcagaaaccagagctagatctccatccgtagctgcgatggccagcccacaattgtgccgcgctctggttagcgcccaatgggttgccgaggctctccgggcgcccagagccggccagcccctgcagctgctcgacgctagttggtacttgccaaaattggggagggacgcacgtcgagagttcgaagaaaggcacatacctggtgccgcctttttcgacattgaccagtgcagtgatcgaacctctccctatgaccatatgctacccggggctgagcactttgccgagtatgctggccgtcttggagtgggagctgcaacccatgtggtcatttacgatgcaagcgatcaaggtctgtactcagcaccccgcgtgtggtggatgttcagggccttcggacaccatgcagttagtctcctcgacggcggtctgcgccactggctaagacagaacttgccattatctagtgggaaaagtcagccagcccccgcagaatttagggcccaacttgatcctgccttcatcaaaacctatgaagacatcaaagagaaccttgaatccagacgcttccaagtcgtcgatagcagagctacgggccggtttaggggcactgagccggagccaagggatggcattgagccaggccacatacctggaacggttaacatacctttcaccgattttctgtcacaggaaggcttggagaaatcacctgaagagatccgccatctattccaggaaaagaaagtggatctttccaagcctttagtcgcgacctgtggatccggcgttacagcatgccatgttgccttaggggcctacctctgcggtaagccagacgtgcccatctatgacgggtcatgggtggaatggtacatgagagcaaggcctgaagatgttatttcagagggtcgcggcaagacccactag

SEQ ID NO: 207648 - DNA, 954 bp, Artificial Sequence
  derived and/or modified sequence
atggccgagcccggcagccgggagagcgagacccgggcccggagccccagcgtggccgccatggccagcccccagctgtgccgggccctggtgtctgcccagtgggtggccgaggccctgcgggcccccagggctggccagcccctgcagctgctggatgcctcctggtacctgcccaagctgggcagagatgcccggcgggagtttgaggagcggcacatccctggagctgccttctttgacatcgaccagtgcagcgacaggaccagcccctatgaccacatgctgcctggagctgagcactttgctgaatatgccggccgcctgggcgtgggcgccgccacccacgtggtgatctatgatgccagtgaccagggcctgtacagcgccccccgggtgtggtggatgttccgggccttcggccaccacgctgtgtccctgctggatggcggcctgcggcactggctgcggcagaacctgcccctgagcagcggcaagagccagcctgccccagctgagttccgggcccagctggaccctgccttcatcaagacctatgaggacatcaaggagaacctggagagccgccgcttccaggtggtggacagccgggccaccggccgcttccggggcacagagcctgagcccagagatggcatcgagcccggccacatccctggcaccgtgaacatccccttcacagacttcctgagccaggagggcctggagaagagccctgaggagatccgccacctgttccaggagaagaaggtggacctgagcaagcccctggtggccacctgtggcagcggcgtgacagcctgccacgtggccctgggcgcctacctgtgtgggaagccagatgtgcccatctatgatggctcctgggtggagtggtacatgagggcccggccagaagatgtgatcagcgagggccggggcaagacccactag

SEQ ID NO: 207649 - DNA, 1504 bp, Artificial Sequence
  derived and/or modified sequence
gctgcaggttggtggcgggaggaggggacagctgcgggcgcggggagggggcgccgcgccgcgggggccatggcggagccaggaagccgggagtccgagacccgggtcgccaatataaatgcttgatgagtgaatgaatgacttccgtctgggacttggttgcaaataaagccgagctgcatcttagggaggggtggagactttgcccctgtttgtgccttgaagccagcagggccttgccctaggatacctccacccaccctcctgcccagcaagtggaggcccgcagcccgagtgtcgccgccatggcttcgccgcagctctgccgcgcgctggtgtcggcgcaatgggtggcggaggcgctgcgggccccgcgcgctgggcagcctctgcagctgctggacgcctcctggtacctgccgaagctggggcgcgacgcgcgacgcgagttcgaggagcgccacatcccgggcgccgctttcttcgacatcgaccagtgcagcgaccgcacctcgccctacgaccacatgctgcccggggccgagcatttcgcggagtacgcaggccgcctgggcgtgggcgcggccacccacgtcgtgatctacgacgccagcgaccagggcctctactccgccccgcgcgtctggtggatgttccgcgccttcggccaccacgccgtgtcactgcttgatggcggcctccgccactggctgcgccagaacctcccgctcagctccggcaagagccaacctgctcccgccgagttccgcgctcagctcgaccccgccttcatcaagacctacgaggacatcaaggagaacctggaatcccggcgcttccaggtggtggactcccgagccactggcaggttccgcggcaccgagcccgagccccgagacggcattgaacctggccacatcccaggtaccgtgaacatccccttcacagacttcctgagccaggaggggctggagaagagccctgaggagatccgccatctgttccaggagaagaaagtggacctgtctaagccactggtggccacgtgtggctctggcgtcacagcctgccacgtggcactaggggcctacctctgcggcaagccagacgtgcccatctacgatggctcctgggtggagtggtacatgcgcgcccggcccgaggatgtcatctcagagggccgggggaagacccactgaagctgggcaggacacaggcgagctcaggtgatgccggccaccagcaatgcctggcctggtagctccgcttctgctttcaccaagagagtgtttcttcactcaactcaggtggcatttggggtgacatctcaaaggccaggaattccgttgacttgttggctgccagtaggggcgggaggaaaggcggaggcgagccctggaggagggaggccacaactccgagctgcccacctggtgctgagctggggccccgcctcctttctgttttatttttgaggaaataaaataaccaagtgctaaatctt

SEQ ID NO: 207650 - DNA, 1437 bp, Artificial Sequence
  derived and/or modified sequence
gggcggagcgggcgtacccccacggcccggccagtggaaggcgcgggcagcagcggctccgagtggccgcggcggtgggctgtgccggagtctcctccctttggtccgctgcaggttggtggcgggaggaggggacagctgcgggcgcggggagggggcgccgcgccgcgggggccatggcggagccaggaagccgggagtccgagacccgggcccgcagcccgagtgtcgccgccatggcttcgccgcagctctgccgcgcgctggtgtcggcgcaatgggtggcggaggcgctgcgggccccgcgcgctgggcagcctctgcagctgctggacgcctcctggtacctgccgaagctggggcgcgacgcgcgacgcgagttcgaggagcgccacatcccgggcgccgctttcttcgacatcgaccagtgcagcgaccgcacctcgccctacgaccacatgctgcccggggccgagcatttcgcggagtacgcaggccgcctgggcgtgggcgcggccacccacgtcgtgatctacgacgccagcgaccagggcctctactccgccccgcgcgtctggtggatgttccgcgccttcggccaccacgccgtgtcactgcttgatggcggcctccgccactggctgcgccagaacctcccgctcagctccggcaagagccaacctgctcccgccgagttccgcgctcagctcgaccccgccttcatcaagacctacgaggacatcaaggagaacctggaatcccggcgcttccaggtggtggactcccgagccactggcaggttccgcggcaccgagcccgagccccgagacggcattgaacctggccacatcccaggtaccgtgaacatccccttcacagacttcctgagccaggaggggctggagaagagccctgaggagatccgccatctgttccaggagaagaaagtggacctgtctaagccactggtggccacgtgtggctctggcgtcacagcctgccacgtggcactaggggcctacctctgcggcaagccagacgtgcccatctacgatggctcctgggtggagtggtacatgcgcgcccggcccgaggatgtcatctcagagggccgggggaagacccactgaagctgggcaggacacaggcgagctcaggtgatgccggccaccagcaatgcctggcctggtagctccgcttctgctttcaccaagagagtgtttcttcactcaactcaggtggcatttggggtgacatctcaaaggccaggaattccgttgacttgttggctgccagtaggggcgggaggaaaggcggaggcgagccctggaggagggaggccacaactccgagctgcccacctggtgctgagctggggccccgcctcctttctgttttatttttgaggaaataaaataaccaagtgctaaatcttgt

SEQ ID NO: 207651 - DNA, 2116 bp, Artificial Sequence
  derived and/or modified sequence
ctctggtatgcaggaaagatagagaggagagggagggaggtgcgaagtcactgttgctgctgctagaagggccagagagagcccaggctggacaggcaaaacctggcctcgccagactcctggagcctgcacagagtgtgtgtctgagaagtccggattctggtgccagactgactgcctagtgagaagcctggcaccgccgggtcaggctagtgcactttttcttgtttgttttttgtttttgagacagagttttgctcttgttccccaggctggattgcaatggcacgatctcggctcactgcaacctccgcctcctgggttcaagcagttctcctgcctcagcctcccgagtagctgggattacaggtgccctccactaagcccggctaattttttgtatttttggtagagacggggtttcaccatgttggccagactggtttcaaacttctgacctcaggtgatccacctgcctgggcctcccaaagtgctgggattacaagcgtgagccaccgcaccaggccaggttagtgcacttctgtgagcctgagtgtcctccttgaaacggtgacaataatataccaggcctcttaagatcactcattcaacacatactggagagtctactgtgtcaggcattgttctaggatattgttaggattcagtggtacccagcaaggactcagtaaattccagctactgttcctattaggtcgccaatataaatgcttgatgagtgaatgaatgacttccgtctgggacttggttgcaaataaagccgagctgcatcttagggaggggtggagactttgcccctgtttgtgccttgaagccagcagggccttgccctaggatacctccacccaccctcctgcccagcaagtggaggcccgcagcccgagtgtcgccgccatggcttcgccgcagctctgccgcgcgctggtgtcggcgcaatgggtggcggaggcgctgcgggccccgcgcgctgggcagcctctgcagctgctggacgcctcctggtacctgccgaagctggggcgcgacgcgcgacgcgagttcgaggagcgccacatcccgggcgccgctttcttcgacatcgaccagtgcagcgaccgcacctcgccctacgaccacatgctgcccggggccgagcatttcgcggagtacgcaggccgcctgggcgtgggcgcggccacccacgtcgtgatctacgacgccagcgaccagggcctctactccgccccgcgcgtctggtggatgttccgcgccttcggccaccacgccgtgtcactgcttgatggcggcctccgccactggctgcgccagaacctcccgctcagctccggcaagagccaacctgctcccgccgagttccgcgctcagctcgaccccgccttcatcaagacctacgaggacatcaaggagaacctggaatcccggcgcttccaggtggtggactcccgagccactggcaggttccgcggcaccgagcccgagccccgagacggcattgaacctggccacatcccaggtaccgtgaacatccccttcacagacttcctgagccaggaggggctggagaagagccctgaggagatccgccatctgttccaggagaagaaagtggacctgtctaagccactggtggccacgtgtggctctggcgtcacagcctgccacgtggcactaggggcctacctctgcggcaagccagacgtgcccatctacgatggctcctgggtggagtggtacatgcgcgcccggcccgaggatgtcatctcagagggccgggggaagacccactgaagctgggcaggacacaggcgagctcaggtgatgccggccaccagcaatgcctggcctggtagctccgcttctgctttcaccaagagagtgtttcttcactcaactcaggtggcatttggggtgacatctcaaaggccaggaattccgttgacttgttggctgccagtaggggcgggaggaaaggcggaggcgagccctggaggagggaggccacaactccgagctgcccacctggtgctgagctggggccccgcctcctttctgttttatttttgaggaaataaaataaccaagtgctaaatcttgt

SEQ ID NO: 207652 - DNA, 1345 bp, Artificial Sequence
  derived and/or modified sequence
gcgcgggggccgcgcgggcctgggctgggcggagcgggcgtacccccacggcccggccagtggaaggcgcgggcagcagcggctccgagtggccgcggcggtgggctgtgccggagtctcctccctttggtccgctgcaggcccgcagcccgagtgtcgccgccatggcttcgccgcagctctgccgcgcgctggtgtcggcgcaatgggtggcggaggcgctgcgggccccgcgcgctgggcagcctctgcagctgctggacgcctcctggtacctgccgaagctggggcgcgacgcgcgacgcgagttcgaggagcgccacatcccgggcgccgctttcttcgacatcgaccagtgcagcgaccgcacctcgccctacgaccacatgctgcccggggccgagcatttcgcggagtacgcaggccgcctgggcgtgggcgcggccacccacgtcgtgatctacgacgccagcgaccagggcctctactccgccccgcgcgtctggtggatgttccgcgccttcggccaccacgccgtgtcactgcttgatggcggcctccgccactggctgcgccagaacctcccgctcagctccggcaagagccaacctgctcccgccgagttccgcgctcagctcgaccccgccttcatcaagacctacgaggacatcaaggagaacctggaatcccggcgcttccaggtggtggactcccgagccactggcaggttccgcggcaccgagcccgagccccgagacggcattgaacctggccacatcccaggtaccgtgaacatccccttcacagacttcctgagccaggaggggctggagaagagccctgaggagatccgccatctgttccaggagaagaaagtggacctgtctaagccactggtggccacgtgtggctctggcgtcacagcctgccacgtggcactaggggcctacctctgcggcaagccagacgtgcccatctacgatggctcctgggtggagtggtacatgcgcgcccggcccgaggatgtcatctcagagggccgggggaagacccactgaagctgggcaggacacaggcgagctcaggtgatgccggccaccagcaatgcctggcctggtagctccgcttctgctttcaccaagagagtgtttcttcactcaactcaggtggcatttggggtgacatctcaaaggccaggaattccgttgacttgttggctgccagtaggggcgggaggaaaggcggaggcgagccctggaggagggaggccacaactccgagctgcccacctggtgctgagctggggccccgcctcctttctgttttatttttgaggaaataaaat

SEQ ID NO: 207653 - DNA, 1453 bp, Artificial Sequence
  derived and/or modified sequence
ggaaggcgcgggcagcagcggctccgagtggccgcggcggtgggctgtgccggagtctcctccctttggtccgctgcaggtcgccaatataaatgcttgatgagtgaatgaatgacttccgtctgggacttggttgcaaataaagccgagctgcatcttagggaggggtggagactttgcccctgtttgtgccttgaagccagcagggccttgccctaggatacctccacccaccctcctgcccagcaagtggaggcccgcagcccgagtgtcgccgccatggcttcgccgcagctctgccgcgcgctggtgtcggcgcaatgggtggcggaggcgctgcgggccccgcgcgctgggcagcctctgcagctgctggacgcctcctggtacctgccgaagctggggcgcgacgcgcgacgcgagttcgaggagcgccacatcccgggcgccgctttcttcgacatcgaccagtgcagcgaccgcacctcgccctacgaccacatgctgcccggggccgagcatttcgcggagtacgcaggccgcctgggcgtgggcgcggccacccacgtcgtgatctacgacgccagcgaccagggcctctactccgccccgcgcgtctggtggatgttccgcgccttcggccaccacgccgtgtcactgcttgatggcggcctccgccactggctgcgccagaacctcccgctcagctccggcaagagccaacctgctcccgccgagttccgcgctcagctcgaccccgccttcatcaagacctacgaggacatcaaggagaacctggaatcccggcgcttccaggtggtggactcccgagccactggcaggttccgcggcaccgagcccgagccccgagacggcattgaacctggccacatcccaggtaccgtgaacatccccttcacagacttcctgagccaggaggggctggagaagagccctgaggagatccgccatctgttccaggagaagaaagtggacctgtctaagccactggtggccacgtgtggctctggcgtcacagcctgccacgtggcactaggggcctacctctgcggcaagccagacgtgcccatctacgatggctcctgggtggagtggtacatgcgcgcccggcccgaggatgtcatctcagagggccgggggaagacccactgaagctgggcaggacacaggcgagctcaggtgatgccggccaccagcaatgcctggcctggtagctccgcttctgctttcaccaagagagtgtttcttcactcaactcaggtggcatttggggtgacatctcaaaggccaggaattccgttgacttgttggctgccagtaggggcgggaggaaaggcggaggcgagccctggaggagggaggccacaactccgagctgcccacctggtgctgagctggggccccgcctcctttctgttttatttttgaggaa

SEQ ID NO: 207654 - DNA, 1331 bp, Artificial Sequence
  derived and/or modified sequence
gctgcaggttggtggcgggaggaggggacagctgcgggcgcggggagggggcgccgcgccgcgggggccatggcggagccaggaagccgggagtccgagacccgggcccgcagcccgagtgtcgccgccatggcttcgccgcagctctgccgcgcgctggtgtcggcgcaatgggtggcggaggcgctgcgggccccgcgcgctgggcagcctctgcagctgctggacgcctcctggtacctgccgaagctggggcgcgacgcgcgacgcgagttcgaggagcgccacatcccgggcgccgctttcttcgacatcgaccagtgcagcgaccgcacctcgccctacgaccacatgctgcccggggccgagcatttcgcggagtacgcaggccgcctgggcgtgggcgcggccacccacgtcgtgatctacgacgccagcgaccagggcctctactccgccccgcgcgtctggtggatgttccgcgccttcggccaccacgccgtgtcactgcttgatggcggcctccgccactggctgcgccagaacctcccgctcagctccggcaagagccaacctgctcccgccgagttccgcgctcagctcgaccccgccttcatcaagacctacgaggacatcaaggagaacctggaatcccggcgcttccaggtggtggactcccgagccactggcaggttccgcggcaccgagcccgagccccgagacggcattgaacctggccacatcccaggtaccgtgaacatccccttcacagacttcctgagccaggaggggctggagaagagccctgaggagatccgccatctgttccaggagaagaaagtggacctgtctaagccactggtggccacgtgtggctctggcgtcacagcctgccacgtggcactaggggcctacctctgcggcaagccagacgtgcccatctacgatggctcctgggtggagtggtacatgcgcgcccggcccgaggatgtcatctcagagggccgggggaagacccactgaagctgggcaggacacaggcgagctcaggtgatgccggccaccagcaatgcctggcctggtagctccgcttctgctttcaccaagagagtgtttcttcactcaactcaggtggcatttggggtgacatctcaaaggccaggaattccgttgacttgttggctgccagtaggggcgggaggaaaggcggaggcgagccctggaggagggaggccacaactccgagctgcccacctggtgctgagctggggccccgcctcctttctgttttatttttgaggaaataaaataaccaagtgctaaatcttgta

SEQ ID NO: 207655 - DNA, 954 bp, Artificial Sequence
  derived and/or modified sequence
atggccgagcccggcagccgggagagcgagacccgggcccggagccccagcgtggcagcgatggcctcccctcagctctgtcgggccctggtcagcgctcaatgggtggcagaagcactacgagcccctagggcaggccagcctctccagcttctggacgccagctggtacctgccaaaactcgggcgcgatgctcgccgtgagttcgaagagagacacatccccggcgcagcatttttcgacatagaccagtgctccgataggacatccccgtacgaccatatgctgcctggggcagaacacttcgctgagtacgcggggcggctcggcgtaggtgcggctacccacgtagtgatatacgacgcatcggaccagggactgtattcggcccccagagtgtggtggatgttcagagcgttcggtcaccacgctgtgagccttctggatgggggccttagacactggctgaggcagaatctgccgctgtcctctgggaagtcgcagcctgcccccgccgaattccgggcgcagctcgatccggcatttattaaaacctacgaggacatcaaagagaatctcgagtcccgccgctttcaagttgtcgatagccgggccaccggcaggttccgggggacggaacctgagcctcgtgatggcatagaaccagggcacatcccaggaactgtgaatatccctttcaccgatttccttagccaggaaggcctggagaagtcgccggaggagatcaggcatctgttccaggagaagaaagttgacctttccaagcctctggtggccacgtgtggttcgggcgtcacggcttgccacgtggccctgggagcgtacctgtgcggcaagccggacgttcctatttacgatggctcatgggttgagtggtacatgagagcaaggcccgaggacgtgatcagtgagggaagaggcaaaacacattag

SEQ ID NO: 207656 - DNA, 954 bp, Artificial Sequence
  derived and/or modified sequence
atggctgaacccggttctagagagagcgagaccagagcccgttctccctcggtggccgctatggcctctccgcagttgtgtagggccctcgtcagtgcacaatgggtggctgaggctttgagggcgccaagggccggtcaaccactgcaactcctagatgccagctggtacctgccgaagcttgggagagacgcacggcgagagttcgaagagagacatatacctggggcagcttttttcgatattgatcagtgctcagacaggacttcaccctatgatcatatgttacctggagctgaacacttcgctgaatatgccggaaggctgggcgtgggggcagctacacacgttgtgatctatgatgcgagtgatcaggggctctattctgcccctcgcgtgtggtggatgttcagagccttcggacatcatgccgtgtctctactcgacggcggtctaaggcattggttgcgccagaacctgccactgagtagtggaaagagtcagccagcccctgcagagtttagagcccaactggaccctgcattcataaagacctatgaggacatcaaagagaatttggagtcaaggcgatttcaagtagtggactctagagccaccggacggttccggggaaccgagcctgagcccagagatgggatcgagccaggccacatccccggaaccgtcaatatacctttcacagactttctatcccaggaaggtctcgaaaaatctcccgaggaaattagacatctgttccaagaaaagaaagtggatttgtccaaacctttagtggcaacttgtggctcaggagtgaccgcctgccacgttgctctgggggcttatctgtgtggaaagcctgatgtgcctatctacgatggatcctgggtcgaatggtacatgcgcgcacgtccagaggacgtaatcagtgagggacgtggcaaaacgcactag

SEQ ID NO: 207657 - DNA, 954 bp, Artificial Sequence
  derived and/or modified sequence
atggccgagcccggcagcagagagagcgagaccagagccagaagccccagcgtggccgccatggccagcccccagctgtgcagagccctggtgagcgcccagtgggtggccgaggccctgagagcccccagagccggccagcccctgcagctgctggacgccagctggtacctgcccaagctgggcagagacgccagaagagagttcgaggagagacacatccccggcgccgccttcttcgacatcgaccagtgcagcgacagaaccagcccctacgaccacatgctgcccggcgccgagcacttcgccgagtacgccggcagactgggcgtgggcgccgccacccacgtggtgatctacgacgccagcgaccagggcctgtacagcgcccccagagtgtggtggatgttcagagccttcggccaccacgccgtgagcctgctggacggcggcctgagacactggctgagacagaacctgcccctgagcagcggcaagagccagcccgcccccgccgagttcagagcccagctggaccccgccttcatcaagacctacgaggacatcaaggagaacctggagagcagaagattccaggtggtggacagcagagccaccggcagattcagaggcaccgagcccgagcccagagacggcatcgagcccggccacatccccggcaccgtgaacatccccttcaccgacttcctgagccaggagggcctggagaagagccccgaggagatcagacacctgttccaggagaagaaggtggacctgagcaagcccctggtggccacctgcggcagcggcgtgaccgcctgccacgtggccctgggcgcctacctgtgcggcaagcccgacgtgcccatctacgacggcagctgggtggagtggtacatgagagccagacccgaggacgtgatcagcgagggcagaggcaagacccactag

SEQ ID NO: 207658 - protein, 136 aa, Artificial Sequence
  derived and/or modified sequence
MPGKKARKNAQPSPARAPAGPAGTAGTARDQAGFAIGMQLRFTRGKKLLSSSLSSSPLALPRGHEEQVQVAGSRVCYSTQEIWRQTELPAETSESDIQTLLLRNLTASKTCMRGLLQKSFLRRCTFHQFEERLHCN

SEQ ID NO: 207659 - protein, 54 aa, Artificial Sequence
  derived and/or modified sequence
MPGKKARKNAQPSPARAPAELEVECATQLRRFGDKLNFRQKLLNLISKLFCSGT

SEQ ID NO: 207660 - DNA, 411 bp, Artificial Sequence
  derived and/or modified sequence
atgccaggtaagaaagccagaaagaatgcccagccctcccccgcaagggcgcccgcaggccccgccggtacagctgggactgcccgcgaccaggccggatttgccataggcatgcagcttcggttcacacgcgggaagaagctactcagctcatccctttcatcaagccctttggccctgccaagggggcatgaggaacaggttcaggtagccggttctcgagtatgctactctactcaggagatatggcgccaaaccgagctcccggctgaaacgtccgaatctgatattcagactctccttcttcggaatctgaccgccagcaagacatgcatgcggggtctgctgcagaagagtttcctgcggagatgcacttttcaccagtttgaggaacgcttacactgcaactag

SEQ ID NO: 207661 - DNA, 165 bp, Artificial Sequence
  derived and/or modified sequence
atgccgggcaaaaaggccaggaaaaatgcccagccctccccggcaagagcgccagccgaacttgaagtcgagtgcgctacccagctgcggagattcggtgacaaattaaattttaggcaaaagctcctgaatttgatttcgaagctcttctgctcaggtacttag

SEQ ID NO: 207662 - DNA, 165 bp, Artificial Sequence
  derived and/or modified sequence
atgcctgggaagaaggccaggaagaatgcccagcccagccctgcccgggccccagctgagctggaggtggagtgtgccacccagctgcggagatttggagacaagctgaacttccggcagaagctgctgaacctgatcagcaagctgttctgcagcggcacctag

SEQ ID NO: 207663 - DNA, 411 bp, Artificial Sequence
  derived and/or modified sequence
atgcccggcaagaaggcccggaagaacgcccagcccagccccgcccgggcccccgctggccccgctgggacagccggcacagccagggatcaggctggctttgccatcggtatgcagctcaggtttacccgcggcaagaaactactgtctagctcactgtcctcctccccacttgccctacctcggggccatgaggagcaagttcaggttgcggggagccgggtatgctactccactcaggagatctggaggcagaccgagctcccggcagagacatcagagtctgacattcagactttgttgttacgcaaccttaccgctagtaagacgtgcatgagggggctattacagaaatcattcctgagaagatgtactttccatcagttcgaggaaaggctccattgcaactag

SEQ ID NO: 207664 - DNA, 165 bp, Artificial Sequence
  derived and/or modified sequence
atgcccggcaagaaggcccggaagaacgcccagcccagccccgcccgcgctccagccgagctagaagtagagtgcgctacccaactcaggaggtttggcgacaaattaaattttaggcaaaagctgctgaatctgatcagtaaactgttttgtagcggtacgtag

SEQ ID NO: 207665 - DNA, 411 bp, Artificial Sequence
  derived and/or modified sequence
atgcccggtaaaaaggctcgcaagaacgcacagccatctcctgcccgagctcctgcaggccctgctggcaccgcaggaaccgctcgcgatcaggcgggatttgccatcggcatgcagctccgctttacacggggaaaaaaactgctgtctagcagtttgagtagctctcctcttgcgctccctaggggtcatgaagagcaagttcaggttgctggatcacgcgtatgctacagtacacaggagatctggaggcagacagagctacccgctgagacgagcgagtccgatattcagacactacttctgaggaacctaaccgcatctaagacgtgcatgcgtggcttgctgcagaagagctttctgcggagatgcacattccatcaattcgaagagcgtttacattgtaattag

SEQ ID NO: 207666 - DNA, 165 bp, Artificial Sequence
  derived and/or modified sequence
atgcctggcaagaaagctagaaagaatgcacaacctagcccagccagggccccagcagagttagaggtcgagtgtgctactcagcttcgcaggtttggcgataagcttaacttccgccagaaactgctcaatttgatcagcaaactgttttgttccggcacttag

SEQ ID NO: 207667 - DNA, 1262 bp, Artificial Sequence
  derived and/or modified sequence
cgtgtgtagttggcatctccgcgcgtccggacacccgatcccagcatccctgcctgcaggactgttcgtgttcagctcgcgtcctgcagctgtccgaggtgctccagttggaggctgaggttcccgggctctgtagctgagtgggcggcggcaccggcggagatgcctgggaagaaggcgcgcaagaacgctcaaccgagccccgcgcgggctccagcaggaccggcgggtacggcgggtacggcgagggaccaagccggatttgcgattgggatgcagctgcgtttcaccaggggcaaaaagctcctttcctcctctctttcctcctcgccacttgcccttccccggggccacgaggaacaagtgcaagtagctggaagtcgagtgtgctactcaactcaggagatttggagacaaactgaacttccggcagaaacttctgaatctgatatccaaactcttctgctcaggaacctgactgcatcaaaaacttgcatgaggggactccttcaaaagagttttctcaggaggtgcacgtttcatcaatttgaagaaagactgcattgtaattgagaggaatgtgaaggtgcattcatgggtgcccttggaaacggaagatggaatacatcaaagtgaatttctgttcaagttttcccagattatcattctttgggatgagagaacattataaaaccactttgtttattttaaagcaagaatggaagacccttgaaaataaagaagtaattattgacacatttcttttttacttagagaatcgttctagtgtttttgccgaagattaccgctggcctactgtgaagggagatgacctgtgattagactgggcggctggggagaaacagttcagtgcattgttgttgttgctgtttttggtgttttgcttttcagtgccaactcagcacattgtatatgattcggtttatacatattaccttgttataatgaaaaaactcattctgagaacactgaaatgttatactcagtgttgatttcttcggtcactacacaacgtaaaatcatttgtttcttttgactcaaattgtattgcttctgttcagatgatctttcattcaatgtgttcctgttgggcgttactagaaactatggaaaactggaaaataactttgaaaaaattggataaagtataggagggttacttggggccagtaaatcagtagactgaacattcaatataataaaagaacatggggattttgtataaccagggataataaaaa

SEQ ID NO: 207668 - DNA, 1948 bp, Artificial Sequence
  derived and/or modified sequence
agggaagttctcactggacaaaagcgtggtctctggcgcggggatctcagagtttcccgggcactcaccgtgtgtagttggcatctccgcgcgtccggacacccgatcccagcatccctgcctgcaggactgttcgtgttcagctcgcgtcctgcagctgtccgaggtgctccagttggaggctgaggttcccgggctctgtagctgagtgggcggcggcaccggcggagatgcctgggaagaaggcgcgcaagaacgctcaaccgagccccgcgcgggctccagcagagctggaagtcgagtgtgctactcaactcaggagatttggagacaaactgaacttccggcagaaacttctgaatctgatatccaaactcttctgctcaggaacctgactgcatcaaaaacttgcatgaggggactccttcaaaagagttttctcaggaggtgcacgtttcatcaatttgaagaaagactgcattgtaattgagaggaatgtgaaggtgcattcatgggtgcccttggaaacggaagatggaatacatcaaagtgaatttctgttcaagttttcccagattatcattctttgggatgagagaacattataaaaccactttgtttattttaaagcaagaatggaagacccttgaaaataaagaagtaattattgacacatttcttttttacttagagaatcgttctagtgtttttgccgaagattaccgctggcctactgtgaagggagatgacctgtgattagactgggcggctggggagaaacagttcagtgcattgttgttgttgctgtttttggtgttttgcttttcagtgccaactcagcacattgtatatgattcggtttatacatattaccttgttataatgaaaaaactcattctgagaacactgaaatgttatactcagtgttgatttcttcggtcactacacaacgtaaaatcatttgtttcttttgactcaaattgtattgcttctgttcagatgatctttcattcaatgtgttcctgttgggcgttactagaaactatggaaaactggaaaataactttgaaaaaattggataaagtataggagggttacttggggccagtaaatcagtagactgaacattcaatataataaaagaacatggggattttgtataaccagggataataaaaagaaaaaagaagttaatttttaattgatgtttttgaaacttagtagaacaaatattcagaagtaacttgataagatatgaatgtttctaaagaagtttctaaaggttcggaaaatgctccttgtcacattagtgtgcatcctacaaaaagtgatctcttaatgtaaattaagaatattttcataattggaatatacttttcttaaaaaaaaggaacagttagttctcatctagaatgaaagttccatatatgcattggtgaatatatatgtatacacatacttacatacttatatgggtatctgtatagataatttgtattagagtattatatagcttcttagtagggtctcaagtaagtttcattttttttatctgggctatatacagtcctcaaataaataatgtcttgattttatttcagcaggaataattttatttattttgcctatttataattaaagtatttttctttagtttgaaaatgtgtattaaagttacatttttgagttacaagagtcttataactacttgaatttttagttaaaatgtcttaatgtaggttgtagtcactttagatggaaaattacctcacatctgttttcttcagtattacttaagattgtttatttagtggtagagagttttttttttcagcctagaggcagctattttaccatctggtatttatggtctaatttgtatttaaacatatgcacacatataaaagttgatactgtggcagtaaactattaaaagttttcactgttc

SEQ ID NO: 207669 - DNA, 411 bp, Artificial Sequence
  derived and/or modified sequence
atgcccggcaagaaggccagaaagaacgcccagcccagccccgccagagcccccgccggccccgccggcaccgccggcaccgccagagaccaggccggcttcgccatcggcatgcagctgagattcaccagaggcaagaagctgctgagcagcagcctgagcagcagccccctggccctgcccagaggccacgaggagcaggtgcaggtggccggcagcagagtgtgctacagcacccaggagatctggagacagaccgagctgcccgccgagaccagcgagagcgacatccagaccctgctgctgagaaacctgaccgccagcaagacctgcatgagaggcctgctgcagaagagcttcctgagaagatgcaccttccaccagttcgaggagagactgcactgcaactag

SEQ ID NO: 207670 - DNA, 165 bp, Artificial Sequence
  derived and/or modified sequence
atgcccggcaagaaggccagaaagaacgcccagcccagccccgccagagcccccgccgagctggaggtggagtgcgccacccagctgagaagattcggcgacaagctgaacttcagacagaagctgctgaacctgatcagcaagctgttctgcagcggcacctag

SEQ ID NO: 207671 - protein, 178 aa, Artificial Sequence
  derived and/or modified sequence
MSGFSTEERAAPFSLEYRVFLKNEKGQYISPFHDIPIYADKDVFHMVVEVPRWSNAKMEIATKDPLNPIKQDVKKGKLRYVANLFPYKGYIWNYGAIPQTWEDPGHNDKHTGCCGDNDPIDVCEIGSKVCARGEIIGVKVLGILAMIDEGETDWKVIAINVDDPDAANYNVCNSVVIL

SEQ ID NO: 207672 - protein, 289 aa, Artificial Sequence
  derived and/or modified sequence
MSGFSTEERAAPFSLEYRVFLKNEKGQYISPFHDIPIYADKDVFHMVVEVPRWSNAKMEIATKDPLNPIKQDVKKGKLRYVANLFPYKGYIWNYGAIPQTWEDPGHNDKHTGCCGDNDPIDVCEIGSKVCARGEIIGVKVLGILAMIDEGETDWKVIAINVDDPDAANYNDINDVKRLKPGYLEATVDWFRRYKVPDGKPENEFAFNAEFKDKDFAIDIIKSTHDHWKALVTKKTNGKGISCMNTTLSESPFKCDPDAARAIVDALPPPCESACTVPTDVDKWFHHQKN

SEQ ID NO: 207673 - DNA, 537 bp, Artificial Sequence
  derived and/or modified sequence
atgagcggcttcagcaccgaggagagagccgcccccttcagcctggagtacagagtgttcctgaagaacgagaagggccagtacatcagccccttccacgacatccccatctacgccgacaaggacgtgttccacatggtggtggaggtgcccagatggagcaacgccaagatggagatcgccaccaaggaccccctgaaccccatcaagcaggacgtgaagaagggcaagctgagatacgtggccaacctgttcccctacaagggctacatctggaactacggcgccatcccccagacctgggaggaccccggccacaacgacaagcacaccggctgctgcggcgacaacgaccccatcgacgtgtgcgagatcggcagcaaggtgtgcgccagaggcgagatcatcggcgtgaaggtgctgggcatcctggccatgatcgacgagggcgagaccgactggaaggtgatcgccatcaacgtggacgaccccgacgccgccaactacaacgtgtgcaacagcgtggtgatcctgtag

SEQ ID NO: 207674 - DNA, 870 bp, Artificial Sequence
  derived and/or modified sequence
atgagcggcttcagcaccgaggagagagccgcccccttcagcctggagtacagagtgttcctgaagaacgagaagggccagtacatcagccccttccacgacatccccatctacgccgacaaggacgtgttccacatggtggtggaggtgcccagatggagcaacgccaagatggagatcgccaccaaggaccccctgaaccccatcaagcaggacgtgaagaagggcaagctgagatacgtggccaacctgttcccctacaagggctacatctggaactacggcgccatcccccagacctgggaggaccccggccacaacgacaagcacaccggctgctgcggcgacaacgaccccatcgacgtgtgcgagatcggcagcaaggtgtgcgccagaggcgagatcatcggcgtgaaggtgctgggcatcctggccatgatcgacgagggcgagaccgactggaaggtgatcgccatcaacgtggacgaccccgacgccgccaactacaacgacatcaacgacgtgaagagactgaagcccggctacctggaggccaccgtggactggttcagaagatacaaggtgcccgacggcaagcccgagaacgagttcgccttcaacgccgagttcaaggacaaggacttcgccatcgacatcatcaagagcacccacgaccactggaaggccctggtgaccaagaagaccaacggcaagggcatcagctgcatgaacaccaccctgagcgagagccccttcaagtgcgaccccgacgccgccagagccatcgtggacgccctgccccccccctgcgagagcgcctgcaccgtgcccaccgacgtggacaagtggttccaccaccagaagaactag

SEQ ID NO: 207675 - DNA, 537 bp, Artificial Sequence
  derived and/or modified sequence
atgtcagggttttctacagaagagcgggctgcgccattctctcttgagtaccgagtatttttgaagaatgaaaaaggccagtatatatcaccgttccacgatatccctatttacgctgacaaagacgtcttccacatggtggtagaagttccccgatggtccaatgcaaagatggagatagctaccaaggaccctttgaatcctatcaagcaagatgtgaagaaaggaaaattgagatacgttgccaatctgtttccctacaagggatatatctggaactatggtgcgatcccacagacttgggaggaccccggccacaatgacaaacacaccggctgttgcggcgacaatgaccccatagacgtgtgcgaaatcgggagtaaggtttgcgcccggggtgaaattatcggagtaaaggttcttggcatcctggccatgatagatgagggtgagaccgactggaaagtaattgccattaatgttgacgacccagatgcagcgaattacaatgtgtgcaacagcgtggtaatcctgtag

SEQ ID NO: 207676 - DNA, 870 bp, Artificial Sequence
  derived and/or modified sequence
atgtccggctttagcacggaagagagggcggctcctttttcacttgaatatcgagtgtttctgaagaacgagaagggacagtatatctctccttttcacgacatccctatctacgctgacaaggacgtcttccacatggtggtggaagttccccgttggagcaacgctaaaatggaaatcgccaccaaggacccactgaatcctataaagcaagatgtcaagaagggcaaactgcggtatgtggctaatcttttcccatacaaaggctacatttggaactatggcgctatcccccagacatgggaagaccccggccataacgacaagcacaccggttgctgtggcgataacgatcccatcgatgtgtgcgaaattggcagcaaggtatgcgccagaggagagatcatcggagtaaaagtcctggggatactggctatgatagacgagggggagacagactggaaggtcatcgcgattaacgtggacgaccctgacgcggctaattataacgacataaacgatgttaaacgcctgaaaccaggatatctggaagcaacggttgactggttcagaagatacaaggttccagacggcaagcccgaaaacgaattcgctttcaatgcggagtttaaggacaaggacttcgccatcgacatcatcaagtctactcacgaccactggaaggccctggtgaccaaaaaaaccaacgggaaaggtatcagttgcatgaacaccaccctttctgaatccccttttaagtgcgaccctgatgccgctcgtgcgatcgttgacgcccttccgcccccatgtgagtcagcctgcacagtgcctactgatgtggataagtggttccatcaccaaaagaactag

SEQ ID NO: 207677 - DNA, 746 bp, Artificial Sequence
  derived and/or modified sequence
ctccggcactatgagcggcttcagcaccgaggagcgcgccgcgcccttctccctggagtaccgagtcttcctcaaaaatgagaaaggacaatatatatctccatttcatgatattccaatttatgcagataaggatgtgtttcacatggtagttgaagtaccacgctggtctaatgcaaaaatggagattgctacaaaggaccctttaaaccctattaaacaagatgtgaaaaaaggaaaacttcgctatgttgcgaatttgttcccgtataaaggatatatctggaactatggtgccatccctcagacttgggaagacccagggcacaatgataaacatactggctgttgtggtgacaatgacccaattgatgtgtgtgaaattggaagcaaggtatgtgcaagaggtgaaataattggcgtgaaagttctaggcatattggctatgattgacgaaggggaaaccgactggaaagtcattgccattaatgtggatgatcctgatgcagccaattataatgtatgtaatagtgttgtgatcctctgacatagcctctgcctctggaccagggatagtacctcaagcctgtaatcccagtgctttgggaagccaaggcaggaggattgcttgagcccaggagtttgagaccagcctgggcaacatgacgagaccccatttctacaaaaaatttaaaaattagctgggcgtgtgcatgcttatagtcccagctactcaggaggctgag

SEQ ID NO: 207678 - DNA, 1294 bp, Artificial Sequence
  derived and/or modified sequence
agtgctcgcagtgcgcaggcgtggggctctctccttgtcagtcggcgccgcgtgcgggctggtggctctgtggcagcggcggcggcaggactccggcactatgagcggcttcagcaccgaggagcgcgccgcgcccttctccctggagtaccgagtcttcctcaaaaatgagaaaggacaatatatatctccatttcatgatattccaatttatgcagataaggatgtgtttcacatggtagttgaagtaccacgctggtctaatgcaaaaatggagattgctacaaaggaccctttaaaccctattaaacaagatgtgaaaaaaggaaaacttcgctatgttgcgaatttgttcccgtataaaggatatatctggaactatggtgccatccctcagacttgggaagacccagggcacaatgataaacatactggctgttgtggtgacaatgacccaattgatgtgtgtgaaattggaagcaaggtatgtgcaagaggtgaaataattggcgtgaaagttctaggcatattggctatgattgacgaaggggaaaccgactggaaagtcattgccattaatgtggatgatcctgatgcagccaattataatgatatcaatgatgtcaaacggctgaaacctggctacttagaagctactgtggactggtttagaaggtataaggttcctgatggaaaaccagaaaatgagtttgcgtttaatgcagaatttaaagataaggactttgccattgatattattaaaagcactcatgaccattggaaagcattagtgactaagaaaacgaatggaaaaggaatcagttgcatgaatacaactttgtctgagagccccttcaagtgtgatcctgatgctgccagagccattgtggatgctttaccaccaccctgtgaatctgcctgcacagtaccaacagacgtggataagtggttccatcaccagaaaaactaatgagatttctctggaatacaagctgatattgctacatcgtgttcatctggatgtattagaagtaaaagtagtagcttttcaaagctttaaatttgtagaactcatctaactaaagtaaattctgctgtgactaatccaatatactcagaatgttatccatctaaagcatttttcatatctcaactaagataacttttagcacatgcttaaatatcaaagcagttgtcatttggaagtcacttgtgaatagatgtgcaaggggagcacatattggatgtatatgttaccatatgttaggaaataaaattattttgctgaaacttg

SEQ ID NO: 207679 - DNA, 537 bp, Artificial Sequence
  derived and/or modified sequence
atgagcggcttcagcacagaggagcgggccgcccccttcagcctggagtacagagtcttcctgaagaatgagaagggccagtacatcagccccttccatgacatccccatctatgctgacaaggatgtgttccacatggtggtggaggtgccccgctggagcaatgccaagatggagatcgccaccaaggaccccctgaaccccatcaagcaggatgtgaagaagggcaagctgcgctacgtggccaacctcttcccctacaagggctacatctggaactacggggccatcccccagacctgggaggaccccggccacaatgacaagcacacaggctgctgcggggacaatgaccccattgatgtgtgtgaaattggcagcaaggtgtgtgcccggggggagatcatcggcgtgaaggtgctgggcatcctggccatgattgatgaaggagaaacagactggaaggtgattgccatcaacgtggatgatcctgatgctgccaactacaacgtgtgcaacagcgtggtgatcctgtag

SEQ ID NO: 207680 - DNA, 870 bp, Artificial Sequence
  derived and/or modified sequence
atgagcggcttcagcacagaggagcgggccgcccccttcagcctggagtacagagtcttcctgaagaatgagaagggccagtacatcagccccttccatgacatccccatctatgctgacaaggatgtgttccacatggtggtggaggtgccccgctggagcaatgccaagatggagatcgccaccaaggaccccctgaaccccatcaagcaggatgtgaagaagggcaagctgcgctacgtggccaacctcttcccctacaagggctacatctggaactacggggccatcccccagacctgggaggaccccggccacaatgacaagcacacaggctgctgcggggacaatgaccccattgatgtgtgtgaaattggcagcaaggtgtgtgcccggggggagatcatcggcgtgaaggtgctgggcatcctggccatgattgatgaaggagaaacagactggaaggtgattgccatcaacgtggatgatcctgatgctgccaactacaatgacatcaatgatgtgaagaggctgaagccaggctacctggaggccaccgtggactggttccgccgctacaaggtgcctgatggcaagccagaaaatgaatttgccttcaatgctgagttcaaggacaaggactttgccatcgacatcatcaagagcacccatgaccactggaaggccctggtgaccaagaagaccaacgggaagggcatcagctgcatgaacaccaccctgtctgagagccccttcaagtgtgaccctgatgctgcccgggccatcgtggatgccctgcccccaccctgtgagagcgcctgcaccgtgcccacagatgtggacaagtggttccaccaccagaagaactag

SEQ ID NO: 207681 - DNA, 537 bp, Artificial Sequence
  derived and/or modified sequence
atgagcggcttcagcaccgaggagcgggccgcccccttcagcctggagtatcgcgtgttcttaaaaaacgaaaagggtcagtatatcagcccctttcacgatatcccaatctatgctgataaggacgtgtttcatatggttgtcgaagtccctcgatggtctaatgctaagatggaaatcgcaaccaaggaccctctgaatcccattaagcaggacgtgaaaaagggcaagttaaggtacgtggccaatctctttccatacaagggatacatctggaactatggggccatcccccagacatgggaagaccctggacacaatgataagcacacgggctgttgcggtgataatgaccctatcgacgtgtgcgagatagggtcgaaggtttgcgcccgcggtgagatcatcggtgtgaaggtccttggcatcctggcgatgattgacgagggcgagacggattggaaggtcatagcgatcaatgttgatgatcccgatgctgctaattataatgtatgcaattccgtggttattctgtag

SEQ ID NO: 207682 - DNA, 870 bp, Artificial Sequence
  derived and/or modified sequence
atgagcggcttcagcaccgaggagcgggccgcccccttcagcctggagtaccgtgttttcctgaagaacgaaaaaggccaatacataagcccttttcatgacattccaatttatgctgataaggatgtgttccacatggtggttgaagtgcctaggtggtcaaacgcgaagatggagatagcaacaaaggatcctctgaatcccataaaacaggatgtaaagaaaggcaaactgcggtatgtggctaacttgttcccttacaagggctatatttggaactatggggcaatccctcagacatgggaagacccagggcacaacgataaacatactggttgctgtggggacaatgaccctatcgatgtgtgcgagattggctcaaaggtttgcgcccggggagaaatcattggggtcaaagtactgggcatactggcaatgatcgatgagggcgagaccgactggaaggtgatcgccatcaatgtggacgatcccgatgccgctaactacaatgacattaatgacgtgaagaggctaaagcccggctatctcgaggcaacagtcgattggttccgacggtataaagtgcccgatgggaaaccggaaaatgagttcgctttcaatgctgagtttaaggataaagacttcgctatagatatcattaagtccacgcacgatcactggaaggccttagtaacaaagaaaactaatgggaaggggatttcttgtatgaacaccactctgagtgagtcaccattcaagtgcgatcccgatgcagctcgtgccatcgtagacgcgctgccaccgccctgcgaatcagcctgtaccgtcccaactgatgtcgataagtggtttcaccatcagaagaactag

SEQ ID NO: 207683 - DNA, 537 bp, Artificial Sequence
  derived and/or modified sequence
atgagcggtttctccaccgaagagcgggcagcgccattcagtttggaataccgggtgttcctgaagaacgaaaagggacagtacatcagcccttttcacgatattccaatctacgccgacaaggacgttttccatatggttgtggaagtgccgagatggagtaacgccaaaatggagattgccacaaaggacccactaaacccaataaagcaggatgtgaaaaaggggaagcttagatatgtcgcaaacctgtttccctataaaggatatatttggaactacggcgcaatcccccagacttgggaggatcccggacataatgacaagcacaccggctgctgcggagacaacgacccgattgacgtatgtgagattggctccaaggtgtgcgctagaggggaaatcatcggagtaaaagtcctcggtatactcgctatgatcgatgagggagaaaccgattggaaggtcatcgccatcaacgtggacgatcccgatgcagctaactacaacgtctgcaacagcgtagtgattttgtag

SEQ ID NO: 207684 - DNA, 870 bp, Artificial Sequence
  derived and/or modified sequence
atgagtgggtttagtacagaagagcgggctgctcccttttcgctggagtaccgggtcttcctcaagaatgaaaaaggtcagtacattagtccttttcacgacattcccatctatgctgataaagatgtctttcatatggtggtggaagttccaagatggtcgaatgctaagatggagatagctaccaaggaccctctgaatcctatcaagcaggatgtcaaaaaggggaagcttagatacgttgctaacttattcccctacaagggttatatttggaattacggggcaataccccagacttgggaggaccctggccataacgacaagcatacggggtgttgcggcgataacgatcccattgacgtgtgtgagattggctccaaggtgtgtgccagaggtgagatcatcggcgtaaaagttctcggtatcctggctatgattgatgagggcgaaacagattggaaagtaatcgccatcaatgtggatgatccagacgcagcaaactacaatgacattaacgacgtaaaacgcctgaagcctggatatctcgaagccacagtggactggtttaggaggtataaggtcccagacggcaaacctgaaaatgaatttgcattcaatgccgagttcaaagataaagactttgcaattgatatcattaaaagcacgcatgaccactggaaagcactggtgacaaagaagaccaacggaaaggggattagttgcatgaacaccactctgtccgaatcgccttttaaatgtgatcctgatgctgctagggctattgtggatgctcttcccccaccctgcgaatctgcctgcaccgtgccgacagatgttgataagtggttccaccatcagaaaaattag

SEQ ID NO: 207685 - protein, 105 aa, Artificial Sequence
  derived and/or modified sequence
MCQGGDFTRHNGTGGKSIYGEKFEDENFILKHTGPGILSMANAGPNTNGSQFFICTAKTEWLDGKHVVFGKVKEGMNIVEAMERFGSRNGKTSKKITIADCGQLE

SEQ ID NO: 207686 - protein, 129 aa, Artificial Sequence
  derived and/or modified sequence
MVNPTVFFDIAVDGEPLGRVSFELFADKVPKTAENFRALSTGEKGFGYKGSCFHRIIPGFMCQGGDFTRHNGTGGKSICTAKTEWLDGKHVVFGKVKEGMNIVEAMERFGSRNGKTSKKITIADCGQLE

SEQ ID NO: 207687 - protein, 165 aa, Artificial Sequence
  derived and/or modified sequence
MVNPTVFFDIAVDGEPLGRVSFELFADKVPKTAENFRALSTGEKGFGYKGSCFHRIIPGFMCQGGDFTRHNGTGGKSIYGEKFEDENFILKHTGPGILSMANAGPNTNGSQFFICTAKTEWLDGKHVVFGKVKEGMNIVEAMERFGSRNGKTSKKITIADCGQLE

SEQ ID NO: 207688 - DNA, 390 bp, Artificial Sequence
  derived and/or modified sequence
atggtgaatccgacggtgttctttgatatcgctgtcgacggagaacccttgggcagagtgtcttttgagctcttcgccgacaaagtgccgaaaactgccgagaatttccgtgcactctccacaggcgagaagggctttgggtacaagggatcttgctttcacaggataatccccgggttcatgtgtcaaggtggtgacttcaccagacataatggcacaggcggcaagtcgatctgcacagcaaagacagagtggcttgatgggaaacacgttgtcttcgggaaggttaaagaggggatgaacattgttgaagcaatggagcgcttcggatcaaggaacggcaagacaagcaaaaaaattactattgccgattgcggccagctggagtag

SEQ ID NO: 207689 - DNA, 498 bp, Artificial Sequence
  derived and/or modified sequence
atggtgaacccaactgtgtttttcgacatcgccgtcgacggagagcccctcggcagggtgtcgttcgagctgtttgccgacaaagtcccgaagaccgccgagaactttcgggcactgtctacaggcgagaaaggctttggctacaaagggagctgcttccatcgcatcattccaggatttatgtgccaagggggggattttacccgccacaacgggaccggagggaaaagcatctacggagaaaaatttgaagatgaaaactttatcctgaagcacacaggacctggaattttaagcatggcaaacgccgggcctaacacgaatggttcgcagttttttatttgtactgccaagacagagtggctggacggcaaacatgtggttttcgggaaagttaaagaggggatgaacatcgtggaggccatggagcgcttcggcagccgcaacgggaaaacctctaaaaagattacaatcgccgactgcggccagctggagtag

SEQ ID NO: 207690 - DNA, 390 bp, Artificial Sequence
  derived and/or modified sequence
atggtgaaccccaccgtcttctttgatattgctgtggatggagagcccctgggccgggtgtcctttgagctgtttgctgacaaggtgcccaagacagctgagaacttccgggccctgagcactggagagaagggcttcggctacaagggcagctgcttccaccgcatcatccctggcttcatgtgccagggcggggacttcaccaggcacaatggaactggaggcaagagcatctgcacagccaagacagagtggctggatggcaagcacgtggtgtttgggaaggtgaaggagggcatgaacatcgtggaggccatggagagatttggcagcagaaatggcaagaccagcaagaagatcaccatcgctgactgtggccagctggagtag

SEQ ID NO: 207691 - DNA, 498 bp, Artificial Sequence
  derived and/or modified sequence
atggtgaaccccaccgtcttctttgatattgctgtggatggagagcccctgggccgggtgtcctttgagctgtttgctgacaaggtgcccaagacagctgagaacttccgggccctgagcactggagagaagggcttcggctacaagggcagctgcttccaccgcatcatccctggcttcatgtgccagggcggggacttcaccaggcacaatggaactggaggcaagagcatctatggagagaagtttgaagatgagaacttcatcctgaagcacactggacctggcatcctgtccatggccaatgccggccccaacaccaacggcagccagttcttcatctgcacagccaagacagagtggctggatggcaagcacgtggtgtttgggaaggtgaaggagggcatgaacatcgtggaggccatggagagatttggcagcagaaatggcaagaccagcaagaagatcaccatcgctgactgtggccagctggagtag

SEQ ID NO: 207692 - DNA, 390 bp, Artificial Sequence
  derived and/or modified sequence
atggtgaaccccaccgtgttcttcgacatcgccgtggacggcgagccattgggtagggtgtctttcgaactgttcgctgacaaagtgcccaagacagctgaaaactttcgggccttgtccaccggcgaaaagggatttggttacaagggctcttgtttccacaggatcattcccggctttatgtgtcaggggggggattttaccagacacaatggcaccggaggtaagtctatctgtactgccaagacagagtggctggacggcaaacacgtggttttcggcaaggtcaaggaaggcatgaatatagtggaggccatggaaaggttcgggtccaggaacggaaaaaccagtaagaaaattaccatagccgactgtgggcaactagagtag

SEQ ID NO: 207693 - DNA, 498 bp, Artificial Sequence
  derived and/or modified sequence
atggtgaaccccaccgtgttcttcgacatcgccgtggacggcgagccactgggacgcgtcagctttgaactgtttgcagacaaggtaccaaagacagccgaaaatttccgtgccttgagcaccggggaaaaggggtttggctacaagggctcctgcttccaccggatcatccctggcttcatgtgtcagggaggggatttcacgcgacacaatgggactggtggaaagtccatctacggcgagaaattcgaggacgaaaattttatactgaaacacacaggaccaggcattctctccatggccaatgccggcccaaataccaatggaagccagttttttatttgtaccgctaagacagagtggctagacggtaaacacgtggtcttcggcaaagtgaaggaaggaatgaatattgtggaagccatggagaggtttggttcgcgaaatggtaaaacctcaaaaaagataacaatagctgattgcggccagctcgagtag

SEQ ID NO: 207694 - DNA, 827 bp, Artificial Sequence
  derived and/or modified sequence
gttttgcagacgccaccgccgaggaaaaccgtgtactattagccatggtcaaccccaccgtgttcttcgacattgccgtcgacggcgagcccttgggccgcgtctcctttgaggtaaggggcctggataccaagaagtgactgctcatctaatccataaagctatgttaacagattggaggtagtagcattttcattacaagtgactaaaagaacagcagaaaattttcgtgctctgagcactggagagaaaggatttggttataagggttcctgctttcacagaattattccagggtttatgtgtcagggtggtgacttcacacgccataatggcactggtggcaagtccatctatggggagaaatttgaagatgagaacttcatcctaaagcatacgggtcctggcatcttgtccatggcaaatgctggacccaacacaaatggttcccagtttttcatctgcactgccaagactgagtggttggatggcaagcatgtggtgtttggcaaagtgaaagaaggcatgaatattgtggaggccatggagcgctttgggtccaggaatggcaagaccagcaagaagatcaccattgctgactgtggacaactcgaataagtttgacttgtgttttatcttaaccaccagatcattccttctgtagctcaggagagcacccctccaccccatttgctcgcagtatcctagaatctttgtgctctcgctgcagttccctttgggttccatgttttccttgttccctcccatgcctagctggattgcagagttaagtttatgattatgaaataaaaactaaataacaattg

SEQ ID NO: 207695 - DNA, 1412 bp, Artificial Sequence
  derived and/or modified sequence
gttttgcagacgccaccgccgaggaaaaccgtgtactattagccatggtcaaccccaccgtgttcttcgacattgccgtcgacggcgagcccttgggccgcgtctcctttgagctgtttgcagacaaggtcccaaagacagcagaaaattttcgtgctctgagcactggagagaaaggatttggttataagggttcctgctttcacagaattattccagggtttatgtgtcagggtggtgacttcacacgccataatggcactggtggcaagtccatctgcactgccaagactgagtggttggatggcaagcatgtggtgtttggcaaagtgaaagaaggcatgaatattgtggaggccatggagcgctttgggtccaggaatggcaagaccagcaagaagatcaccattgctgactgtggacaactcgaataagtttgacttgtgttttatcttaaccaccagatcattccttctgtagctcaggagagcacccctccaccccatttgctcgcagtatcctagaatctttgtgctctcgctgcagttccctttgggttccatgttttccttgttccctcccatgcctagctggattgcagagttaagtttatgattatgaaataaaaactaaataacaattgtcctcgtttgagttaagagtgttgatgtaggctttattttaagcagtaatgggttacttctgaaacatcacttgtttgcttaattctacacagtacttagattttttttactttccagtcccaggaagtgtcaatgtttgttgagtggaatattgaaaatgtaggcagcaactgggcatggtggctcactgtctgtaatgtattacctgaggcagaagaccacctgagggtaggagtcaagatcagcctgggcaacatagtgagacgctgtctctacaaaaaataattagcctggcctggtggtgcatgcctagtcctagctgatctggaggctgacgtgggaggattgcttgagcctagagtgagctattatcatgccactgtacagcctgggtgttcacagatcttgtgtctcaaaggtaggcagaggcaggaaaagcaaggagccagaattaagaggttgggtcagtctgcagtgagttcatgcatttagaggtgttcttcaagatgactaatgtcaaaaattgagacatctgttgcggttttttttttttttttttcccctggaatgcagtggcgtgatctcagctcactgcagcctccgcctcctgggttcaagtgattctagtgcctcagcctcctgagtagctgggataatgggcgtgtgccaccatgcccagctaatttttgtatttttagtatagatggggtttcatcattttgaccaggctggtctcaaactcttgacctcagctgatgcgcctgcctt

SEQ ID NO: 207696 - DNA, 2238 bp, Artificial Sequence
  derived and/or modified sequence
cgttttgcagacgccaccgccgaggaaaaccgtgtactattagccatggtcaaccccaccgtgttcttcgacattgccgtcgacggcgagcccttgggccgcgtctcctttgagctgtttgcagacaaggtcccaaagacagcagaaaattttcgtgctctgagcactggagagaaaggatttggttataagggttcctgctttcacagaattattccagggtttatgtgtcagggtggtgacttcacacgccataatggcactggtggcaagtccatctatggggagaaatttgaagatgagaacttcatcctaaagcatacgggtcctggcatcttgtccatggcaaatgctggacccaacacaaatggttcccagtttttcatctgcactgccaagactgagtggttggatggcaagcatgtggtgtttggcaaagtgaaagaaggcatgaatattgtggaggccatggagcgctttgggtccaggaatggcaagaccagcaagaagatcaccattgctgactgtggacaactcgaataagtttgacttgtgttttatcttaaccaccagatcattccttctgtagctcaggagagcacccctccaccccatttgctcgcagtatcctagaatctttgtgctctcgctgcagttccctttgggttccatgttttccttgttccctcccatgcctagctggattgcagagttaagtttatgattatgaaataaaaactaaataacaattgtcctcgtttgagttaagagtgttgatgtaggctttattttaagcagtaatgggttacttctgaaacatcacttgtttgcttaattctacacagtacttagattttttttactttccagtcccaggaagtgtcaatgtttgttgagtggaatattgaaaatgtaggcagcaactgggcatggtggctcactgtctgtaatgtattacctgaggcagaagaccacctgagggtaggagtcaagatcagcctgggcaacatagtgagacgctgtctctacaaaaaataattagcctggcctggtggtgcatgcctagtcctagctgatctggaggctgacgtgggaggattgcttgagcctagagtgagctattatcatgccactgtacagcctgggtgttcacagatcttgtgtctcaaaggtaggcagaggcaggaaaagcaaggagccagaattaagaggttgggtcagtctgcagtgagttcatgcatttagaggtgttcttcaagatgactaatgtcaaaaattgagacatctgttgcggttttttttttttttttttcccctggaatgcagtggcgtgatctcagctcactgcagcctccgcctcctgggttcaagtgattctagtgcctcagcctcctgagtagctgggataatgggcgtgtgccaccatgcccagctaatttttgtatttttagtatagatggggtttcatcattttgaccaggctggtctcaaactcttgacctcagctgatgcgcctgccttggcctcccaaactgctgagattacagatgtgagccaccgcaccctacctcattttctgtaacaaagctaagcttgaacactgttgatgttcttgagggaagcatattgggctttaggctgtaggtcaagtttatacatcttaattatggtggaattcctatgtagagtctaaaaagccaggtacttggtgctacagtcagtctccctgcagagggttaaggcgcagactacctgcagtgaggaggtactgcttgtagcatatagagcctctccctagctttggttatggaggctttgaggttttgcaaacctgaccaatttaagccataagatctggtcaaagggatacccttcccactaaggacttggtttctcaggaaattatatgtacagtgcttgctggcagttagatgtcaggacaatctaagctgagaaaaccccttctctgcccaccttaacagacctctagggttcttaacccagcaatcaagtttgcctatcctagaggtggcggatttgatcatttggtgtgttgggcaatttttgttttactgtctggttccttctgcgtgaattaccaccaccaccacttgtgcatctcagtcttgtgtgttgtctggttacgtattccctgggtgataccattcaatgtcttaatgtacttgtggctcagacctgagtgcaaggtggaaataaacatcaaacatcttttcatta

SEQ ID NO: 207697 - DNA, 390 bp, Artificial Sequence
  derived and/or modified sequence
atggtcaaccctaccgtatttttcgacatcgcggttgacggcgagcccctggggagggtgtccttcgagctgtttgccgataaagtgccgaagacggcggagaactttagagccctctccactggagagaagggattcgggtacaaggggtcatgtttccataggatcatccccggtttcatgtgccagggaggggacttcacacgccacaatggaactgggggaaaaagcatatgtactgcgaagacggaatggctggatggcaaacatgtggtttttgggaaggttaaggaaggcatgaatatcgtggaggccatggagcggtttgggtcacggaacggcaaaacctccaagaaaataacgatcgctgattgtggccagctggagtag

SEQ ID NO: 207698 - DNA, 498 bp, Artificial Sequence
  derived and/or modified sequence
atggtgaaccctacggttttttttgacatcgccgttgacggagaaccccttgggcgagtatcctttgagctgtttgcggacaaggtccccaaaacggctgagaatttccgcgcattatctacgggtgagaaaggattcggctacaagggatcctgtttccatagaattatccccggtttcatgtgtcaggggggtgactttactagacataacggcaccggagggaaatccatctacggggagaaattcgaagacgagaatttcattcttaagcacaccggaccaggcatactgagcatggccaatgccggacccaacactaatggttcacagttctttatttgcaccgctaagaccgaatggctcgacgggaaacacgtggtcttcggtaaagtcaaggagggcatgaacatagtcgaggcaatggagcgtttcggaagcaggaatggcaagacctcaaagaaaattactatcgccgactgcgggcagttagagtag

SEQ ID NO: 207699 - DNA, 390 bp, Artificial Sequence
  derived and/or modified sequence
atggtgaaccccaccgtgttcttcgacatcgccgtggacggcgagcccctgggcagagtgagcttcgagctgttcgccgacaaggtgcccaagaccgccgagaacttcagagccctgagcaccggcgagaagggcttcggctacaagggcagctgcttccacagaatcatccccggcttcatgtgccagggcggcgacttcaccagacacaacggcaccggcggcaagagcatctgcaccgccaagaccgagtggctggacggcaagcacgtggtgttcggcaaggtgaaggagggcatgaacatcgtggaggccatggagagattcggcagcagaaacggcaagaccagcaagaagatcaccatcgccgactgcggccagctggagtag

SEQ ID NO: 207700 - DNA, 498 bp, Artificial Sequence
  derived and/or modified sequence
atggtgaaccccaccgtgttcttcgacatcgccgtggacggcgagcccctgggcagagtgagcttcgagctgttcgccgacaaggtgcccaagaccgccgagaacttcagagccctgagcaccggcgagaagggcttcggctacaagggcagctgcttccacagaatcatccccggcttcatgtgccagggcggcgacttcaccagacacaacggcaccggcggcaagagcatctacggcgagaagttcgaggacgagaacttcatcctgaagcacaccggccccggcatcctgagcatggccaacgccggccccaacaccaacggcagccagttcttcatctgcaccgccaagaccgagtggctggacggcaagcacgtggtgttcggcaaggtgaaggagggcatgaacatcgtggaggccatggagagattcggcagcagaaacggcaagaccagcaagaagatcaccatcgccgactgcggccagctggagtag

SEQ ID NO: 207701 - protein, 329 aa, Artificial Sequence
  derived and/or modified sequence
MAEGERQPPPDSSEEAPPATQNFIIPKKEIHTVPDMGKWKRSQVPFGTVAYADYIGFILTLNEGVKGKKLTFEYRVSEAIEKLVALLNTLDRWIDETPPVDQPSRFGNKAYRTWYAKLDEEAENLVATVVPTHLAAAVPEVAVYLKESVGNSTRIDYGTGHEAAFAAFLCCLCKIGVLRVDDQIAIVFKVFNRYLEVMRKLQKTYRMEPAGSQGVWGLDDFQFLPFIWGSSQLIDHPYLEPRHFVDEKAVNENHKDYMFLECILFITEMKTGPFAEHSNQLWNISAVPSWSKVNQGLIRMYKAECLEKFPVIQHFKFGSLLPIHPVTSG

SEQ ID NO: 207702 - protein, 323 aa, Artificial Sequence
  derived and/or modified sequence
MAEGERQPPPDSSEEAPPATQNFIIPKKEIHTVPDMGKWKRSQAYADYIGFILTLNEGVKGKKLTFEYRVSEAIEKLVALLNTLDRWIDETPPVDQPSRFGNKAYRTWYAKLDEEAENLVATVVPTHLAAAVPEVAVYLKESVGNSTRIDYGTGHEAAFAAFLCCLCKIGVLRVDDQIAIVFKVFNRYLEVMRKLQKTYRMEPAGSQGVWGLDDFQFLPFIWGSSQLIDHPYLEPRHFVDEKAVNENHKDYMFLECILFITEMKTGPFAEHSNQLWNISAVPSWSKVNQGLIRMYKAECLEKFPVIQHFKFGSLLPIHPVTSG

SEQ ID NO: 207703 - DNA, 990 bp, Artificial Sequence
  derived and/or modified sequence
atggccgaaggcgagcgccagcctccacccgacagttccgaggaagccccacccgcaacccagaatttcatcattcctaagaaggaaattcacacagttcccgatatggggaagtggaagcgttctcaggtgccattcgggaccgtggcttacgcggactacatcgggttcatcctcacccttaacgaaggtgttaagggaaaaaagctcacctttgaatatcgagtctccgaggccatcgaaaagctggtggccctgttgaataccctggatagatggattgatgaaacacccccggtggaccaaccgagcagatttgggaacaaggcgtaccggacatggtacgcgaagctcgacgaggaggctgagaacctagtcgctaccgtcgtgcctacacacttagcagcggccgttcctgaagttgcggtatatctcaaggagtctgtgggaaattcgacccgtattgattacgggacaggccacgaagctgcattcgccgctttcttgtgttgtctgtgcaaaatcggagttctcagagtagacgaccagatcgccatcgtctttaaagtgtttaaccgatacttagaggtgatgagaaagctgcagaaaacctatcggatggaacctgcaggcagccagggtgtctgggggctagacgacttccagtttctgccttttatctggggctcttcccagttgatcgaccacccttacctcgagccacggcacttcgtggatgagaaggccgtcaacgagaatcataaggactatatgtttctggaatgcatcttgtttataactgaaatgaagacaggacccttcgccgagcactccaatcaactgtggaatatctcagccgtgccctcttggtccaaggtgaatcaggggttgatcagaatgtataaagcagagtgtctggagaaattccccgtaatacaacacttcaaatttggctccttgctgcccatccatcctgtgacttcaggttag

SEQ ID NO: 207704 - DNA, 972 bp, Artificial Sequence
  derived and/or modified sequence
atggccgaaggagaacggcagccacctcccgatagcagtgaggaagccccacccgctacacagaactttatcattccaaaaaaagagattcacactgtccctgacatgggcaaatggaaacgatctcaggcctacgccgactatattggctttattttgacccttaatgagggggttaaaggaaagaagcttacctttgaatacagggtgtctgaggctatcgaaaaacttgtggctctcttgaatacacttgataggtggattgatgagactccacccgtggatcagccctccaggttcggtaataaagcatacagaacatggtatgccaagttagatgaagaagccgaaaacctggtggcaacagttgtgccgactcacttagctgccgctgtgccagaagtcgccgtgtacttaaaagagtccgtcggaaattctacaaggatcgactacggcaccgggcatgaagctgcgtttgcggcttttctgtgctgcttgtgcaagattggggttctgcgggtcgacgatcagatagccatcgttttcaaggtgttcaatagatatctggaggtgatgcgcaagttgcagaaaacctacagaatggaacctgctggctcgcagggggtttggggactggacgacttccagttcctacctttcatctggggttcttcacaattaattgatcatccctacctcgagccgcgccactttgtggatgagaaggcagtaaatgaaaatcataaagattatatgttcctggagtgcatcttattcatcacagagatgaaaacaggaccatttgcggagcactctaaccaactctggaacattagcgccgtcccctcctggtcaaaggtgaatcagggcctgattcggatgtacaaggctgagtgtttggaaaagtttccagttattcaacacttcaagttcgggagcctcttacccatccaccctgtaaccagtggctag

SEQ ID NO: 207705 - DNA, 972 bp, Artificial Sequence
  derived and/or modified sequence
atggctgagggcgaacggcagccgccccccgactcctctgaggaagctcctccagcgacccagaactttattattcccaaaaaggaaattcataccgtgcccgacatgggcaaatggaagcggtctcaagcctacgccgactatataggatttattttgaccctcaacgagggcgtgaagggtaagaaactgacatttgaataccgtgtaagtgaggccatcgaaaaactggtcgctttactgaacactttggataggtggattgacgaaaccccccccgttgaccagcccagcaggtttggtaataaagcttacaggacatggtatgccaaactggatgaggaggccgagaacctggtggcgacagtggtgcctactcacctggccgctgccgttcctgaggtcgctgtttacctcaaggagtccgttggcaattccaccaggatcgactacggaacagggcacgaagctgcctttgccgctttcctgtgctgcctctgcaagattggagttttgcgggttgacgaccaaatcgccatcgtgttcaaggtcttcaacagatatctggaagtgatgagaaaactgcagaagacttacagaatggaaccagctggcagccaaggcgtctggggccttgatgactttcaattccttccttttatttggggctcctcccagttgattgatcacccatacctggaaccacgccatttcgttgatgaaaaagcagtgaatgagaatcacaaggactacatgtttttagagtgtattctttttattacagaaatgaagaccgggccattcgcggaacacagtaatcaactgtggaacatctctgccgttccatcttggtcgaaggtgaaccaaggtcttattcgtatgtacaaagctgaatgtctggagaaattccctgtcattcaacacttcaaattcggctccctgctcccaatccatccagtcacctccggatag

SEQ ID NO: 207706 - DNA, 990 bp, Artificial Sequence
  derived and/or modified sequence
atggccgagggggagcggcagcccccaccagacagcagcgaggaggcccccccagccacccagaacttcatcatccccaagaaggagatccacacagtgcctgacatgggcaagtggaagaggagccaggtgcccttcggcaccgtggcctatgctgactacatcggcttcatcctgaccctgaatgaaggagtgaagggcaagaagctgacctttgagtacagagtgtctgaggccatcgagaagctggtggccctgctgaacaccctggaccgctggattgatgagaccccacctgtggaccagcccagccgcttcggcaacaaggcctaccgcacctggtacgccaagctggatgaggaggccgagaacctggtggccaccgtggtgcccacccacctggccgctgctgtgcctgaggtggccgtgtacctgaaggagagcgtgggcaacagcaccagaattgattatggaactggacatgaagctgcctttgctgccttcctgtgctgcctgtgcaagattggagtgctgcgggtggatgaccagatcgccatcgtgttcaaggtgttcaaccgctacctggaggtgatgaggaagctgcagaagacctacaggatggagcccgccggcagccagggcgtgtggggcctggatgacttccagttcctgcccttcatctggggcagcagccagctgattgaccacccctacctggagcccaggcactttgtggatgagaaggctgtgaatgaaaaccacaaggactacatgttcctggagtgcatcctcttcatcacagagatgaagacaggcccctttgctgagcacagcaaccagctgtggaacatctctgctgtgcccagctggagcaaggtgaaccagggcctcatccgcatgtacaaggccgagtgcctggagaagtttcctgtgatccagcacttcaagtttggcagcctgctgcccatccaccctgtgaccagcggctag

SEQ ID NO: 207707 - DNA, 972 bp, Artificial Sequence
  derived and/or modified sequence
atggccgagggggagcggcagcccccaccagacagcagcgaggaggcccccccagccacccagaacttcatcatccccaagaaggagatccacacagtgcctgacatgggcaagtggaagaggagccaggcctatgctgactacatcggcttcatcctgaccctgaatgaaggagtgaagggcaagaagctgacctttgagtacagagtgtctgaggccatcgagaagctggtggccctgctgaacaccctggaccgctggattgatgagaccccacctgtggaccagcccagccgcttcggcaacaaggcctaccgcacctggtacgccaagctggatgaggaggccgagaacctggtggccaccgtggtgcccacccacctggccgctgctgtgcctgaggtggccgtgtacctgaaggagagcgtgggcaacagcaccagaattgattatggaactggacatgaagctgcctttgctgccttcctgtgctgcctgtgcaagattggagtgctgcgggtggatgaccagatcgccatcgtgttcaaggtgttcaaccgctacctggaggtgatgaggaagctgcagaagacctacaggatggagcccgccggcagccagggcgtgtggggcctggatgacttccagttcctgcccttcatctggggcagcagccagctgattgaccacccctacctggagcccaggcactttgtggatgagaaggctgtgaatgaaaaccacaaggactacatgttcctggagtgcatcctcttcatcacagagatgaagacaggcccctttgctgagcacagcaaccagctgtggaacatctctgctgtgcccagctggagcaaggtgaaccagggcctcatccgcatgtacaaggccgagtgcctggagaagtttcctgtgatccagcacttcaagtttggcagcctgctgcccatccaccctgtgaccagcggctag

SEQ ID NO: 207708 - DNA, 990 bp, Artificial Sequence
  derived and/or modified sequence
atggccgagggcgagcggcagcccccccccgacagcagcgaggaggctccacctgctactcagaactttataatccctaaaaaagagattcacacggttcccgacatgggcaagtggaagcgaagccaggtgccatttgggaccgtggcctatgctgactatatcggctttatcctgactctgaacgagggggtaaaaggtaagaagttaacctttgagtatagagtgagtgaagccatcgagaagttggtagccctcttaaacacgttggaccgttggatcgatgagacaccccccgtcgatcagcctagcaggtttggcaacaaggcttatcgaacttggtatgccaagctcgacgaagaggctgagaatttggtggctacggttgtcccgacccacctagcagcagcggtaccagaagttgctgtgtaccttaaggaaagtgtgggtaactcaactagaatcgattatggcaccggccatgaggccgccttcgccgccttcctctgttgcctttgtaagattggagttttaagagtggacgatcagatcgccattgtttttaaggtctttaaccggtatctggaggtgatgagaaagctacagaagacatacagaatggaacccgcaggctcccagggggtatggggcttggatgatttccagttcttgccctttatctggggatctagtcagctaatcgatcatccttatctagaaccgcggcattttgtagacgagaaagctgtcaacgaaaaccataaagattacatgtttcttgagtgtatcctgtttattacagagatgaagacgggtccttttgccgaacacagcaaccagctttggaacatttctgccgtgccctcctggagtaaagtgaaccaggggctgatcaggatgtataaggctgagtgtcttgaaaaatttcctgtcattcagcactttaagtttggttccctgctgcctatacacccagtcactagcggatag

SEQ ID NO: 207709 - DNA, 972 bp, Artificial Sequence
  derived and/or modified sequence
atggccgagggcgagcggcagcccccccccgacagcagcgaggaggcacctccagccacccaaaacttcatcataccaaagaaggagattcacaccgtgcccgatatggggaagtggaagcgctcccaagcctacgccgactacatcggtttcattctcacgctcaacgagggagtgaaagggaaaaaacttacctttgaatatcgcgtgtcagaggcaattgagaagctggtggcgctactgaacaccctggacaggtggattgacgagactcctcctgttgaccagccctcacggtttggaaacaaggcttaccgaacctggtacgccaaattggacgaggaagctgaaaacctcgtagccacggtggtcccgacccatctggcggccgctgtacccgaagttgcagtgtatctcaaagagtccgtcggcaacagcacacggattgattacggcacagggcatgaggccgcattcgccgctttcctgtgttgcttgtgtaaaatcggggtcttacgcgtggacgaccagattgctatagtttttaaagtgttcaaccggtatttagaagtgatgaggaagctgcaaaagacctatcggatggagcccgcggggagccagggggtctggggccttgatgacttccagttcttacccttcatttggggcagctctcaacttattgatcatccttacctggagcctcgtcactttgtggatgaaaaggccgtcaatgagaatcataaggactatatgttcctcgagtgtatcctgtttattactgagatgaagactggcccattcgctgagcacagtaatcagctgtggaacatctctgctgtgccttcctggagtaaggtaaaccagggtctgattaggatgtataaagcagaatgtttagaaaagtttccagtgatccagcatttcaaatttgggagtctgttaccaattcacccggtcacaagcggttag

SEQ ID NO: 207710 - DNA, 972 bp, Artificial Sequence
  derived and/or modified sequence
atggccgagggcgagcggcagcccccccccgacagcagcgaggaggctcccccagcaacccagaactttattatccccaagaaagagattcacactgtcccagacatggggaaatggaaaaggtctcaagcttatgctgactatatcggtttcatcctcactctgaacgagggagtcaaggggaaaaaacttacattcgagtacagggttagcgaggctatcgagaagctggtcgctctgctgaatacgctcgataggtggatcgatgagaccccaccggttgatcaaccaagccgcttcggcaacaaggcttacaggacatggtatgcgaaactggacgaggaggccgaaaatctcgtcgctactgtggttccaacccaccttgcagccgcagtgccagaggtcgcagtgtatctgaaggagtcagtgggaaactctacccgaattgattatgggaccggacacgaagctgctttcgccgccttcctgtgctgcctctgcaagataggcgtcctccgggtggacgaccagatcgccatcgtgtttaaggtgtttaaccggtacctcgaggtgatgcgcaagctacagaagacctacagaatggaaccggctggcagtcagggagtgtggggcctggacgacttccagtttctccccttcatctggggatcatcccagctcattgaccacccatatctggaacctaggcatttcgtggatgagaaagcagtgaacgagaaccacaaggactatatgttcctggagtgcattctcttcatcacagagatgaagaccggaccgtttgccgagcattcaaaccagttatggaacattagcgcagtgccttcctggtctaaggtgaatcaaggcctcatcaggatgtataaggccgagtgtttggagaaatttcctgtcatccagcattttaagtttggaagtctgcttccgatacacccagtgacgtccggatag

SEQ ID NO: 207711 - DNA, 990 bp, Artificial Sequence
  derived and/or modified sequence
atggccgaaggggagcgccagccaccacctgattcatcagaagaggcacctcccgctacgcagaacttcatcattccaaaaaaagagattcacaccgtacctgacatgggaaagtggaagagatctcaagtgcctttcggtaccgtagcctatgccgactatatcgggtttattctgaccttgaatgagggtgtgaagggaaaaaagctaacattcgagtatagagtaagcgaggctatagagaaattggttgcactgctcaatactctagacaggtggatcgatgagactccccctgtggatcaaccctccagattcgggaataaagcataccggacatggtacgctaagctggacgaggaagctgagaacctggtggcaacggttgtgccaacccacttggcggcagccgtacccgaagttgctgtgtatttgaaggagagcgttggaaacagtactcgtattgactacggcacgggtcacgaggccgcttttgccgcattcctgtgctgcctgtgcaagatcggtgtcctgcgagtagacgaccagatagctatagtgttcaaggtgtttaacagatacttggaagttatgcgaaagctgcagaagacctatcgcatggaacctgccggatcccaaggagtatggggcctggatgactttcaattccttccattcatctgggggtcttctcagctgatcgaccacccttatctggaacctcgccatttcgttgacgagaaggctgtgaacgaaaaccacaaagattatatgtttctggagtgcatattgttcattaccgaaatgaagaccggccctttcgcagagcactccaaccaactgtggaacatttccgcagtaccttcctggtctaaagtaaaccagggcctaattcgaatgtataaggcagaatgcctggaaaaatttcccgtgattcaacatttcaaattcggatctttgctgcctatccaccccgtaacatccgggtag

SEQ ID NO: 207712 - DNA, 972 bp, Artificial Sequence
  derived and/or modified sequence
atggcagagggcgaaaggcagccgcctcctgactcttctgaggaagccccacccgcaactcagaatttcataattccaaaaaaagaaattcacaccgtccccgatatgggcaaatggaagaggagtcaggcctatgctgattatatcgggttcattcttactcttaacgagggcgtgaaaggaaaaaagttgacattcgagtatcgggtgagcgaagccatagagaagctagttgccctcctgaatacgctcgaccggtggatcgacgagaccccccctgttgatcagcccagcaggttcgggaataaggcttatagaacttggtacgccaaactggacgaggaagcggagaacctggtcgccacagtggttccgacgcacctagctgccgcagtgcccgaggtcgcagtgtaccttaaagagtcagtcggaaattctactaggattgactatggcaccggccacgaagctgcctttgctgcctttttgtgctgcctatgtaagataggggtgctgcgggttgacgatcaaattgccattgtatttaaggttttcaaccgttatttagaagtaatgcgcaagctgcagaagacatatcgaatggagccggctggatcccaaggcgtctgggggctggacgacttccagttcttgccatttatctgggggagttctcagctaattgaccacccgtacctggagccacgccacttcgtggatgaaaaggcagtcaacgaaaaccacaaagattacatgttccttgagtgcatcctcttcataactgagatgaagaccggaccatttgctgaacacagcaatcaactatggaacatcagcgcggtgcctagctggtcgaaggtcaatcagggtctgattaggatgtacaaggcggaatgcctggagaagttccccgttatccagcattttaagtttggctctcttctgccaatccatccggttaccagcggctag

SEQ ID NO: 207713 - DNA, 972 bp, Artificial Sequence
  derived and/or modified sequence
atggccgagggggagcggcaacctcctccagacagttcagaagaagcgcctccggcaactcaaaatttcatcataccgaaaaaggaaatccacacagttcctgatatgggaaagtggaaacgaagtcaggcctatgcggactacattggctttatactcaccctgaacgaaggtgtgaagggcaagaaattgactttcgagtaccgtgtctcagaagccattgagaagctcgtggcgttgttaaatacactggatagatggatcgacgaaacccctccagtcgatcagcctagtcggtttggaaacaaagcatatcgtacttggtatgctaagctagacgaagaagcagagaacttggtggcaactgtggtgcccacccacctggctgccgctgttcccgaggtggccgtgtatctgaaagagtctgtgggcaacagtactagaattgattatggcacaggtcatgaagctgctttcgccgcttttttatgctgcctctgcaagattggagtgctgagagtagatgaccagatcgccatcgttttcaaggtttttaaccgctatttggaggtgatgcggaaacttcagaagacgtaccgaatggagccagccggatctcaaggagtctgggggctagatgactttcagtttttgccttttatttggggctcaagccagctaattgatcacccctacctagaacccaggcacttcgtggacgagaaggctgtgaatgagaaccacaaagattatatgttcctagagtgcatactgttcattactgaaatgaagaccggtccgttcgctgagcacagcaatcagctctggaatatctcggctgtgccgtcctggtccaaagtcaatcagggtttgatcaggatgtacaaagccgaatgcctcgagaaatttccagtgatccagcatttcaagttcggctcacttttacccatacaccccgtgacaagtggatag

SEQ ID NO: 207714 - DNA, 967 bp, Artificial Sequence
  derived and/or modified sequence
gtgtgggaggctcaggagggcgagagtcatgacacggaggaactggaggggcaaaagctgaggggccccgaggagggactgagttgaatggccttaggggagagattcttcagaggaggcccctccagccactcagaacttcatcattccaaaaaaggagatccacacagttccagacatgggcaaatggaagcgttctcaggcatacgctgactacatcggattcatccttaccctcaacgaaggtgtgaaggggaagaagctgaccttcgagtacagagtctccgaggccattgagaaactagtcgctcttctcaacacgctggacaggtggattgatgagactcctccagtggaccagccctctcggtttgggaataaggcatacaggacctggtatgccaaacttgatgaggaagcagaaaacttggtggccacagtggtccctacccatctggcagctgctgtgcctgaggtggctgtttacctaaaggagtcagtggggaactccacgcgcattgactacggcacagggcatgaggcagccttcgctgctttcctctgctgtctctgcaagattggggtgctccgggtggatgaccaaatagctattgtcttcaaggtgttcaatcggtaccttgaggttatgcggaaactccagaaaacatacaggatggagccagccggcagccagggagtgtggggtctggatgacttccagtttctgcccttcatctggggcagttcgcagctgatagaccacccatacctggagcccagacactttgtggatgagaaggccgtgaatgagaaccacaaggactacatgttcctggagtgtatcctgtttattaccgagatgaagactggcccatttgcagagcactccaaccagctgtggaacatcagcgccgtcccttcctggtccaaagtgaaccagggtctcatccgcatgtataaggccgag

SEQ ID NO: 207715 - DNA, 990 bp, Artificial Sequence
  derived and/or modified sequence
atggccgagggcgagagacagcccccccccgacagcagcgaggaggccccccccgccacccagaacttcatcatccccaagaaggagatccacaccgtgcccgacatgggcaagtggaagagaagccaggtgcccttcggcaccgtggcctacgccgactacatcggcttcatcctgaccctgaacgagggcgtgaagggcaagaagctgaccttcgagtacagagtgagcgaggccatcgagaagctggtggccctgctgaacaccctggacagatggatcgacgagaccccccccgtggaccagcccagcagattcggcaacaaggcctacagaacctggtacgccaagctggacgaggaggccgagaacctggtggccaccgtggtgcccacccacctggccgccgccgtgcccgaggtggccgtgtacctgaaggagagcgtgggcaacagcaccagaatcgactacggcaccggccacgaggccgccttcgccgccttcctgtgctgcctgtgcaagatcggcgtgctgagagtggacgaccagatcgccatcgtgttcaaggtgttcaacagatacctggaggtgatgagaaagctgcagaagacctacagaatggagcccgccggcagccagggcgtgtggggcctggacgacttccagttcctgcccttcatctggggcagcagccagctgatcgaccacccctacctggagcccagacacttcgtggacgagaaggccgtgaacgagaaccacaaggactacatgttcctggagtgcatcctgttcatcaccgagatgaagaccggccccttcgccgagcacagcaaccagctgtggaacatcagcgccgtgcccagctggagcaaggtgaaccagggcctgatcagaatgtacaaggccgagtgcctggagaagttccccgtgatccagcacttcaagttcggcagcctgctgcccatccaccccgtgaccagcggctag

SEQ ID NO: 207716 - DNA, 972 bp, Artificial Sequence
  derived and/or modified sequence
atggccgagggcgagagacagcccccccccgacagcagcgaggaggccccccccgccacccagaacttcatcatccccaagaaggagatccacaccgtgcccgacatgggcaagtggaagagaagccaggcctacgccgactacatcggcttcatcctgaccctgaacgagggcgtgaagggcaagaagctgaccttcgagtacagagtgagcgaggccatcgagaagctggtggccctgctgaacaccctggacagatggatcgacgagaccccccccgtggaccagcccagcagattcggcaacaaggcctacagaacctggtacgccaagctggacgaggaggccgagaacctggtggccaccgtggtgcccacccacctggccgccgccgtgcccgaggtggccgtgtacctgaaggagagcgtgggcaacagcaccagaatcgactacggcaccggccacgaggccgccttcgccgccttcctgtgctgcctgtgcaagatcggcgtgctgagagtggacgaccagatcgccatcgtgttcaaggtgttcaacagatacctggaggtgatgagaaagctgcagaagacctacagaatggagcccgccggcagccagggcgtgtggggcctggacgacttccagttcctgcccttcatctggggcagcagccagctgatcgaccacccctacctggagcccagacacttcgtggacgagaaggccgtgaacgagaaccacaaggactacatgttcctggagtgcatcctgttcatcaccgagatgaagaccggccccttcgccgagcacagcaaccagctgtggaacatcagcgccgtgcccagctggagcaaggtgaaccagggcctgatcagaatgtacaaggccgagtgcctggagaagttccccgtgatccagcacttcaagttcggcagcctgctgcccatccaccccgtgaccagcggctag

SEQ ID NO: 207717 - protein, 524 aa, Artificial Sequence
  derived and/or modified sequence
MAAPEPARAAPPPPPPPPPPPGADRVVKAVPFPPTHRLTSEEVFDLDGIPRVDVLKNHLVKEGRVDEEIALRIINEGAAILRREKTMIEVEAPITVCGDIHGQFFDLMKLFEVGGSPANTRYLFLGDYVDRGYFSIECVLYLWVLKILYPSTLFLLRGNHECRHLTEYFTFKQECKIKYSERVYEACMEAFDSLPLAALLNQQFLCVHGGLSPEIHTLDDIRRLDRFKEPPAFGPMCDLLWSDPSEDFGNEKSQEHFSHNTVRGCSYFYNYPAVCEFLQNNNLLSIIRAHEAQDAGYRMYRKSQTTGFPSLITIFSAPNYLDVYNNKAAVLKYENNVMNIRQFNCSPHPYWLPNFMDVFTWSLPFVGEKVTEMLVNVLSICSDDELMTEGEDQFDGSAAARKEIIRNKIRAIGKMARVFSVLREESESVLTLKGLTPTGMLPSGVLAGGRQTLQSATVEAIEAEKAIRGFSPPHRICSFEEAKGLDRINERMPPRKDAVQQDGFNSLNTAHATENHGTGNHTAQ

SEQ ID NO: 207718 - protein, 152 aa, Artificial Sequence
  derived and/or modified sequence
MLVNVLSICSDDELMTEGEDQFDGSAAARKEIIRNKIRAIGKMARVFSVLREESESVLTLKGLTPTGMLPSGVLAGGRQTLQSATVEAIEAEKAIRGFSPPHRICSFEEAKGLDRINERMPPRKDAVQQDGFNSLNTAHATENHGTGNHTAQ

SEQ ID NO: 207719 - DNA, 1575 bp, Artificial Sequence
  derived and/or modified sequence
atggccgcccccgagcccgccagagccgcccccccccccccccccccccccccccccccccccggcgccgacagagtggtgaaggccgtgcccttcccccccacccacagactgaccagcgaggaggtgttcgacctggacggcatccccagagtggacgtgctgaagaaccacctggtgaaggagggcagagtggacgaggagatcgccctgagaatcatcaacgagggcgccgccatcctgagaagagagaagaccatgatcgaggtggaggcccccatcaccgtgtgcggcgacatccacggccagttcttcgacctgatgaagctgttcgaggtgggcggcagccccgccaacaccagatacctgttcctgggcgactacgtggacagaggctacttcagcatcgagtgcgtgctgtacctgtgggtgctgaagatcctgtaccccagcaccctgttcctgctgagaggcaaccacgagtgcagacacctgaccgagtacttcaccttcaagcaggagtgcaagatcaagtacagcgagagagtgtacgaggcctgcatggaggccttcgacagcctgcccctggccgccctgctgaaccagcagttcctgtgcgtgcacggcggcctgagccccgagatccacaccctggacgacatcagaagactggacagattcaaggagccccccgccttcggccccatgtgcgacctgctgtggagcgaccccagcgaggacttcggcaacgagaagagccaggagcacttcagccacaacaccgtgagaggctgcagctacttctacaactaccccgccgtgtgcgagttcctgcagaacaacaacctgctgagcatcatcagagcccacgaggcccaggacgccggctacagaatgtacagaaagagccagaccaccggcttccccagcctgatcaccatcttcagcgcccccaactacctggacgtgtacaacaacaaggccgccgtgctgaagtacgagaacaacgtgatgaacatcagacagttcaactgcagcccccacccctactggctgcccaacttcatggacgtgttcacctggagcctgcccttcgtgggcgagaaggtgaccgagatgctggtgaacgtgctgagcatctgcagcgacgacgagctgatgaccgagggcgaggaccagttcgacggcagcgccgccgccagaaaggagatcatcagaaacaagatcagagccatcggcaagatggccagagtgttcagcgtgctgagagaggagagcgagagcgtgctgaccctgaagggcctgacccccaccggcatgctgcccagcggcgtgctggccggcggcagacagaccctgcagagcgccaccgtggaggccatcgaggccgagaaggccatcagaggcttcagccccccccacagaatctgcagcttcgaggaggccaagggcctggacagaatcaacgagagaatgccccccagaaaggacgccgtgcagcaggacggcttcaacagcctgaacaccgcccacgccaccgagaaccacggcaccggcaaccacaccgcccagtag

SEQ ID NO: 207720 - DNA, 459 bp, Artificial Sequence
  derived and/or modified sequence
atgctggtgaacgtgctgagcatctgcagcgacgacgagctgatgaccgagggcgaggaccagttcgacggcagcgccgccgccagaaaggagatcatcagaaacaagatcagagccatcggcaagatggccagagtgttcagcgtgctgagagaggagagcgagagcgtgctgaccctgaagggcctgacccccaccggcatgctgcccagcggcgtgctggccggcggcagacagaccctgcagagcgccaccgtggaggccatcgaggccgagaaggccatcagaggcttcagccccccccacagaatctgcagcttcgaggaggccaagggcctggacagaatcaacgagagaatgccccccagaaaggacgccgtgcagcaggacggcttcaacagcctgaacaccgcccacgccaccgagaaccacggcaccggcaaccacaccgcccagtag

SEQ ID NO: 207721 - DNA, 1575 bp, Artificial Sequence
  derived and/or modified sequence
atggcagcaccagagcctgcaagggccgcccctcctccaccacccccgccgcccccccccccgggggcagatcgcgtggtaaaagccgtcccatttcccccaacacatcggctgacctctgaggaggtcttcgatctagatggaatcccccgtgttgatgtgctgaagaaccatctcgtaaaggagggccgcgtggacgaagagattgccctacgtatcattaacgagggcgcggccatactccggagggagaaaacaatgatagaggttgaagcccccatcacagtatgtggggatattcacggacagttcttcgacctgatgaagctgttcgaagtcggagggtcacctgctaacacgagatatttatttctcggggactacgtggataggggatatttcagcatcgagtgtgtactttatctctgggttctgaaaattctctatccttcaacactgtttctgcttaggggcaaccatgaatgtagacatctgaccgaatactttacattcaagcaggagtgcaaaatcaaatattcagagcgcgtgtatgaggcttgtatggaggcctttgactcacttcccttagccgccctcttaaaccagcagtttctctgtgttcacggtggcctcagtcctgagattcatacgctggacgatatcaggagactggaccgctttaaggagccacccgcgtttggaccaatgtgtgatttgctgtggagtgatccttccgaggacttcggaaacgaaaagtctcaggagcacttcagccataacacggtgagaggatgctcttacttttataactaccctgctgtgtgtgaattcttacagaacaacaacctgctctccatcattagggcacacgaagctcaggacgccggctaccgcatgtacaggaagagtcagaccaccgggttcccatctctgataactatttttagtgctccaaattacttagacgtctacaataacaaggcagcggttctgaaatatgaaaacaatgtcatgaacatccgccagttcaattgttcaccccatccctactggctgcctaatttcatggatgtgtttacgtggagcctgccattcgtcggcgagaaggtaaccgagatgctggtgaatgtgcttagtatctgtagcgacgatgaacttatgaccgagggagaggaccaattcgacggcagcgctgccgccagaaaagagatcattaggaacaagattagggccatcggtaaaatggcacgagtgttcagcgtcctgcgtgaagagagcgaaagtgtgttgaccctgaaggggcttaccccaaccgggatgttaccttctggtgtgctcgccggtgggcggcagacactccaatccgccaccgtggaggcgatcgaagcagagaaggccatcaggggattcagccccccgcaccgtatttgttctttcgaagaggccaagggcttggatcggattaatgagaggatgcctccgcgcaaggatgcagtgcagcaggatgggtttaatagtcttaatacagctcacgcaaccgaaaatcatggcacggggaatcacaccgctcagtag

SEQ ID NO: 207722 - DNA, 459 bp, Artificial Sequence
  derived and/or modified sequence
atgctggttaacgtgttatctatttgctcagacgacgaactgatgactgagggcgaagaccagtttgatggaagcgctgccgcacgaaaggagatcatccgaaacaagatccgcgccatcggaaagatggcccgcgtatttagcgttctaagagaggagtccgaatctgtcctcacgttaaaagggctgaccccaaccgggatgttgccctccggggttctggcaggcggacggcaaacactgcagtctgccactgtggaagccatagaggctgaaaaagccattcggggtttcagtcctccacaccgaatctgcagcttcgaggaggcaaagggcttggataggattaatgagcgcatgcctccccgcaaagatgccgtgcaacaggatgggttcaatagcctgaatactgcgcacgccaccgagaaccatggtacaggcaaccacaccgcccagtag

SEQ ID NO: 207723 - DNA, 1575 bp, Artificial Sequence
  derived and/or modified sequence
atggccgcccctgagcccgcccgggccgcccctcctcctcctcctcctcctcctcctcctcctggagctgacagagtggtgaaggctgtgcccttcccccccacccaccggctgaccagcgaggaggtgtttgacctggatggcatcccccgggtggatgtgctgaagaaccacctggtgaaggagggccgggtggatgaggagatcgccctgcgcatcatcaatgaaggagctgccatcctgcggcgggagaagaccatgattgaggtggaggcccccatcaccgtgtgtggggacatccacggccagttctttgacctgatgaagctgtttgaggtgggcggcagccctgccaacacccgctacctgttcctgggggactatgtggaccggggctacttcagcattgaatgtgtgctgtacctgtgggtgctgaagatcctgtaccccagcaccctcttcctgctgcggggcaaccatgaatgtcgccacctgacagagtacttcaccttcaagcaggagtgcaagatcaagtacagcgagcgggtgtatgaggcctgcatggaggcctttgacagcctgcccctggccgccctgctgaaccagcagttcctgtgtgtgcacggcggcctgagccctgagatccacaccctggatgacatccggcggctggaccgcttcaaggagcccccagccttcggccccatgtgtgacctgctgtggagcgaccccagcgaggactttggaaatgagaagagccaggagcacttcagccacaacacagtgcggggctgcagctacttctacaactacccagctgtgtgtgagttcctgcagaacaacaacctgctgagcatcatccgggcccacgaggcccaggatgctggctacaggatgtacaggaagagccagaccaccggcttccccagcctcatcaccatcttcagcgcccccaactacctggatgtgtacaacaacaaggctgctgtgctgaagtatgagaacaacgtgatgaacatccggcagttcaactgcagcccccacccctactggctgcccaacttcatggatgtgttcacctggagcctgccctttgtgggggagaaggtgacagagatgctggtgaatgtgctgagcatctgcagtgatgatgagctgatgacagaaggagaggaccagtttgatggcagcgctgctgccaggaaggagatcatccggaacaagatccgggccatcggcaagatggcccgggtcttctctgtgctgcgggaggagagcgagagcgtgctgaccctgaagggcctgacccccaccggcatgctgcccagcggcgtgctggccggcggccggcagaccctgcagagcgccaccgtggaggccattgaagctgagaaggccatccggggcttcagccccccccaccgcatctgcagctttgaggaggccaagggcctggaccgcatcaatgaaagaatgccacccaggaaggatgctgtgcagcaggacggcttcaacagcctgaacacagcccacgccacagagaaccacggcaccggcaaccacacagcccagtag

SEQ ID NO: 207724 - DNA, 459 bp, Artificial Sequence
  derived and/or modified sequence
atgctggtgaatgtgctgagcatctgcagtgatgatgagctgatgacagaaggagaggaccagtttgatggcagcgctgctgccaggaaggagatcatccggaacaagatccgggccatcggcaagatggcccgggtcttctctgtgctgcgggaggagagcgagagcgtgctgaccctgaagggcctgacccccaccggcatgctgcccagcggcgtgctggccggcggccggcagaccctgcagagcgccaccgtggaggccattgaagctgagaaggccatccggggcttcagccccccccaccgcatctgcagctttgaggaggccaagggcctggaccgcatcaatgaaagaatgccacccaggaaggatgctgtgcagcaggacggcttcaacagcctgaacacagcccacgccacagagaaccacggcaccggcaaccacacagcccagtag

SEQ ID NO: 207725 - DNA, 1575 bp, Artificial Sequence
  derived and/or modified sequence
atggccgcccccgagcccgcccgggccgcccccccccccccccccccacctcctcccccacccggcgcagaccgagtggtgaaggccgtcccatttccccccacccataggctcacctcagaggaagttttcgacttagacggcattcctagagtcgacgttctgaagaaccacctcgtcaaggaaggccgagttgatgaggagatagccttaaggatcatcaatgagggtgcagccattctgcgtagggaaaaaactatgatcgaggtcgaggcgcccatcacagtgtgcggcgacattcatggtcagttctttgatttgatgaaattgtttgaggtgggcggtagcccagccaatactagatacctgtttctgggtgactatgtcgatagaggatatttttctattgagtgtgtattatacttatgggtgctcaaaatcctttacccttccactcttttcctcctgagaggaaaccatgaatgcagacacctcaccgaatatttcaccttcaagcaggaatgcaaaatcaagtactcagaaagggtctacgaggcttgcatggaagcgtttgattccctccctctggcagcgctgttaaaccagcaattcctttgtgtgcatggaggcctcagcccagaaattcacacactggacgatatccggcgtctcgatcggttcaaggagcccccagcttttgggccaatgtgtgacctcctgtggagcgacccaagcgaggatttcggtaatgagaaatcacaggagcacttttcacacaatactgtgcggggatgctcctatttctacaattatccagcagtgtgcgagttcttacagaacaataatctcttgagcatcattcgggctcatgaagcacaagatgcaggttatcgtatgtacagaaaatcgcaaaccacaggcttcccctcgttaattactatcttttccgcaccgaattatcttgacgtgtataataacaaagccgccgtgctgaaatacgagaataatgttatgaacatccggcagttcaactgtagcccccacccatactggctaccaaactttatggacgttttcacatggagcttgcctttcgtcggcgaaaaagtaactgaaatgcttgtgaatgtgctgtcgatttgctccgatgatgaactgatgaccgagggcgaggaccaatttgacgggagcgccgcggcaagaaaggagattattcggaataagattcgtgcgatcggtaagatggccagagtgtttagcgtgttaagggaggaatccgaatcagtgctgacattaaaggggctcacgcccactggtatgttgccctctggtgtgttggccggaggacgtcagacgctgcaaagcgccactgtggaggcgattgaggccgaaaaagcaattaggggcttttctccaccacaccggatttgcagtttcgaggaagccaagggactggatcgcataaatgaacgaatgcccccccgaaaggatgctgtacaacaggatgggttcaattcgctgaacactgcgcacgccaccgaaaatcacgggaccggtaatcacacagcccagtag

SEQ ID NO: 207726 - DNA, 459 bp, Artificial Sequence
  derived and/or modified sequence
atgctggtgaacgtgctgagcatctgcagcgacgacgagctgatgaccgaaggcgaggaccagtttgatggctcagccgctgccaggaaggaaatcataagaaacaagatccgagccattgggaagatggcgcgggtgtttagcgtgttgcgcgaagaatctgagagcgtgctgaccctgaagggattgacacccaccggcatgcttccatcaggagtgctcgctggtggccgacaaaccctgcagtcggccactgttgaagcaattgaggcggagaaagccattagaggatttagccctccacacaggatatgttccttcgaagaggcaaaagggctggatcggatcaacgagcgcatgccccccaggaaagacgccgtccagcaggatgggttcaattctttgaataccgcacacgccacagagaaccacgggaccggcaaccacactgcccaatag

SEQ ID NO: 207727 - DNA, 1575 bp, Artificial Sequence
  derived and/or modified sequence
atggctgctccagagccagcacgcgctgctccaccacccccaccgccaccgccaccccctcctggtgccgatcgcgtggtgaaagctgtgccttttcccccaactcatcggctaaccagcgaggaggtattcgacttggacggtatacccagggtagacgtactgaagaaccacctggttaaagagggcagagtggacgaagagatcgcactgagaattatcaatgaaggggctgcaattctacggagagaaaaaactatgatcgaggtggaggctcctatcaccgtatgtggtgacatccatggacagttcttcgacctgatgaaactgttcgaggtgggcggatctcccgctaatactagatacctgttcctgggggactacgtggatcgtggctattttagtatcgagtgtgtgctgtatctgtgggtgctgaaaatcctgtatccatcaacgttattcctcctccgcggtaatcacgagtgcagacacctgacggaatatttcacattcaaacaggagtgcaaaatcaagtattctgagagagtgtatgaggcctgcatggaggcattcgacagcctgcctctggctgctctgttaaatcaacagtttctatgtgtccacggcggactctctccggaaatccacaccctcgatgatatcaggcgactggatcgttttaaggagccgcctgccttcgggcctatgtgcgacttactctggtctgacccctcagaagatttcggtaatgagaaaagccaggaacatttttctcataacacagtgcggggatgctcttatttttataactatcccgcagtgtgcgagtttttgcaaaataacaatctcctgtccatcatccgcgctcacgaagctcaggatgccggttacagaatgtacagaaaaagccaaactaccggcttcccttccctgatcactatatttagtgcccctaattatcttgatgtgtacaacaacaaagctgccgtgcttaagtatgagaacaacgttatgaacataagacaatttaattgtagtccgcacccctactggctgcccaactttatggacgtgttcacttggtcactgcctttcgtaggtgagaaggtgactgagatgctcgttaacgttctgtccatttgctcagatgacgagcttatgactgagggcgaagaccagttcgacggttccgccgcagcgaggaaagagataattcggaacaagatccgagccatcggaaagatggcaagagtgttcagtgtgttgcgggaggagtccgagagcgtgctaacactcaagggactgaccccaacaggaatgttgccatccggggttttggcgggaggccgacagactttacagagcgcgacggtcgaggccatcgaggccgagaaagctatccggggtttttcgccgcctcaccgcatttgtagtttcgaggaagccaagggattagaccgtataaatgagcgaatgccccctaggaaggacgctgtgcaacaggacggatttaacagtctgaataccgctcacgccacagagaatcacggcacaggaaatcacaccgcccagtag

SEQ ID NO: 207728 - DNA, 459 bp, Artificial Sequence
  derived and/or modified sequence
atgctagtgaacgttctcagcatctgcagtgacgacgagctgatgactgaaggcgaagatcagttcgacggaagcgctgccgcacggaaagaaattattcggaataagattcgagcaatcggcaagatggctagagtgttctctgtgctgagggaggaaagtgagagtgtgctcactctcaagggattgacaccgacagggatgttgccttcaggcgttctcgccggtgggcgacaaacgcttcagtctgccactgtagaggctatcgaagcagagaaggcaatcagggggtttagcccaccccaccgtatatgctctttcgaagaggcaaagggactggaccgcatcaacgaacgcatgccccctaggaaggacgctgtccagcaggacggctttaactcgctcaatactgcacatgccaccgaaaatcacggaacagggaaccacactgctcagtag

SEQ ID NO: 207729 - DNA, 3501 bp, Artificial Sequence
  derived and/or modified sequence
gggaaagagggtccgccatgttccccggcggcgccgccgcttggctctggtagccgccgcccccgcccccaaccccgcccggcccagagcctagccgagccccgggcccagcatggccgccccggagccggcccgggctgcaccgcccccacccccgcccccgccgccccctcccggggctgaccgcgtcgtcaaagctgtccctttccccccaacacatcgcttgacatctgaagaagtatttgatttggatgggatacccagggttgatgttctgaagaaccacttggtgaaagaaggtcgagtagatgaagaaattgcgcttagaattatcaatgagggtgctgccatccttcggagagagaaaaccatgatagaagtagaagctccaatcacagtgtgtggtgacatccatggccaattttttgatctgatgaaactttttgaagtaggaggatcacctgctaatacacgatacctttttcttggcgattatgtggacagaggttattttagtatagagtgtgtcttatatttatgggttctgaagattctatacccaagcacattatttcttctgagaggcaaccatgaatgcagacaccttactgaatattttacctttaagcaggaatgtaaaattaagtattcggaaagagtctatgaagcttgtatggaagcttttgatagtttgcctcttgctgcacttttaaaccaacagtttctttgtgttcatggtggactttcaccagaaatacacacactggatgatattaggagattagatagattcaaagagccacctgcatttggaccaatgtgtgacttgttatggtccgatccttctgaagattttggaaatgaaaaatcacaggaacattttagtcacaatacagttcgaggatgttcttatttttataactatccagcagtgtgtgaatttttgcaaaacaataatttgttatcgattattagagctcatgaagctcaagatgcaggctatagaatgtacagaaaaagtcaaactacagggttcccttcattaataacaattttttcggcacctaattacttagatgtctacaataataaagctgctgtattaaagtatgaaaataatgtgatgaatattcgacagtttaactgttctccacatccttactggttgcctaattttatggatgtcttcacgtggtctttaccgtttgttggagaaaaagtgacagaaatgttggtaaatgttctgagtatttgctctgatgatgaactaatgactgaaggtgaagaccagtttgatggttcagctgcagcccggaaagaaatcataagaaacaaaattcgagcaattggcaagatggcaagagtcttctctgttctcagggaggagagtgaaagtgtgctgacactcaagggcctgactcccacagggatgttgcctagtggagtgttagctggaggacggcagaccctgcaaagtgccacagttgaggctattgaggctgaaaaagcaatacgaggattctctccaccacatagaatctgcagttttgaagaggcaaagggtttggataggatcaatgagagaatgccacctcggaaagatgctgtacagcaagatggtttcaattctctgaacaccgcacatgccactgagaaccacgggacgggcaaccatactgcccagtgacccactacttcccagggactctcacatctcgggccccaaatggacagatcacccgaggagctggaggggtcggccaagctgactgtaaatttcacagtctctctgaagaaaccattgtgcttctgagaccctagcccccttcctggatggaggcttgagggccctgggacatgtgctatctgataagattgggtcatcgctgccaaggtggagagcagtgagcaaggggcttggggcaatttccagtggagggcatccacacctccattttatgcttgtggttcacacatttaagtttacaaatcagatttcttttccccttcagtagaattagattttgtttttcaatcatgatttcaaatgcaatcctaagagctaatgtggacttttctttttccatgaaatgtctttaaaggatgaattagcatggtcttaaaatacatttctgaggttactagctgtattttgaattgtgagcaaaatgccgagaaacccagttggcatttatacaaaatgttgacctcaggtctatagttcttaaatgtggctaattctgtaacatagtcttggtattttttaattatgaatgcatatcctatttccaggcaggctctcttacttgaacacaaatccaaaaactaatttagagtcttttttgcccagatcttttaagacttacaccccagagatttaagaagaaaacctctaaatttcaaaattatgaagaattacagaattactcatttaaggtactttaaaagaagtttgtacattgtcaaagtaaattttaattcaaatcatgtctgtaaaacttgacgtattttgtgtatgcatgttttcattttgcaaatatttaatatatagacctatgatgtacaggtacgacatgtataggttacctagatgttatgagaaattttagtttattgtgagtactcaagttgcttagagagccaccagggtgatttgctgctggctttctatcatttttatgttttaatgcaaaggaaattttaaaatgttctggaagtgtttttgattaagcaatgcagcctagaagcaatggttctgttcaatcattcagatgttagtggaagcataaaagtcaagactgcatgttgaaacctttcttttgatagttactgaactgcttggttaaactaaatggaaccatgtgctaatttttcacaattattgacctgtattgattgccactgtagtttggtatttccctttactttggtggcctgcttccctcatgccctggaatacaactcagagctccaggcagcggaaccatctattgttttgtttgccagaaagtgcaccctgtatggtctcctgtctaagttggaaatattatgcatgtgcaggactattcgagtattttataaacagtagcacacaataaattccatgcatgggccgctgctcctatctctgtgttgggttttatttggaagatgcaatctgatttgtccttttgatgcaaatcagaaaatcctgttactagagctgggatgtcctccggagattatctcgtggatagttcatggtaatttgattaattaaattctttataaattttgccttaaaaaaaacttttgttatatacttgttttacatgagcattagtaactgagcactagaggactttgaatgcctactgtaggcctcctaagtctaatatttaagatcactgtttattgtcttttaattgaaagaaaatatgttattgtctagaattttgttatagtggtattgggaatttactgggtgttctaacaataagaaaaatattagtgataattgca

SEQ ID NO: 207730 - DNA, 1509 bp, Artificial Sequence
  derived and/or modified sequence
aatgtaatatgggaaggatggaggggccaggaagataagtgacagaaatgttggtaaatgttctgagtatttgctctgatgatgaactaatgactgaaggtgaagaccagtttgatggttcagctgcagcccggaaagaaatcataagaaacaaaattcgagcaattggcaagatggcaagagtcttctctgttctcagggaggagagtgaaagtgtgctgacactcaagggcctgactcccacagggatgttgcctagtggagtgttagctggaggacggcagaccctgcaaagtgccacagttgaggctattgaggctgaaaaagcaatacgaggattctctccaccacatagaatctgcagttttgaagaggcaaagggtttggataggatcaatgagagaatgccacctcggaaagatgctgtacagcaagatggtttcaattctctgaacaccgcacatgccactgagaaccacgggacgggcaaccatactgcccagtgacccactacttcccagggactctcacatctcgggccccaaatggacagatcacccgaggagctggaggggtcggccaagctgactgtaaatttcacagtctctctgaagaaaccattgtgcttctgagaccctagcccccttcctggatggaggcttgagggccctgggacatgtgctatctgataagattgggtcatcgctgccaaggtggagagcagtgagcaaggggcttggggcaatttccagtggagggcatccacacctccattttatgcttgtggttcacacatttaagtttacaaatcagatttcttttccccttcagtagaattagattttgtttttcaatcatgatttcaaatgcaatcctaagagctaatgtggacttttctttttccatgaaatgtctttaaaggatgaattagcatggtcttaaaatacatttctgaggttactagctgtattttgaattgtgagcaaaatgccgagaaacccagttggcatttatacaaaatgttgacctcaggtctatagttcttaaatgtggctaattctgtaacatagtcttggtattttttaattatgaatgcatatcctatttccaggcaggctctcttacttgaacacaaatccaaaaactaatttagagtcttttttgcccagatcttttaagacttacaccccagagatttaagaagaaaacctctaaatttcaaaattatgaagaattacagaattactcatttaaggtactttaaaagaagtttgtacattgtcaaagtaaattttaattcaaatcatgtctgtaaaacttgacgtattttgtgtatgcatgttttcattttgcaaatatttaatatatagacctatgatgtacaggtacgacatgtataggttacctagatgttatgagaaattttagtttattgtgagtactcaagttgcttagagagccaccagggtgatttgctgctggctttctatcatttttatgttttaatgc

SEQ ID NO: 207731 - protein, 741 aa, Artificial Sequence
  derived and/or modified sequence
MESRDHNNPQEGPTSSSGRRAAVEDNHLLIKAVQNEDVDLVQQLLEGGANVNFQEEEGGWTPLHNAVQMSREDIVELLLRHGADPVLRKKNGATPFILAAIAGSVKLLKLFLSKGADVNECDFYGFTAFMEAAVYGKVKALKFLYKRGANVNLRRKTKEDQERLRKGGATALMDAAEKGHVEVLKILLDEMGADVNACDNMGRNALIHALLSSDDSDVEAITHLLLDHGADVNVRGERGKTPLILAVEKKHLGLVQRLLEQEHIEINDTDSDGKTALLLAVELKLKKIAELLCKRGASTDCGDLVMTARRNYDHSLVKVLLSHGAKEDFHPPAEDWKPQSSHWGAALKDLHRIYRPMIGKLKFFIDEKYKIADTSEGGIYLGFYEKQEVAVKTFCEGSPRAQREVSCLQSSRENSHLVTFYGSESHRGHLFVCVTLCEQTLEACLDVHRGEDVENEEDEFARNVLSSIFKAVQELHLSCGYTHQDLQPQNILIDSKKAAHLADFDKSIKWAGDPQEVKRDLEDLGRLVLYVVKKGSISFEDLKAQSNEEVVQLSPDEETKDLIHRLFHPGEHVRDCLSDLLGHPFFWTWESRYRTLRNVGNESDIKTRKSESEILRLLQPGPSEHSKSFDKWTTKINECVMKKMNKFYEKRGNFYQNTVGDLLKFIRNLGEHIDEEKHKKMKLKIGDPSLYFQKTFPDLVIYVYTKLQNTEYRKHFPQTHSPNKPQCDGAGGASGLASPGC

SEQ ID NO: 207732 - DNA, 2226 bp, Artificial Sequence
  derived and/or modified sequence
atggagtctcgagaccataataatcctcaggagggacccaccagctcatcaggtcgaagagcggccgtcgaagacaatcacctgctgataaaggcggtgcagaacgaagacgtggatctggtacagcagttgttagagggcggtgcaaatgttaatttccaggaggaagagggaggatggaccccgttgcataatgcggtgcagatgagtcgcgaagacattgttgaactgctgctccggcacggagccgatccagtgttaaggaagaagaatggggccactccattcatactggctgcgatcgctgggagtgtgaagctccttaaattgtttctttccaaaggcgccgacgtcaacgagtgcgacttctacggttttaccgcttttatggaggctgcagtctatggtaaggtgaaggccttgaaattcctgtataaaaggggtgctaacgtgaaccttaggcgcaagacgaaggaagaccaggagcggctgcggaaaggaggggctacggcactgatggatgctgcagaaaagggccacgtggaggtgttgaagatcctgctggacgagatgggagcagatgtaaacgcctgtgacaatatgggccgcaacgctcttattcacgcccttttgtccagcgacgattcagacgtagaagcaatcacacatttgttactggatcacggtgccgacgtcaatgtgagaggtgaacgaggcaagacaccgctgatactcgccgttgagaagaagcatctaggcctggtccagcgcctcctggagcaggaacacattgagattaatgataccgactccgatggcaaaaccgccctgctgctggcagttgaattgaagctcaagaagattgcggagctgctttgcaaacgtggggccagcacagactgcggggacttagtgatgactgcgagaaggaattacgaccacagtttagtaaaggtgctacttagtcatggagctaaagaagacttccatcctcccgccgaagactggaaacctcagtcctctcattggggcgctgcactcaaggacctccatcgcatctaccgtcctatgatcggaaagctgaagttcttcatcgatgagaagtataagatcgcggatacatcagaggggggcatttacttaggcttctatgagaagcaagaggtcgctgtcaagaccttttgcgaaggctccccccgggcccagcgcgaagtctcctgcctccagtcttctcgtgagaactctcacctcgtgaccttttatggatccgagtcccacagagggcacctgtttgtgtgcgtgactttatgcgagcagacattagaggcctgtctcgatgtccatagaggggaggatgtcgaaaatgaggaggacgaatttgccagaaacgtgctgtcttccattttcaaggcagttcaagaattacacttatcatgtggttatactcatcaggacctgcagccacagaacatactcatcgatagcaagaaggcggcgcacctggccgactttgataagagcatcaaatgggccggggatccccaggaggttaaacgcgatctcgaagatctcggaaggttggtgctgtatgtggtcaaaaagggtagtatcagcttcgaggacctgaaagcccagtcaaatgaggaggttgttcagttgtctcccgacgaggagacaaaggatctgatccaccgattgtttcacccaggagaacatgtgagggactgcctgtcggatctgctcgggcatcccttcttttggacatgggagagtcgctatagaacgctgcgcaacgtcggtaatgaaagcgacattaaaactaggaagagcgaatccgagatcctccgcttactccagccaggcccaagtgagcattccaaaagcttcgacaagtggacgacaaaaattaacgaatgcgtgatgaagaaaatgaacaagttctatgaaaagcgaggaaatttctatcagaataccgtgggtgacctactgaagtttatacgaaatctcggggaacacatagacgaggagaaacacaaaaaaatgaagctcaaaattggcgatccctcgctctatttccagaagacatttcccgatctagtaatttatgtttacaccaagctgcagaataccgagtaccgcaagcatttcccccagacccatagcccaaacaaaccgcaatgtgacggagcgggtggcgcctcaggattggcaagccctggttgttag

SEQ ID NO: 207733 - DNA, 2226 bp, Artificial Sequence
  derived and/or modified sequence
atggaatctcgagatcacaacaacccacaggagggccccacaagctccagcggacgcagggctgccgtggaggacaatcacctgcttataaaagcggtgcaaaatgaggacgtcgatctggtgcaacagctgttggaggggggagccaatgtgaactttcaggaggaggagggggggtggacgccgctgcataatgctgttcagatgtctcgggaggacatcgtagagctgctcctcagacatggagcagacccggtactccgcaagaaaaatggcgccaccccatttatcctggccgcaattgccggatccgtgaagcttcttaaattgttcctatctaagggagcagacgtgaacgagtgtgacttctatggatttacagcctttatggaggcagccgtgtacggaaaggtgaaggctctgaagttcttgtacaagcgcggcgcaaacgtgaacctacgaagaaagacgaaggaagaccaggaacgcctccgaaaggggggagctacggcactcatggatgccgcagagaagggacatgtggaagttctgaagatactgctggacgaaatgggtgctgatgtgaacgcctgcgataatatggggaggaatgccctcatacatgccctgctttcctccgacgatagtgacgtcgaagcgatcacccacctgcttctggaccatggggctgatgtgaacgtgcgcggagagcgaggcaagacacctttaatccttgcggtggagaagaagcacctgggtctcgttcaacggctgctggaacaggagcacatagagatcaatgataccgactcagatggcaagacggcgttgctcttggccgtggagctgaagctgaagaagattgccgagcttctgtgtaaaaggggcgcaagtaccgactgtggagacctggtcatgactgctcgacggaattacgaccacagcctcgtgaaggtgttgctttcccacggagctaaggaagacttccaccccccagctgaggactggaagccccaaagcagccactggggtgccgcgttaaaggatctccatcggatctatcggcctatgatcggcaagctcaaatttttcattgatgagaagtataagatagcggatactagcgagggcgggatctatttggggttttatgaaaagcaagaggtggctgtcaagactttttgcgaagggtcccctcgagcccagcgggaggtgagctgtctccaaagttctcgcgagaattcccacttggtgacattctacgggagtgagagtcacagaggtcacctgtttgtctgcgtaaccctttgtgaacagaccttggaagcctgtctggacgttcacagaggcgaggacgtggagaacgaagaagatgaattcgcaagaaacgtactatcgagcatattcaaggctgtgcaggaactacacttgtcctgtggctacactcatcaggatctccagccacagaatatcttaattgactccaagaaagctgcacatctggccgatttcgacaaatccataaagtgggccggcgacccccaggaagttaagagggaccttgaggatctgggaagactggtcctgtatgtcgttaagaaggggtctatctccttcgaagacctgaaagcgcagtccaacgaggaggtagtccagctgtcacctgatgaggagaccaaggatctcatccaccgccttttccatccaggtgagcatgtacgggactgcctctcagacttgctgggccacccattcttttggacttgggagtctcgatacagaacattaagaaacgtggggaacgagtccgacatcaaaacacggaagtcagaaagcgagatcttgcggcttctgcagcccggcccaagcgagcatagtaagtccttcgacaaatggactaccaaaatcaacgagtgtgtgatgaagaaaatgaataagttctatgaaaaaagagggaatttttaccaaaacacagtcggggacctgttgaaattcattcgcaatcttggagaacacatcgatgaggagaagcacaagaagatgaagctaaaaattggcgatcccagcctgtatttccaaaaaacttttcctgatcttgtgatctatgtgtacactaagctccagaacacggaatatagaaagcatttccctcagacacatagccccaataaaccacagtgtgacggtgcgggcggcgcgtccgggttagcaagtcctggatgctag

SEQ ID NO: 207734 - DNA, 2226 bp, Artificial Sequence
  derived and/or modified sequence
atggagagccgggaccacaacaacccccaggagggccccaccagcagcagtggaagaagagctgctgtggaggacaaccacctgctgatcaaggctgtgcagaatgaagatgtggacctggtgcagcagctgctggagggcggggccaacgtgaacttccaggaggaggagggcggctggacccccctgcacaatgctgtgcagatgagccgggaggacatcgtggagctgctgctgcggcatggagctgaccctgtgctgaggaagaagaatggagccacccccttcatcctggccgccatcgccggctctgtgaagctgctgaagctgttcctgagcaaaggagcagatgtgaatgaatgtgacttctacggcttcaccgccttcatggaggccgctgtgtatggcaaggtgaaggccctgaagttcctgtacaagagaggagccaacgtgaacctgcggaggaagaccaaggaggaccaggagcggctgaggaagggcggggccacagccctgatggatgctgctgagaagggccacgtggaggtgctgaagatcctgctggatgagatgggcgcagatgtgaatgcctgtgacaacatgggcagaaatgccctgatccacgccctgctgagcagtgatgacagtgatgtggaggccatcacccacctgctgctggaccacggggctgatgtgaatgtgcggggggagcggggcaagacccccctcatcctggccgtggagaagaagcacctgggcctggtgcagaggctgctggagcaggagcacatcgagatcaatgacacagacagtgatggcaagacagccctgctgctggccgtggagctgaagctgaagaagattgctgagctgctgtgcaagagaggagccagcacagactgtggggacctggtgatgacagcccggaggaactatgaccacagcctggtgaaggtgctgctgagccatggagccaaggaggacttccaccccccagctgaggactggaagccccagagcagccactggggcgccgccctgaaggacctgcaccgcatctaccggcccatgattggcaagctgaagttcttcattgatgagaagtacaagattgctgacaccagcgagggcggcatctacctgggcttctatgagaagcaggaggtggccgtgaagaccttctgtgagggcagcccccgggcccagcgggaggtgtcctgcctgcagagcagccgggagaacagccacctggtgaccttctacggcagcgagagccaccggggccacctgtttgtgtgtgtgaccctgtgtgagcagaccctggaggcctgcctggatgtgcacagaggagaagatgtggagaatgaagaagatgaatttgccagaaatgtgctgagcagcatcttcaaggctgtgcaggagctgcacctgagctgtggctacacccaccaggacctgcagccccagaacatcctgattgacagcaagaaggccgcccacctggccgactttgacaagagcatcaagtgggccggggacccccaggaggtgaagagggacctggaggacctgggccgcctggtgctgtatgtggtgaagaagggcagcatcagctttgaggacctgaaggcccagagcaatgaggaggtggtgcagctgagcccagatgaggagaccaaggacctgatccacaggctcttccaccctggagagcacgtgcgggactgcctgagtgacctgctgggccaccccttcttctggacctgggagagccgctaccgcaccctgagaaatgtgggcaatgaaagtgacatcaagaccaggaagtctgagagcgagatcctgcggctgctgcagcccggccccagcgagcacagcaagagctttgacaagtggaccaccaagatcaatgaatgtgtgatgaagaagatgaacaagttctatgagaagaggggcaacttctaccagaacacagtgggggacctgctgaagttcatccggaacctgggggagcacattgatgaggagaagcacaagaagatgaagctgaagattggagaccccagcctgtacttccagaagaccttcccagacctggtgatctacgtgtacaccaagctgcagaacacagagtacaggaagcacttcccccagacccacagccccaacaagccccagtgtgatggagctgggggcgccagcggcctggccagccctggctgctag

SEQ ID NO: 207735 - DNA, 2226 bp, Artificial Sequence
  derived and/or modified sequence
atggagagccgggaccacaacaacccccaggagggccccaccagctcttcaggaagaagggcagcagtggaagacaatcatctgttaattaaggccgtccagaacgaggatgtcgacctggtccagcagttgctggagggcggtgccaacgtaaatttccaggaggaagagggcggctggaccccactgcataatgctgttcagatgagcagggaagatatcgtcgaattgctcttacgacacggggcggacccagtgctcaggaaaaagaacggagcaaccccctttattcttgccgctattgctggatcagtgaaattattaaaactattcctgagcaaaggtgccgatgtgaacgaatgcgatttctatggattcaccgctttcatggaggcagctgtttacggtaaggtgaaggcgctgaagttcctatacaagcggggcgcaaatgtgaacttacgtaggaaaactaaggaggatcaggaaagactgcggaaaggaggcgccaccgccctaatggacgccgcagaaaaaggccacgtcgaggtcctgaagatcttgctagatgaaatgggcgcagatgtgaatgcttgtgataacatgggccgaaatgcattgatccatgccctgctcagcagtgatgattctgacgtagaggctatcacacacctcctgctcgatcacggtgctgacgtcaacgttaggggcgagcgaggaaagacacccctgatacttgctgtggagaaaaagcatctgggactggtccagcgtttgcttgagcaagaacatattgagattaacgacaccgattccgacggcaaaacagcgttacttctggctgttgagctcaagctcaagaagatagctgaactgctgtgtaaaaggggtgcttctaccgattgcggcgatctggtcatgactgctagacgaaattatgaccattctctggtgaaggtgctgctgtctcatggtgcaaaagaggatttccaccccccggcagaagattggaaaccgcagagctctcactggggggccgccctgaaggacctccaccgaatctaccgccctatgattggcaaactgaaattttttattgacgaaaaatacaagatcgcagacacatccgagggaggcatatacctcggcttctatgagaaacaggaggttgccgtaaagacattttgtgaggggtcacctcgcgcccaaagggaggtgagctgcctccaatcttcacgggagaatagccacctggtgacattttacgggtccgagagccacagggggcacctcttcgtgtgcgtgaccttatgcgagcagaccctcgaggcgtgcctcgacgttcacaggggggaagatgtggagaacgaagaggatgaatttgctcggaacgtactctcgtctattttcaaggcagttcaggagttgcacctgtcctgcggatacacacatcaggacctgcagccccaaaatattctgatagattccaagaaggctgcccatctggccgacttcgacaagagcattaaatgggctggggatccacaggaggtaaagcgggacctggaggaccttggtcgcttagttctgtacgtcgtgaagaagggctctatcagcttcgaggacctgaaagctcagtccaacgaagaggtcgtccaactgagtcccgatgaggaaacgaaggacctcatacaccggttattccatccgggagagcacgtccgggactgcttatctgacctgctgggacacccattcttttggacatgggaaagtcgatacagaacacttaggaacgttgggaatgaaagtgatatcaaaacccgcaagagcgagagcgagattctgcgcctcctccaacccggaccatctgaacacagcaaatcctttgataagtggaccacaaagatcaatgaatgtgtgatgaaaaagatgaataaattttatgagaagagaggtaacttttaccagaacactgtcggcgacttgttgaagtttattagaaatcttggcgagcacatcgatgaggagaagcataagaaaatgaagctgaaaatcggcgacccatccttgtactttcaaaaaaccttccccgatttggtgatatacgtttacacaaaacttcagaataccgagtacagaaaacatttcccacagacacactccccaaacaaacctcagtgcgatggagctgggggcgcctcaggtctggccagtcctggatgttag

SEQ ID NO: 207736 - DNA, 2226 bp, Artificial Sequence
  derived and/or modified sequence
atggagagccgggaccacaacaacccccaggagggccccaccagctccagcggtaggagagcagccgttgaggataaccatcttctgattaaggccgttcagaacgaagacgtggatctcgtgcagcaactcctggagggcggagccaatgttaatttccaggaagaggaaggcggctggacccccttacacaatgcagtgcaaatgtccagagaggacatcgtagagctgttgctgaggcatggggccgacccagtgcttcgcaagaagaacggtgctacacccttcatactcgctgccattgcaggtagcgtgaaactgctgaaactgttcctgtctaagggcgccgatgtcaatgagtgtgatttttacggcttcacagcttttatggaggcggccgtttacggaaaagtgaaggccctgaaattcctttataagcggggtgccaacgtaaatctgcggcggaagaccaaagaggatcaagagcggcttaggaagggaggcgctaccgccctgatggatgcggcggaaaagggccacgtggaggtcctaaaaattctcctagatgaaatgggcgccgacgtgaacgcctgcgacaacatgggaagaaacgctttgatacatgccctattgagtagcgacgatagcgacgtggaagccattacgcatctcctcctcgatcacggagctgacgtgaatgtgcggggggagcggggaaaaacacccctgatcctggccgtggaaaaaaagcacctgggcctcgtccaaagactgctggagcaggagcatattgagatcaatgataccgatagcgacggaaaaacagccctgttgctggctgttgaattaaagctgaaaaaaatcgccgaactgttatgtaagcgcggagcaagcaccgactgcggtgacctcgtgatgacagccaggcggaactacgatcattccctggtgaaggtcctactgtctcatggcgctaaagaggacttccatcccccagctgaagattggaagccccagagttcgcactggggggctgccctgaaagacttgcaccggatctacagacctatgattgggaagcttaaatttttcattgacgagaagtacaaaatagccgatacatcggagggagggatctatctgggattttacgaaaagcaggaagtggctgtgaagactttctgcgaagggtctccccgggcccagagagaggtgtcttgcctacagtccagccgggaaaatagccatctggtgaccttctatggatctgagtcccatagaggccatctctttgtgtgcgtcactctctgtgagcagacactggaagcctgcctggacgtgcataggggcgaggacgtggagaatgaggaagatgagttcgcccgcaatgtgctgagcagtatatttaaagctgtgcaggagctccacttgagctgcggttatacccatcaagatctgcagcctcagaacatcctgatagacagtaagaaagcagcacatcttgcggattttgataagagtatcaaatgggcaggtgaccctcaggaagtcaaacgcgatctagaggacctaggaaggttggtattgtacgtagtgaaaaaaggaagcatttcattcgaagacttgaaggcccagagcaacgaagaagtcgtccagttaagcccagatgaagaaacaaaagaccttattcaccgactctttcaccctggtgagcacgttagggattgcctatctgacctgctgggtcacccctttttttggacgtgggaatccagatacaggacactgcggaacgtaggaaacgagtccgatatcaagactagaaaaagcgagtccgaaattctgagactgctgcaaccaggtccctccgagcatagcaagtcgttcgataagtggacaactaagataaatgagtgcgtcatgaaaaagatgaacaaattctacgagaagcggggcaacttctatcaaaatacagtcggcgacctgctcaaattcattcgcaatttaggggaacacattgacgaggagaagcacaagaaaatgaaattgaagataggagatcctagtttgtattttcagaaaacctttcccgacttggtgatctatgtgtatactaagctccagaacaccgaataccgcaaacactttccccagacacatagtccaaataaaccacaatgtgacggagccgggggcgcatctggtctggcatcccccggttgttag

SEQ ID NO: 207737 - DNA, 2226 bp, Artificial Sequence
  derived and/or modified sequence
atggaatcgcgagaccataacaacccccaggaaggcccaacctccagttcgggacggcgagccgctgtggaggataaccatctccttataaaagccgtacaaaacgaagatgtggacctcgtccagcaactcttagaggggggagccaacgtgaacttccaggaagaggaaggagggtggactccattgcacaacgcagtgcaaatgagccgcgaggacattgtagagctgcttttgcgccacggtgctgatcctgtgctccggaaaaaaaacggcgctacaccctttatccttgctgccattgcaggctctgttaaactcctgaaactcttcctgtccaaaggagctgacgtcaacgagtgtgatttctacggattcacagccttcatggaagctgccgtttatgggaaagttaaggccctcaaattcctctacaagcgaggagcaaatgttaacttgaggcgtaagaccaaagaggaccaagagaggctgaggaaggggggtgcaaccgctctcatggatgccgctgaaaaaggacacgttgaggtgttgaaaatccttctagacgagatgggggcagacgtcaatgcatgtgataatatgggcagaaatgcgctgatacatgcactcctgtctagcgatgacagcgatgttgaagcaatcacccatctgctcctggaccatggtgcagatgtaaacgtgagaggggaacgtggcaagacccccctcatcctggcagtggagaagaagcatctgggactcgtccagagactattggagcaagagcacatcgaaatcaatgacaccgacagtgacggaaagactgcactgttactagccgtggagctaaaactcaaaaaaattgcggaactgctatgtaagcggggtgcatcaaccgactgcggggacctggtaatgaccgctagacgaaattacgatcatagtctcgtaaaggtactgctgagtcacggagccaaggaagattttcatcctccggcagaagactggaaaccacagagctctcactggggggctgccctgaaagacctgcatcgtatctatcgccctatgataggtaagttaaagttttttatcgatgaaaaatacaaaattgccgacactagcgaaggcggtatctatttggggttctatgaaaagcaggaagtcgcagttaagactttttgtgagggcagcccacgggcacagcgagaagttagctgtctgcagtcatctcgcgaaaattcccatttggtcactttttacggcagcgagagccatagggggcacctgtttgtttgcgtcaccctttgcgagcaaactctggaagcttgcctcgacgtgcacaggggcgaggacgttgagaacgaggaggacgagtttgccagaaacgtgctgagcagtatattcaaggcagtccaggaattgcatctatcatgcggatacacccaccaagacttacagccccaaaacattctgattgattccaagaaggcagcacacttggccgatttcgacaagtccataaagtgggcaggcgatcctcaagaggtgaaaagggaccttgaagaccttgggcgactggtcctctacgtggtaaagaaaggatctatttcgttcgaagacctcaaagcccagagtaatgaggaagttgtgcagctgagccctgatgaggagaccaaagatctgatacaccgcctcttccatcccggagagcacgtgcgagattgcctgtcagacctgctggggcaccccttcttttggacttgggaatccagatacagaacccttcggaatgtaggcaacgaatctgatatcaagacccgcaagtcagaaagcgaaatactgagactgctccaacccggacccagcgagcacagcaagtcattcgacaagtggactacaaagatcaatgagtgcgtgatgaagaagatgaacaagttctatgaaaaaagaggcaatttctaccagaatacggttggggacctgctcaagttcatccgtaacctcggagagcacatcgacgaagaaaaacacaaaaagatgaaattgaaaatcggtgacccctccctgtacttccagaagacctttcccgacctggtgatctacgtgtacacaaagttgcagaatacggaatatcggaaacacttcccccagactcactctccgaataaaccacagtgtgacggggctggcggagcttctggcctcgccagccctggatgctag

SEQ ID NO: 207738 - DNA, 2226 bp, Artificial Sequence
  derived and/or modified sequence
atggagtcacgggatcacaacaaccctcaggagggcccaacgagctcttccggcagacgcgcagccgtcgaggataaccacctcctgattaaagcagttcagaatgaggacgtagatttggtgcaacaactcctagagggaggggcaaatgttaactttcaggaggaagaaggaggatggactcccctccacaacgctgtccagatgagtagagaggatatagttgagctgctgctgcgccacggtgcagatccagtgctacggaaaaagaatggtgccacccctttcatcctggcggctattgccggttcagttaaactcctgaagctcttcctcagcaaaggggcagacgtaaacgaatgcgatttctacggctttaccgccttcatggaagcagccgtatacggtaaagttaaagccctaaagttcttgtataagcggggagcgaatgtgaacctgcgacggaagactaaagaggaccaggagagacttcgcaagggaggcgctacggccctgatggatgccgctgagaaagggcatgtggaggtgcttaagattctgctggatgagatgggtgctgacgtcaacgcctgtgataacatgggtcggaacgcattaatccacgcgcttctttccagcgacgacagtgacgtggaagccattacacacctgctgctggaccacggagccgacgtcaatgtgcgtggagaacgaggaaagacccccctgattttggctgttgagaagaagcatttgggcttggtacaacgcctgctggaacaggagcacattgaaatcaatgacacagatagcgacggaaagactgccctccttctggccgtggaattgaagctcaaaaagatcgctgagttgctgtgtaagcgcggagcttctacagattgcggagacctcgtgatgacggctaggcgcaactatgaccattccctggtcaaagtgctgctttctcatggcgctaaggaagattttcatcccccagcagaagactggaaaccacaaagtagccattggggcgctgccctgaaggacctgcatcggatttacaggcccatgatcggcaagctcaagttttttatcgacgagaagtataagatagccgacactagcgagggtggtatctacctggggttctatgaaaaacaggaggtcgcagtgaagacattctgtgagggttcaccaagggcccagagggaggtgagctgtttgcagtcctcccgcgaaaattctcacctggtcaccttttatgggtccgagagccatagggggcatcttttcgtttgcgtaaccttatgtgaacagaccctggaggcctgcctggacgtccacagaggggaggacgtagagaacgaggaggacgagttcgctcgcaacgtcctcagcagcatttttaaggccgtgcaagaactgcacctgtcatgcggatacactcaccaggacctgcagccgcagaatatcttgatcgatagtaaaaaggcggctcacctggccgatttcgacaagagcatcaaatgggcgggagatccccaagaggtgaagagagacctggaagacctgggcaggctggttctgtatgtggtaaaaaaaggatccatttcgttcgaggaccttaaggcccaaagcaatgaggaagtcgtacaactgtcacccgacgaggaaactaaggacctgatccaccggctttttcacccaggagaacacgtacgggactgcttatcagatttgttggggcatccattcttttggacatgggaatctaggtatcggacactacggaacgtcggaaatgagagtgatatcaaaaccagaaaatcagaatcagagatcttgcggctccttcagcccggaccctccgagcatagtaaaagcttcgataaatggacaactaagataaacgagtgcgtcatgaagaagatgaataagttctatgagaagcgaggaaacttctatcagaatactgttggagacctgcttaaattcattagaaatctcggcgagcatatagacgaggaaaagcacaaaaagatgaagctgaagattggtgaccccagcctttattttcaaaagacattccccgaccttgtgatctacgtttataccaagttacagaacactgagtaccgaaagcatttcccccagactcatagcccaaacaagccacagtgtgatggggcaggaggagcatccgggctggcttcgccgggatgctag

SEQ ID NO: 207739 - DNA, 4238 bp, Artificial Sequence
  derived and/or modified sequence
gacgcagcaggaggaaactgctcgggctgcaagcagtcttccaggctttgcggctgccaaaggaataattgagacgtctgagttgagcaggtggaatgtcagaagactgagaacattgttccttcttcatactgctgctctgttgccagagaatcccaatttacactcaaagcttctttgattaagtgctaggagataaatttgcattttctcaaggaaaaggctaaaagtggtagcaggtggcatttaccgtcatggagagcagggatcataacaacccccaggagggacccacgtcctccagcggtagaagggctgcagtggaagacaatcacttgctgattaaagctgttcaaaacgaagatgttgacctggtccagcaattgctggaaggtggagccaatgttaatttccaggaagaggaagggggctggacacctctgcataacgcagtacaaatgagcagggaggacattgtggaacttctgcttcgtcatggtgctgaccctgttctgaggaagaagaatggggccacgccttttatcctcgcagcgattgcggggagcgtgaagctgctgaaacttttcctttctaaaggagcagatgtcaatgagtgtgatttttatggcttcacagccttcatggaagccgctgtgtatggtaaggtcaaagccctaaaattcctttataagagaggagcaaatgtgaatttgaggcgaaagacaaaggaggatcaagagcggctgaggaaaggaggggccacagctctcatggacgctgctgaaaaaggacacgtagaggtcttgaagattctccttgatgagatgggggcagatgtaaacgcctgtgacaatatgggcagaaatgccttgatccatgctctcctgagctctgacgatagtgatgtggaggctattacgcatctgctgctggaccatggggctgatgtcaatgtgaggggagaaagagggaagactcccctgatcctggcagtggagaagaagcacttgggtttggtgcagaggcttctggagcaagagcacatagagattaatgacacagacagtgatggcaaaacagcactgctgcttgctgttgaactcaaactgaagaaaatcgccgagttgctgtgcaaacgtggagccagtacagattgtggggatcttgttatgacagcgaggcggaattatgaccattcccttgtgaaggttcttctctctcatggagccaaagaagattttcaccctcctgctgaagactggaagcctcagagctcacactggggggcagccctgaaggatctccacagaatataccgccctatgattggcaaactcaagttctttattgatgaaaaatacaaaattgctgatacttcagaaggaggcatctacctggggttctatgagaagcaagaagtagctgtgaagacgttctgtgagggcagcccacgtgcacagcgggaagtctcttgtctgcaaagcagccgagagaacagtcacttggtgacattctatgggagtgagagccacaggggccacttgtttgtgtgtgtcaccctctgtgagcagactctggaagcgtgtttggatgtgcacagaggggaagatgtggaaaatgaggaagatgaatttgcccgaaatgtcctgtcatctatatttaaggctgttcaagaactacacttgtcctgtggatacacccaccaggatctgcaaccacaaaacatcttaatagattctaagaaagctgctcacctggcagattttgataagagcatcaagtgggctggagatccacaggaagtcaagagagatctagaggaccttggacggctggtcctctatgtggtaaagaagggaagcatctcatttgaggatctgaaagctcaaagtaatgaagaggtggttcaactttctccagatgaggaaactaaggacctcattcatcgtctcttccatcctggggaacatgtgagggactgtctgagtgacctgctgggtcatcccttcttttggacttgggagagccgctataggacgcttcggaatgtgggaaatgaatccgacatcaaaacacgaaaatctgaaagtgagatcctcagactactgcaacctgggccttctgaacattccaaaagttttgacaagtggacgactaagattaatgaatgtgttatgaaaaaaatgaataagttttatgaaaaaagaggcaatttctaccagaacactgtgggtgatctgctaaagttcatccggaatttgggagaacacattgatgaagaaaagcataaaaagatgaaattaaaaattggagacccttccctgtattttcagaagacatttccagatctggtgatctatgtctacacaaaactacagaacacagaatatagaaagcatttcccccaaacccacagtccaaacaagcctcagtgtgatggagctggtggggccagtgggttggccagccctgggtgctgatggactgatttgctggagttcagggaactacttattagctgtagagtccttggcaaatcacaacattctgggccttttaactcaccaggttgcttgtgagggatgagttgcatagctgatatgtcagtccctggcatcgtgtattccatatgtctataacaaaagcaatatatacccagactacactagtccataagctttacccactaactgggaggacattctgctaagattccttttgtcaattgcaccaaaagaatgagtgccttgacccctaatgctgcatatgttacaattctctcacttaattttcccaatgatcttgcaaaacagggattatcatccccatttaagaactgaggaacctgagactcagagagtgtgagctactggcccaagattattcaatttatacctagcactttataaatttatgtggtgttattggtacctctcatttgggcaccttaaaacttaactatccttccagggctcttccagatgaggcccaaaacatatataggggttccaggaatctcattcattcattcagtatttattgagcatctagtataagtctgggcactggatgcatgaattccactccttccagaaccaactgcattggttttccatgaccttaaggcagtagttctcaactggggggcaattttgcactgaagagagcatttggcagagtctgaagaagtttttggtgtcacagctttgtggggagcatgctatggcatttagtgggtaaagaccagggatgctgccaaacctgccttgcacaggacagcccctgcaacaaagaattatccagacaaaaatatcaatggtgctgaggttgagaaaacctgacttaaggggctgggatgcttttgaactagcttaaggcccaggactgtggagtgtgtggaccaccccacagaggagggactcagatttatttactcttgctggatctgtagtgatggagttccttctggtgtcagccccacaggaggctcccaggcctccctcacttcccatacccagtctaggagctccttctggctcccaagcacccagagctttcctccgccttttagttttggttcctccactggaatgtaggctcctcacgggcgatggctgtcttttcttgactttgtatcttcactgccaagcaaaaagtctgccaagtgggaatgtttaataaatattcattgaataatgaatgaaccatcttcgtacatgaataataatactgtcttacgtttttctggtgctttataatgtatacattacatctgagtattttattttatttaattttcaaaacaatcctttaaggtcaacattgttatccctattttgctgatgaggaaactaaggttagaaacattttgatttcctctaggacgtatagctaggaagtgttactatcttgatttgaacaaattttctggtgctaagtctgatgttctttccatgaatcattgtggtggttgagatggagctttgtaatgggaataaaacagtaccttaggttctttctgaaaaggaggtatctagcaatggataaatagataccactgaatgaaattaaatgttgattaggaacaaatttaaggcttaaaaaatactttatgagcagcaagattgctttaacttttaaaatgaagctttggttctctgatttgtaatgagcacctggacatgtcaattaaaatgcccatttgtgaagcttactcaataaaactttaaattgtctta

SEQ ID NO: 207740 - DNA, 4148 bp, Artificial Sequence
  derived and/or modified sequence
caggtggaatgtcagaagactgagaacattgttccttcttcatactgctgctctgttgccagagaatcccaatttacactcaaagcttctttgattaagtgctaggagataaatttgcattttctcaaggaaaaggctaaaagtggtagcaggtggcatttaccgtcatggagagcagggatcataacaacccccaggagggacccacgtcctccagcggtagaagggctgcagtggaagacaatcacttgctgattaaagctgttcaaaacgaagatgttgacctggtccagcaattgctggaaggtggagccaatgttaatttccaggaagaggaagggggctggacacctctgcataacgcagtacaaatgagcagggaggacattgtggaacttctgcttcgtcatggtgctgaccctgttctgaggaagaagaatggggccacgccttttatcctcgcagcgattgcggggagcgtgaagctgctgaaacttttcctttctaaaggagcagatgtcaatgagtgtgatttttatggcttcacagccttcatggaagccgctgtgtatggtaaggtcaaagccctaaaattcctttataagagaggagcaaatgtgaatttgaggcgaaagacaaaggaggatcaagagcggctgaggaaaggaggggccacagctctcatggacgctgctgaaaaaggacacgtagaggtcttgaagattctccttgatgagatgggggcagatgtaaacgcctgtgacaatatgggcagaaatgccttgatccatgctctcctgagctctgacgatagtgatgtggaggctattacgcatctgctgctggaccatggggctgatgtcaatgtgaggggagaaagagggaagactcccctgatcctggcagtggagaagaagcacttgggtttggtgcagaggcttctggagcaagagcacatagagattaatgacacagacagtgatggcaaaacagcactgctgcttgctgttgaactcaaactgaagaaaatcgccgagttgctgtgcaaacgtggagccagtacagattgtggggatcttgttatgacagcgaggcggaattatgaccattcccttgtgaaggttcttctctctcatggagccaaagaagattttcaccctcctgctgaagactggaagcctcagagctcacactggggggcagccctgaaggatctccacagaatataccgccctatgattggcaaactcaagttctttattgatgaaaaatacaaaattgctgatacttcagaaggaggcatctacctggggttctatgagaagcaagaagtagctgtgaagacgttctgtgagggcagcccacgtgcacagcgggaagtctcttgtctgcaaagcagccgagagaacagtcacttggtgacattctatgggagtgagagccacaggggccacttgtttgtgtgtgtcaccctctgtgagcagactctggaagcgtgtttggatgtgcacagaggggaagatgtggaaaatgaggaagatgaatttgcccgaaatgtcctgtcatctatatttaaggctgttcaagaactacacttgtcctgtggatacacccaccaggatctgcaaccacaaaacatcttaatagattctaagaaagctgctcacctggcagattttgataagagcatcaagtgggctggagatccacaggaagtcaagagagatctagaggaccttggacggctggtcctctatgtggtaaagaagggaagcatctcatttgaggatctgaaagctcaaagtaatgaagaggtggttcaactttctccagatgaggaaactaaggacctcattcatcgtctcttccatcctggggaacatgtgagggactgtctgagtgacctgctgggtcatcccttcttttggacttgggagagccgctataggacgcttcggaatgtgggaaatgaatccgacatcaaaacacgaaaatctgaaagtgagatcctcagactactgcaacctgggccttctgaacattccaaaagttttgacaagtggacgactaagattaatgaatgtgttatgaaaaaaatgaataagttttatgaaaaaagaggcaatttctaccagaacactgtgggtgatctgctaaagttcatccggaatttgggagaacacattgatgaagaaaagcataaaaagatgaaattaaaaattggagacccttccctgtattttcagaagacatttccagatctggtgatctatgtctacacaaaactacagaacacagaatatagaaagcatttcccccaaacccacagtccaaacaagcctcagtgtgatggagctggtggggccagtgggttggccagccctgggtgctgatggactgatttgctggagttcagggaactacttattagctgtagagtccttggcaaatcacaacattctgggccttttaactcaccaggttgcttgtgagggatgagttgcatagctgatatgtcagtccctggcatcgtgtattccatatgtctataacaaaagcaatatatacccagactacactagtccataagctttacccactaactgggaggacattctgctaagattccttttgtcaattgcaccaaaagaatgagtgccttgacccctaatgctgcatatgttacaattctctcacttaattttcccaatgatcttgcaaaacagggattatcatccccatttaagaactgaggaacctgagactcagagagtgtgagctactggcccaagattattcaatttatacctagcactttataaatttatgtggtgttattggtacctctcatttgggcaccttaaaacttaactatccttccagggctcttccagatgaggcccaaaacatatataggggttccaggaatctcattcattcattcagtatttattgagcatctagtataagtctgggcactggatgcatgaattccactccttccagaaccaactgcattggttttccatgaccttaaggcagtagttctcaactggggggcaattttgcactgaagagagcatttggcagagtctgaagaagtttttggtgtcacagctttgtggggagcatgctatggcatttagtgggtaaagaccagggatgctgccaaacctgccttgcacaggacagcccctgcaacaaagaattatccagacaaaaatatcaatggtgctgaggttgagaaaacctgacttaaggggctgggatgcttttgaactagcttaaggcccaggactgtggagtgtgtggaccaccccacagaggagggactcagatttatttactcttgctggatctgtagtgatggagttccttctggtgtcagccccacaggaggctcccaggcctccctcacttcccatacccagtctaggagctccttctggctcccaagcacccagagctttcctccgccttttagttttggttcctccactggaatgtaggctcctcacgggcgatggctgtcttttcttgactttgtatcttcactgccaagcaaaaagtctgccaagtgggaatgtttaataaatattcattgaataatgaatgaaccatcttcgtacatgaataataatactgtcttacgtttttctggtgctttataatgtatacattacatctgagtattttattttatttaattttcaaaacaatcctttaaggtcaacattgttatccctattttgctgatgaggaaactaaggttagaaacattttgatttcctctaggacgtatagctaggaagtgttactatcttgatttgaacaaattttctggtgctaagtctgatgttctttccatgaatcattgtggtggttgagatggagctttgtaatgggaataaaacagtaccttaggttctttctgaaaaggaggtatctagcaatggataaatagataccactgaatgaaattaaatgttgattaggaacaaatttaaggcttaaaaaatactttatgagcagcaagattgctttaacttttaaaatgaagctttggttctctgatttgtaatgagcacctggacatgtcaattaaaatgcccatttgtgaagcttactcaataaaactttaaattgtc

SEQ ID NO: 207741 - DNA, 2226 bp, Artificial Sequence
  derived and/or modified sequence
atggagagcagagaccacaacaacccccaggagggccccaccagcagcagcggcagaagagccgccgtggaggacaaccacctgctgatcaaggccgtgcagaacgaggacgtggacctggtgcagcagctgctggagggcggcgccaacgtgaacttccaggaggaggagggcggctggacccccctgcacaacgccgtgcagatgagcagagaggacatcgtggagctgctgctgagacacggcgccgaccccgtgctgagaaagaagaacggcgccacccccttcatcctggccgccatcgccggcagcgtgaagctgctgaagctgttcctgagcaagggcgccgacgtgaacgagtgcgacttctacggcttcaccgccttcatggaggccgccgtgtacggcaaggtgaaggccctgaagttcctgtacaagagaggcgccaacgtgaacctgagaagaaagaccaaggaggaccaggagagactgagaaagggcggcgccaccgccctgatggacgccgccgagaagggccacgtggaggtgctgaagatcctgctggacgagatgggcgccgacgtgaacgcctgcgacaacatgggcagaaacgccctgatccacgccctgctgagcagcgacgacagcgacgtggaggccatcacccacctgctgctggaccacggcgccgacgtgaacgtgagaggcgagagaggcaagacccccctgatcctggccgtggagaagaagcacctgggcctggtgcagagactgctggagcaggagcacatcgagatcaacgacaccgacagcgacggcaagaccgccctgctgctggccgtggagctgaagctgaagaagatcgccgagctgctgtgcaagagaggcgccagcaccgactgcggcgacctggtgatgaccgccagaagaaactacgaccacagcctggtgaaggtgctgctgagccacggcgccaaggaggacttccacccccccgccgaggactggaagccccagagcagccactggggcgccgccctgaaggacctgcacagaatctacagacccatgatcggcaagctgaagttcttcatcgacgagaagtacaagatcgccgacaccagcgagggcggcatctacctgggcttctacgagaagcaggaggtggccgtgaagaccttctgcgagggcagccccagagcccagagagaggtgagctgcctgcagagcagcagagagaacagccacctggtgaccttctacggcagcgagagccacagaggccacctgttcgtgtgcgtgaccctgtgcgagcagaccctggaggcctgcctggacgtgcacagaggcgaggacgtggagaacgaggaggacgagttcgccagaaacgtgctgagcagcatcttcaaggccgtgcaggagctgcacctgagctgcggctacacccaccaggacctgcagccccagaacatcctgatcgacagcaagaaggccgcccacctggccgacttcgacaagagcatcaagtgggccggcgacccccaggaggtgaagagagacctggaggacctgggcagactggtgctgtacgtggtgaagaagggcagcatcagcttcgaggacctgaaggcccagagcaacgaggaggtggtgcagctgagccccgacgaggagaccaaggacctgatccacagactgttccaccccggcgagcacgtgagagactgcctgagcgacctgctgggccaccccttcttctggacctgggagagcagatacagaaccctgagaaacgtgggcaacgagagcgacatcaagaccagaaagagcgagagcgagatcctgagactgctgcagcccggccccagcgagcacagcaagagcttcgacaagtggaccaccaagatcaacgagtgcgtgatgaagaagatgaacaagttctacgagaagagaggcaacttctaccagaacaccgtgggcgacctgctgaagttcatcagaaacctgggcgagcacatcgacgaggagaagcacaagaagatgaagctgaagatcggcgaccccagcctgtacttccagaagaccttccccgacctggtgatctacgtgtacaccaagctgcagaacaccgagtacagaaagcacttcccccagacccacagccccaacaagccccagtgcgacggcgccggcggcgccagcggcctggccagccccggctgctag

SEQ ID NO: 207742 - protein, 153 aa, Artificial Sequence
  derived and/or modified sequence
MARNVVYPLYRLGGPQLRVFRTNFFIQLVRPGVAQPEDTVQFRIPMEMTRVDLRNYLEGIYNVPVAAVRTRVQHGSNKRRDHRNVRIKKPDYKVAYVQLAHGQTFTFPDLFPEKDESPEGSAADDLYSMLEEERQQRQSSDPRRGGVPSWFGL

SEQ ID NO: 207743 - DNA, 462 bp, Artificial Sequence
  derived and/or modified sequence
atggcacggaacgtggtgtatcccctctacagactcggcgggccccagctccgggtttttaggaccaatttcttcattcagctcgtgcggccgggtgtggcacagcctgaggataccgtgcagtttcgaatccccatggaaatgacacgagtagacctgaggaattatctagaaggaatttacaatgttccagtcgccgcagtaagaaccagagttcagcatgggtcgaataagcgacgggaccataggaatgttagaatcaaaaagcctgattataaggtggcatacgtgcaactcgctcatgggcagacattcacattccctgacctgtttcctgaaaaggatgagtccccagaaggcagtgctgctgacgatctgtactcaatgctggaggaggagaggcagcagcgtcaatctagcgacccccggaggggaggtgtgccatcctggttcgggctatag

SEQ ID NO: 207744 - DNA, 462 bp, Artificial Sequence
  derived and/or modified sequence
atggcacgcaatgtggtgtaccccctttacagactgggcggtccacagcttagagtgtttagaaccaactttttcattcagctggttcgacccggagtcgcccagccggaggataccgtccagtttagaatccccatggagatgacccgggtggacctgagaaattaccttgagggcatctacaatgtgcccgtggcagccgtgcgcacccgcgttcaacacggatccaacaagagaagagatcaccgcaatgtgcggatcaaaaagccggattacaaagtcgcatatgtgcagctcgcacacggtcaaacctttacttttcctgatctgtttcccgagaaagatgagagccctgagggctccgcagccgacgatctttattccatgctggaagaggagcgccagcagcgtcagtcatcagatccaagacggggaggtgtgccttcttggtttggattatag

SEQ ID NO: 207745 - DNA, 462 bp, Artificial Sequence
  derived and/or modified sequence
atggccagaaatgtggtgtaccccctgtaccgcctgggcggcccccagctgcgggtcttccgcaccaacttcttcatccagctggtgcggcctggggtggcccagccagaagatactgtgcagttccgcatccccatggagatgaccagggtggacctgaggaactacctggagggcatctacaacgtgcctgtggccgctgtgaggaccagggtgcagcacggcagcaacaagagaagagaccacagaaatgtgcgcatcaagaagccagactacaaggtggcctacgtgcagctggcccacggccagaccttcaccttcccagacctcttccctgagaaggatgagagccctgagggcagcgctgctgatgacctgtacagcatgctggaggaggagcggcagcagaggcagagcagtgaccccaggagaggaggagtgcccagctggtttggcctgtag

SEQ ID NO: 207746 - DNA, 643 bp, Artificial Sequence
  derived and/or modified sequence
gggggcgctgtgccaggcggcggccgtgcggggcgggcgcgctgctccttccgcctcgcggaccccggaagcgcgcgtggccgccatggcgcggaatgtggtgtaccccctgtaccggctgggtggcccacaacttcgggtgttccgaaccaacttcttcattcagctggtgcggcccggtgtggcccagcccgaggacaccgtgcagttccggatccccatggaaatgacaagggtggacctcaggaattacctcgagggcatctataacgtgcccgtggctgctgtgcggacacgggtgcagcatggctctaacaagagaagagatcacagaaacgtgaggatcaagaagccggactacaaggtcgcctacgtgcagctggcccatggacagaccttcacgttcccagatctgtttcccgagaaagacgagagccctgaaggcagcgctgccgacgacctctacagcatgctcgaggaggagaggcagcagaggcagagcagcgacccgcggcggggcggcgtccccagctggttcgggctgtgacggggtggccagcagggacgcgccccaggtgggcagctgtggcagagcagtcccgacacctaaataaaagtcttgctgcaggagaaagagccggaa

SEQ ID NO: 207747 - DNA, 736 bp, Artificial Sequence
  derived and/or modified sequence
gggggcgctgtgccaggcggcggccgtgcggggcgggcgcgctgctccttccgcctcgcggaccccggaagcgcgcgtggccgccatggcgcggaatgtggtgtaccccctgtaccggctgggtggcccacaacttcgggtgttccgaaccaacttcttcattcagctggtgcggcccggtgtggcccagcccgaggacaccgtgcagttccggatccccatggaaatgacaagggtggacctcaggaattacctcgagggcatctataacgtgcccgtggctgctgtgcggacacgggtgcagcatggctctaacaagagaagagatcacagaaacgtgaggatcaagaagccggactacaaggtcgcctacgtgcagctggcccatggacagaccttcacgttcccagatctgtttcccgagaaagacgagagccctgaaggcagcgctgccgacgacctctacagcatgctcgaggaggagaggcagcagaggcagagcagcgacccgcggcggggcggcgtccccagctggttcgggctgtgacggggtggccagcagggacgcgccccaggtgggcagctgtggcagagcagcgacccgcggcggggcggcatccccagctggttcgggccgtgacggggcggccagcagggacgcgccccaggtgggcagctgtggcagagcagtcccgacacctaaataaaagtcttgctgcaggagaaagagccggaa

SEQ ID NO: 207748 - DNA, 462 bp, Artificial Sequence
  derived and/or modified sequence
atggcccggaacgtggtgtaccccctgtaccggctgggcggcccccagttgcgggtctttcggaccaatttttttattcagctggtgcgtccgggagtggcccagcccgaagacaccgtccagttcagaatacctatggagatgacccgtgtggatctcaggaactatctggaagggatttacaatgttccagttgctgccgtacgtaccagggtgcagcacggtagcaacaaaaggcgcgatcaccgcaatgtccgtattaagaagcccgattacaaggtggcctacgtgcagctggctcacgggcagactttcaccttccctgacctgttccctgagaaggatgagtcaccagaaggaagtgcggctgacgacctatacagcatgcttgaggaagagaggcagcaacgtcaaagctccgatccacggcgggggggtgtacccagctggtttggcttgtag

SEQ ID NO: 207749 - DNA, 462 bp, Artificial Sequence
  derived and/or modified sequence
atggcccggaacgtggtgtaccccctgtaccggctgggcggcccccagctccgggtctttagaacgaacttctttattcaactcgtgagaccaggtgtcgcacagccagaagatactgttcagtttaggatccctatggaaatgactcgggttgatctacggaactacttggagggcatttataatgtgcccgtggctgctgtgcggactagggtgcaacacgggagcaataaacgccgggaccaccgcaacgttcggatcaagaaacctgattacaaagtcgcttacgttcagcttgcccacgggcagaccttcactttcccagacctgtttcctgaaaaggatgaatcccctgaagggtctgcggctgatgatctctatagcatgctggaggaagaaagacaacagcgacagtccagcgacccgaggagggggggtgttccttcttggttcggcctttag

SEQ ID NO: 207750 - DNA, 462 bp, Artificial Sequence
  derived and/or modified sequence
atggcaaggaatgtggtataccctctgtatcgcctaggcggaccccagctaagggtttttaggaccaacttttttattcagcttgttagacctggtgtggcccagcccgaagacaccgtgcagttcagaatccccatggaaatgactagggtggacctgagaaactatctggagggtatttataatgtgcccgtggcagcagtccgaactcgggtacaacacgggtcgaataaaagacgagaccatcggaacgtgagaataaaaaagccagactacaaagtagcctatgttcagttagctcacggtcagactttcacctttccagacttgttccctgaaaaggacgagagcccagaagggagtgccgctgacgatctctatagcatgctggaggaggagcgccagcagagacagtccagcgatcctaggcgcggaggagtgccctcatggtttggactgtag

SEQ ID NO: 207751 - DNA, 462 bp, Artificial Sequence
  derived and/or modified sequence
atggccagaaacgttgtctacccactgtatcgcttggggggtcctcagttaagagtcttccgcaccaacttctttatccagctcgtgcgaccaggagtggcccagcctgaggacactgtgcagttccggatccccatggaaatgactagagtggacctgcggaactaccttgaaggtatctataacgtgcccgttgccgcagtaagaacccgagttcagcacggtagcaataagcgaagagatcaccgcaacgtccgcattaagaagcccgattacaaagtagcatacgtacagttggctcatggtcaaacttttacatttccagatctgttccccgaaaaagacgagagcccagagggctctgctgcggacgacttgtatagcatgctcgaagaggagaggcagcagcgccagtcgagcgacccgaggagaggcggtgttcccagctggttcgggctgtag

SEQ ID NO: 207752 - DNA, 462 bp, Artificial Sequence
  derived and/or modified sequence
atggccagaaacgtggtgtaccccctgtacagactgggcggcccccagctgagagtgttcagaaccaacttcttcatccagctggtgagacccggcgtggcccagcccgaggacaccgtgcagttcagaatccccatggagatgaccagagtggacctgagaaactacctggagggcatctacaacgtgcccgtggccgccgtgagaaccagagtgcagcacggcagcaacaagagaagagaccacagaaacgtgagaatcaagaagcccgactacaaggtggcctacgtgcagctggcccacggccagaccttcaccttccccgacctgttccccgagaaggacgagagccccgagggcagcgccgccgacgacctgtacagcatgctggaggaggagagacagcagagacagagcagcgaccccagaagaggcggcgtgcccagctggttcggcctgtag

SEQ ID NO: 207753 - protein, 733 aa, Artificial Sequence
  derived and/or modified sequence
MDLSMKKFAVRRFFSVYLRRKSRSKSSSLSRLEEEGVVKEIDISHHVKEGFEKADPSQFELLKVLGQGSYGKVFLVRKVKGSDAGQLYAMKVLKKATLKVRDRVRSKMERDILAEVNHPFIVKLHYAFQTEGKLYLILDFLRGGDLFTRLSKEVMFTEEDVKFYLAELALALDHLHSLGIIYRDLKPENILLDEEGHIKITDFGLSKEAIDHDKRAYSFCGTIEYMAPEVVNRRGHTQSADWWSFGVLMFEMLTGSLPFQGKDRKETMALILKAKLGMPQFLSGEAQSLLRALFKRNPCNRLGAGIDGVEEIKRHPFFVTIDWNTLYRKEIKPPFKPAVGRPEDTFHFDPEFTARTPTDSPGVPPSANAHHLFRGFSFVASSLIQEPSQQDLHKVPVHPIVQQLHGNNIHFTDGYEIKEDIGVGSYSVCKRCVHKATDTEYAVKIIDKSKRDPSEEIEILLRYGQHPNIITLKDVYDDGKFVYLVMELMRGGELLDRILRQRYFSEREASDVLCTITKTMDYLHSQGVVHRDLKPSNILYRDESGSPESIRVCDFGFAKQLRAGNGLLMTPCYTANFVAPEVLKRQGYDAACDIWSLGILLYTMLAGFTPFANGPDDTPEEILARIGSGKYALSGGNWDSISDAAKDVVSKMLHVDPHQRLTAMQVLKHPWVVNREYLSPNQLSRQDVHLVKGAMAATYFALNRTPQAPRLEPVLSSNLAQRRGMKRLTSTRL

SEQ ID NO: 207754 - protein, 644 aa, Artificial Sequence
  derived and/or modified sequence
MKVLKKATLKVRDRVRSKMERDILAEVNHPFIVKLHYAFQTEGKLYLILDFLRGGDLFTRLSKEVMFTEEDVKFYLAELALALDHLHSLGIIYRDLKPENILLDEEGHIKITDFGLSKEAIDHDKRAYSFCGTIEYMAPEVVNRRGHTQSADWWSFGVLMFEMLTGSLPFQGKDRKETMALILKAKLGMPQFLSGEAQSLLRALFKRNPCNRLGAGIDGVEEIKRHPFFVTIDWNTLYRKEIKPPFKPAVGRPEDTFHFDPEFTARTPTDSPGVPPSANAHHLFRGFSFVASSLIQEPSQQDLHKVPVHPIVQQLHGNNIHFTDGYEIKEDIGVGSYSVCKRCVHKATDTEYAVKIIDKSKRDPSEEIEILLRYGQHPNIITLKDVYDDGKFVYLVMELMRGGELLDRILRQRYFSEREASDVLCTITKTMDYLHSQGVVHRDLKPSNILYRDESGSPESIRVCDFGFAKQLRAGNGLLMTPCYTANFVAPEVLKRQGYDAACDIWSLGILLYTMLAGFTPFANGPDDTPEEILARIGSGKYALSGGNWDSISDAAKDVVSKMLHVDPHQRLTAMQVLKHPWVVNREYLSPNQLSRQDVHLVKGAMAATYFALNRTPQAPRLEPVLSSNLAQRRGMKRLTSTRL

SEQ ID NO: 207755 - DNA, 2202 bp, Artificial Sequence
  derived and/or modified sequence
atggacctgagcatgaagaagttcgccgtgagaagattcttcagcgtgtacctgagaagaaagagcagaagcaagagcagcagcctgagcagactggaggaggagggcgtggtgaaggagatcgacatcagccaccacgtgaaggagggcttcgagaaggccgaccccagccagttcgagctgctgaaggtgctgggccagggcagctacggcaaggtgttcctggtgagaaaggtgaagggcagcgacgccggccagctgtacgccatgaaggtgctgaagaaggccaccctgaaggtgagagacagagtgagaagcaagatggagagagacatcctggccgaggtgaaccaccccttcatcgtgaagctgcactacgccttccagaccgagggcaagctgtacctgatcctggacttcctgagaggcggcgacctgttcaccagactgagcaaggaggtgatgttcaccgaggaggacgtgaagttctacctggccgagctggccctggccctggaccacctgcacagcctgggcatcatctacagagacctgaagcccgagaacatcctgctggacgaggagggccacatcaagatcaccgacttcggcctgagcaaggaggccatcgaccacgacaagagagcctacagcttctgcggcaccatcgagtacatggcccccgaggtggtgaacagaagaggccacacccagagcgccgactggtggagcttcggcgtgctgatgttcgagatgctgaccggcagcctgcccttccagggcaaggacagaaaggagaccatggccctgatcctgaaggccaagctgggcatgccccagttcctgagcggcgaggcccagagcctgctgagagccctgttcaagagaaacccctgcaacagactgggcgccggcatcgacggcgtggaggagatcaagagacaccccttcttcgtgaccatcgactggaacaccctgtacagaaaggagatcaagccccccttcaagcccgccgtgggcagacccgaggacaccttccacttcgaccccgagttcaccgccagaacccccaccgacagccccggcgtgccccccagcgccaacgcccaccacctgttcagaggcttcagcttcgtggccagcagcctgatccaggagcccagccagcaggacctgcacaaggtgcccgtgcaccccatcgtgcagcagctgcacggcaacaacatccacttcaccgacggctacgagatcaaggaggacatcggcgtgggcagctacagcgtgtgcaagagatgcgtgcacaaggccaccgacaccgagtacgccgtgaagatcatcgacaagagcaagagagaccccagcgaggagatcgagatcctgctgagatacggccagcaccccaacatcatcaccctgaaggacgtgtacgacgacggcaagttcgtgtacctggtgatggagctgatgagaggcggcgagctgctggacagaatcctgagacagagatacttcagcgagagagaggccagcgacgtgctgtgcaccatcaccaagaccatggactacctgcacagccagggcgtggtgcacagagacctgaagcccagcaacatcctgtacagagacgagagcggcagccccgagagcatcagagtgtgcgacttcggcttcgccaagcagctgagagccggcaacggcctgctgatgaccccctgctacaccgccaacttcgtggcccccgaggtgctgaagagacagggctacgacgccgcctgcgacatctggagcctgggcatcctgctgtacaccatgctggccggcttcacccccttcgccaacggccccgacgacacccccgaggagatcctggccagaatcggcagcggcaagtacgccctgagcggcggcaactgggacagcatcagcgacgccgccaaggacgtggtgagcaagatgctgcacgtggacccccaccagagactgaccgccatgcaggtgctgaagcacccctgggtggtgaacagagagtacctgagccccaaccagctgagcagacaggacgtgcacctggtgaagggcgccatggccgccacctacttcgccctgaacagaaccccccaggcccccagactggagcccgtgctgagcagcaacctggcccagagaagaggcatgaagagactgaccagcaccagactgtag

SEQ ID NO: 207756 - DNA, 2202 bp, Artificial Sequence
  derived and/or modified sequence
atggacctgtctatgaagaaatttgcagtgagaagattttttagtgtgtacctcaggcgcaagagccggagcaagtctagttcactgagtcggctggaagaagagggggtggtaaaggaaatcgacattagccatcacgtgaaagaagggttcgaaaaagcagacccgtcccagttcgaactgctgaaagtgctcgggcaaggctcttatggaaaagtcttcctcgttcggaaagttaaaggtagcgacgcaggacagctgtacgccatgaaggtgctgaagaaggctacactcaaggtcagggatcgcgtgcgatcaaaaatggaacgtgatattctcgctgaggttaatcacccctttatcgtgaaattacattatgcttttcagaccgagggcaaactatacctcattctggatttcctccgaggtggcgacctcttcactagacttagcaaagaagtcatgtttacggaagaggatgtcaagttctacttagcggaactggcccttgctctggaccatctacacagtttggggatcatctacagggatctcaagcccgaaaacatactcttggatgaggagggccatattaagattactgatttcggcctgagcaaggaggccatcgatcatgataaaagggcttattccttttgcggtaccatcgagtatatggctcccgaagtggtcaaccgccgtggccacactcagagcgccgactggtggtcattcggcgtcttgatgtttgagatgctcacgggttctcttccttttcaaggcaaggaccggaaggagactatggctctcatacttaaagcaaagctgggcatgccgcagttcctctccggggaggcccagagtctgctgagagcactcttcaagcgcaacccatgcaataggctgggcgccggcattgatggggtggaggagataaaacgccacccgttctttgtcacaattgattggaataccctataccgcaaagagattaagccaccgttcaaaccagccgttgggcgccccgaagataccttccattttgatccggagttcactgcaaggaccccgaccgattcgcctggcgtacccccatcagccaatgcccaccacctcttccgaggatttagcttcgtggcttcctctctgatccaggagccaagccaacaggatctacacaaagtacctgttcacccaattgttcaacagctgcacggaaataacatccacttcactgatgggtacgaaataaaagaagacataggtgtagggagctacagcgtgtgcaagcgctgtgtccacaaagccaccgatacagaatatgctgtcaagatcattgataagagtaaaagagatccatccgaggaaatcgagattctgctcaggtacggccaacaccctaacattataaccttgaaggatgtctatgatgatgggaagttcgtgtacctagtcatggagttgatgcgggggggggagttgttagatcgtatcttgcgccaaagatacttcagtgaacgagaagcctccgatgtgctgtgcacgattacaaagactatggactacctccacagccagggtgtcgtccacagagaccttaaacctagcaacatactgtaccgagacgagagcggcagtccggagtcaataagagtatgtgatttcgggttcgccaagcagcttcgcgcgggaaacggtctcctgatgacgccatgttacaccgcaaactttgtggcccctgaggttctgaagcggcaaggctatgacgcagcatgcgacatctggtctctgggaattttgctgtacacaatgctagctggttttaccccgttcgcaaatggacccgatgatactcccgaagaaattctcgctagaatcggatctggcaagtatgcgctctctggcggcaactgggactccatcagcgacgctgccaaggatgttgtgagcaagatgctgcacgtagaccctcaccaaagactgaccgctatgcaggttctgaaacacccgtgggtggtgaatagggagtacctcagtcccaaccaactgagtcggcaagatgtgcacctggtgaagggggcaatggctgccacgtatttcgcactgaacaggacaccacaggccccccgcttggagcctgtcctgtcttccaatctagcccagcgcagaggcatgaagcgcctcacctcaacacggctgtag

SEQ ID NO: 207757 - DNA, 2202 bp, Artificial Sequence
  derived and/or modified sequence
atggacctgtccatgaagaagtttgctgtgcggcgcttcttctctgtgtacctgcggaggaagagccgcagcaagagcagcagcctgagccggctggaggaggagggcgtggtgaaggagattgacatcagccaccacgtgaaggagggctttgagaaggctgaccccagccagtttgagctgctgaaggtgctgggccagggcagctatggcaaggtgttcctggtgaggaaggtgaagggcagtgatgctggccagctgtatgccatgaaggtgctgaagaaggccaccctgaaggtgcgggacagagtgcgcagcaagatggagcgggacatcctggccgaggtgaaccaccccttcatcgtgaagctgcactacgccttccagacagagggcaagctgtacctgatcctggacttcctgcggggcggggacctcttcacccggctgagcaaggaggtgatgttcacagaagaagatgtgaagttctacctggccgagctggccctggccctggaccacctgcacagcctgggcatcatctacagagacctgaagccagagaacatcctgctggatgaggagggccacatcaagatcacagactttggcctgagcaaggaggccatcgaccatgacaagagggcctacagcttctgtggcaccatcgagtacatggcccctgaggtggtgaacagaagaggccacacccagagcgctgactggtggagctttggagtgctgatgtttgagatgctgaccggcagcctgcccttccagggcaaggacaggaaggagaccatggccctgatcctgaaggccaagctgggcatgccccagttcctgtctggagaggcccagagcctgctgcgggccctcttcaagaggaacccctgcaaccggctgggcgccggcattgatggagtggaggagatcaagaggcaccccttctttgtgaccatcgactggaacaccctgtacaggaaggagatcaagccacccttcaagccagctgtgggccggcctgaggacaccttccactttgatcctgagttcaccgcccggacccccacagacagccctggggtgccccccagcgccaatgcccaccacctgttccggggcttctcctttgtggccagcagcctcatccaggagcccagccagcaggacctgcacaaggtgcctgtgcaccccatcgtgcagcagctgcacggcaacaacatccacttcacagatggctatgagatcaaggaggacattggagtgggcagctacagcgtgtgcaagagatgtgtgcacaaggccacagacacagaatatgctgtgaagatcatcgacaagagcaagagggaccccagcgaggagattgagatcctgctgcgctatggccagcaccccaacatcatcaccctgaaggatgtgtatgatgatggcaagtttgtgtacctggtgatggagctgatgagaggaggagagctgctggaccgcatcctgcggcagcgctacttcagcgagcgggaggccagtgatgtgctgtgcaccatcaccaagaccatggactacctgcacagccagggcgtggtgcaccgggacctgaagcccagcaacatcctgtacagagatgagagcggcagccctgagagcatccgggtgtgtgactttggatttgccaagcagctgcgggctggaaatggcctgctgatgaccccctgctacacagccaactttgtggcccctgaggtgctgaagaggcagggctatgatgctgcctgtgacatctggagcctgggcatcctgctgtacaccatgctggccggcttcaccccatttgccaatggaccagatgacaccccagaggagatcctggcccgcatcggcagcggcaagtatgccctgagcggcggcaactgggacagcatcagtgatgctgccaaggatgtggtgtccaagatgctgcacgtggacccccaccagaggctgacagccatgcaggtgctgaagcacccctgggtggtgaaccgggagtacctgagccccaaccagctgagccggcaggatgtgcacctggtgaagggggccatggccgccacctactttgccctgaacagaacaccccaggccccccggctggagcctgtgctgagcagcaacctggcccagaggcggggcatgaagaggctgaccagcacccggctgtag

SEQ ID NO: 207758 - DNA, 2202 bp, Artificial Sequence
  derived and/or modified sequence
atggacctgagcatgaagaagttcgccgtgcggcggttcttcagcgtgtacctcagaagaaagagtcgtagcaaatcttcaagcctgagcaggttggaagaagagggcgtggtaaaggaaattgacatttcccatcacgtaaaggagggtttcgaaaaagccgatccatcccaattcgagctgctgaaggtgctgggccaaggctcatatgggaaggtgtttctagtgcggaaggtgaaagggtccgatgccggtcagctttacgccatgaaagtcttgaagaaggctacacttaaggtgagagatcgcgtccgctccaagatggagagagatatcctcgctgaagttaatcacccattcatagttaagctgcactatgcctttcaaacagagggtaagctatatttaatcctcgactttctacggggcggcgatctgtttacacgactgtccaaggaggtcatgtttactgaagaggacgtcaagttttacctagccgaactggctctagcactggatcacctccattctctcggaataatttacagagacctaaaacccgaaaacattcttttagacgaggagggacacatcaaaatcacggacttcgggctgtctaaggaggcaatcgaccatgataagcgggcctactccttctgcggcacaatcgagtatatggccccagaagtggtgaaccgcaggggacacactcagtcagctgactggtggtcgtttggagtcctgatgtttgaaatgctgacaggttctctaccctttcaggggaaagaccgtaaagaaaccatggctctgatccttaaagcaaagctcggtatgccccagtttctgagcggcgaagcacagagcctgctgcgcgccttgtttaaacgtaacccttgtaacagactgggtgccggtatagatggtgtggaagaaatcaaacgtcatccattttttgttacaatagactggaacaccctttatcgaaaggagattaaaccccctttcaaacccgccgttggtcgaccagaagacacatttcatttcgacccggaatttactgcacgaacacccactgacagtcctggcgtaccacctagcgccaatgctcaccatctttttagggggttttcatttgttgcaagtagcctcattcaggagccatcccagcaggacctccacaaggtccctgtacacccgatcgttcagcaactgcacgggaacaacatccattttacagacggctacgaaatcaaagaagatatcggggtgggcagctactccgtttgtaaaaggtgcgtgcacaaggccaccgatacagagtacgccgtgaaaatcatcgataaatctaagcgagatccctctgaggagattgagatcctactccgctacggtcaacaccctaacatcatcacactaaaggatgtgtacgacgatgggaagtttgtttatttagtcatggagcttatgagaggaggcgagctcctggatagaatactgcggcaaagatactttagtgagagggaagcatccgatgtcctctgcaccatcaccaagacgatggactacctccacagtcagggagtggtacacagggacttaaagcctagcaatattctttatcgtgacgaaagcggtagccccgagtcaatcagggtgtgcgattttggctttgccaaacaactgagggccggaaacgggttgcttatgactccatgttataccgctaactttgttgccccggaagtgctgaagcgacagggttatgacgctgcctgtgacatttggtccctaggtatcctcttatacactatgctggccggatttaccccctttgctaacggcccagatgatacgcccgaggagatcctggctagaatcggcagtggcaaatacgcattgagcggcggaaactgggattccattagcgatgccgcaaaggacgtagtgtcaaagatgctccatgttgatccacaccaaaggttgacggctatgcaggtgctgaagcatccttgggtagtaaatagagaatacctttctcccaatcagctttcgagacaggatgttcacctagtgaagggagcaatggctgccacgtacttcgcactcaatcgcacaccccaggctccgcgtctcgaaccggtcctttcgtcaaatctcgcccagaggcgcggcatgaagagactgacctccactcgtctgtag

SEQ ID NO: 207759 - DNA, 2202 bp, Artificial Sequence
  derived and/or modified sequence
atggacttgagcatgaaaaaattcgccgtgaggagatttttttccgtgtacctaagaaggaagagcaggtcaaaaagctcttccctcagccggttagaggaggaaggtgtcgttaaggagattgatattagccatcatgttaaagaggggtttgaaaaagcggacccctcccaattcgagttgctgaaggtgctgggtcagggctcttatggaaaggtcttcctggttcggaaggtgaagggcagtgatgcaggacagctctatgcaatgaaagtcctgaaaaaggcaacactcaaagtaagggaccgggtccggagtaaaatggagcgcgatattctggcagaagtgaatcatccatttattgtgaaactgcactacgctttccagaccgagggcaaactttatctaatactagattttttacgcggaggagaccttttcaccagactctccaaggaagtaatgtttaccgaagaggacgtgaagttttatttggctgaattggctctggctctggaccaccttcattctttaggtattatctatcgcgacctaaagccagagaacatactcctggatgaggaaggccacattaagattaccgattttgggttgtcaaaggaggccatcgaccacgacaaacgggcttattcgttctgtggcaccatagagtacatggcaccggaggttgtgaaccggaggggacatacccagtcagcagactggtggagctttggggttttaatgttcgaaatgctgacagggtccctcccattccaggggaaggaccgcaaagagaccatggcactcatcttgaaggccaaacttggaatgccacagttcctttccggggaggctcagagtctcctgagagccctattcaagagaaacccctgtaaccgactgggcgctggtattgacggagtggaggaaattaaacggcaccccttcttcgtaaccattgattggaatactttgtacagaaaagagataaagcccccttttaagccagccgtcggacggcctgaggatacgtttcacttcgaccccgagtttaccgccaggacgccaacagattctcccggagtgccacctagtgccaacgcgcaccacctcttccgcggtttttcttttgttgcctcctcgctcattcaagaaccatcccagcaggacctgcataaagtgccagtgcaccccatcgtgcaacagcttcacggcaataacattcatttcacagatgggtatgagatcaaggaggacatcggagtggggagctacagtgtgtgcaaaagatgcgtccacaaggcgactgatactgagtatgcagtaaagattatcgataaaagcaagagagacccgtctgaggagattgaaatcttactccgctatggtcaacatccaaatataattaccctaaaagatgtgtatgacgacggtaaattcgtgtacctggtgatggaactgatgagggggggagaattgctggacaggatcctgaggcagcggtatttttccgagcgggaagcctcagatgtcttatgtactatcactaagacaatggactacttacacagccagggtgtcgtgcaccgcgacctgaaaccatccaacatattataccgcgacgaatcaggttcacccgagagtatccgcgtgtgcgattttggcttcgctaaacaacttcgcgctggcaatggcctcctcatgaccccctgctacaccgcgaacttcgttgcaccggaagtcctgaaaaggcaaggttacgacgctgcgtgcgatatctggtcattaggaatattgctctacacgatgctggccggtttcactccctttgcaaatgggcctgacgataccccagaggagatactggccagaatagggtctggaaagtatgcacttagtgggggaaactgggatagcataagtgacgccgcaaaagatgttgtttctaagatgctacacgtggatccacatcagcgccttactgctatgcaggtgttaaagcatccttgggtggttaaccgggaatatctcagccctaatcagttatctcgccaggacgtccaccttgttaaaggagccatggcagccacttatttcgctctgaatcgaactcctcaggctccacgcctcgagcccgtgctctcgagcaacttagcgcagaggcgcggtatgaagaggttaaccagcacgcgcctttag

SEQ ID NO: 207760 - DNA, 5824 bp, Artificial Sequence
  derived and/or modified sequence
gggaggcggagaaggaggcggagggagcgattgtggccccggccgcggtggccggcgcggcctgccctttgtgaccgcagctcgcgccccacgccccgcgcccatggccgccgtgccgggctccctggccacgcgtgcccgcccgcggacctgagccccgcgcctgggatgccggggatgcgcgtcccccggccctgcggctgctccgggctgggcgcggggcgatggacctgagcatgaagaagttcgccgtgcgcaggttcttctctgtgtacctgcgcaggaagtcgcgctccaagagctccagcctgagccggctcgaggaagaaggcgtcgtgaaggagatagacatcagccatcatgtgaaggagggctttgagaaggcagatccttcccagtttgagctgctgaaggttttaggacaaggatcctatggaaaggtgttcctggtgaggaaggtgaaggggtccgacgctgggcagctctacgccatgaaggtccttaagaaagccaccctaaaagttcgggaccgagtgagatcgaagatggagagagacatcttggcagaagtgaatcaccccttcattgtgaagcttcattatgcctttcagacggaaggaaagctctacctgatcctggacttcctgcggggaggggacctcttcacccggctctccaaagaggtcatgttcacggaggaggatgtcaagttctacctggctgagctggccttggctttagaccatctccacagcctggggatcatctacagagatctgaagcctgagaacatcctcctggatgaagaggggcacattaagatcacagatttcggcctgagtaaggaggccattgaccacgacaagagagcgtactccttctgcgggacgatcgagtacatggcgcccgaggtggtgaaccggcgaggacacacgcagagtgccgactggtggtccttcggcgtgctcatgtttgagatgctcacggggtccctgccgttccaggggaaggacaggaaggagaccatggctctcatcctcaaagccaagctggggatgccgcagttcctcagtggggaggcacagagtttgctgcgagctctcttcaaacggaacccctgcaaccggctgggtgctggcattgacggagtggaggaaattaagcgccatcccttctttgtgaccatagactggaacacgctgtaccggaaggagatcaagccaccgttcaaaccagcagtgggcaggcctgaggacaccttccactttgaccccgagttcacagcgcggacgcccacagactctcctggcgtccccccgagtgcaaacgctcatcacctgtttagaggattcagctttgtggcctcaagcctgatccaggagccctcacagcaagatctgcacaaagtcccagttcacccaatcgtgcagcagttacacgggaacaacatccacttcaccgatggctacgagatcaaggaggacatcggggtgggctcctactcagtgtgcaagcgatgtgtgcataaagccacagacaccgagtatgccgtgaagatcattgataagagcaagagagacccctcggaagagattgagatcctcctgcggtacggccagcacccgaacatcatcaccctcaaggatgtctatgatgatggcaagtttgtgtacctggtaatggagctgatgcgtggtggggagctcctggaccgcatcctccggcagagatacttctcggagcgcgaagccagtgacgtcctgtgcaccatcaccaagaccatggactacctccattcccagggggttgttcatcgagacctgaagccgagtaacatcctgtacagggatgagtcggggagcccagaatccatccgagtctgcgacttcggctttgccaagcagctgcgcgcggggaacgggctgctcatgacaccctgctacacggccaatttcgtggccccggaggtcctgaagcgtcaaggctatgatgcggcgtgtgacatctggagtttggggatcctgttgtacaccatgctggcaggatttaccccttttgcaaatgggccagacgatacccctgaggagattctggcgcggatcggcagtgggaagtatgccctttctgggggaaactgggactcgatatctgacgcagctaaagacgtcgtgtccaagatgctccacgtggaccctcatcagcgcctgacggcgatgcaagtgctcaaacacccgtgggtggtcaacagagagtacctgtccccaaaccagctcagccgacaggacgtgcacctggtgaagggcgcgatggccgccacctactttgctctaaacagaacacctcaggccccgcggctggagcccgtgctgtcatccaacctggctcagcgcagaggcatgaagagactcacgtccacgcggctgtagcgggtgggaccctggccccagcgtcccctgccagcatcctcgtgggctcacagaccccggcctcggagcccgtctggcacccagagtgaccacaagtccagcagggaggcggcgcccgccctcgccgtgtccgtgttttctttttcagccccggagagggtcctgacctgggggcttctccaagcctcactgcgccagcctccccgcccgctctcttttctcccaagcgaaaccaaatgcgccccttcacctcgcgtgcccgtgcgaggccgggggcttctttcagagcccgcgggtcctctcatacatggcttctgtttctgccgagagatctgttttccaattatgaagccggtcggtttggtcagactcccgacacccacgtcccaggtacccggtgggaaagtggcagtgcgagggcgcagccattggtggttgcagggccccagagggctggggtgacctggcatcccggggctccccacgggctggatgacggggttggcactgtggcgtccaggaggagatgcctggttctgcccaaaataatccaaagagccgtttcctcctcgcccttcagtttttgcctgaggtgctgggtagcccatcctttcctctgtcccagattcaaatgaggagtaagagcccagacgagaggaaggcaggctggatctttgccttgagagctccgtgtcaccaggatggaagggggtgcctctcggaggagcctgtgtccacctccagtctcggctttccccggggggccaagcgcactgggctgccgtctgtccccagctcccgtggccacacagctatctggaggctttgcagggagtcgtgggttctcgcacctgctcagccctgtgtcggcttcctgtgtgctcacctaaagctgtggttttgctgtgttcacttcgatttttctggtctgtggagaaactgtgaattggagaaatggagctctgtggcttcccacccaaaccttctcagtccagctggaggctggagggagacacaggccccacccagcagactgaggggcagaggcacaggtgggagggcagcggagatcagcgtggacaggagcgatgcactttgtagatgctgtggctttgtgttgcgttttgtgtctctgttgcacagatctgttttttcacactgatccgtattcccctgggtgtgcacacagggcgggtgtggggcatttaggccatgctgtgctctacttcattgagtaaaatcgagtgagaggttccgggcagcaggatcgacgcccagtccagccggcagagggaacacacgggtccttcattgtcctgtaagggtgttgaagatgctccctggcggcccccaagcagactagatgggaggaggcgccgctcagcccctcaccctgcatcactgaagagcggcgcctctgcagcaagcagggcttcaggaggtgcccgctggccacagccaggttttccctaagaagatgttattttgttgggttttgttccccctccatctcgattctcgtacccaactaaaaaaaaaaaaataaagaaaaaatgtgctgcgttctgaaaaataactccttagcttggtctgattgttttcagaccttaaaatataaacttgtttcacaagctttaatccatgtggattttttttttcttagagaaccacaaaacataaaaggagcaagtcggactgaatacctgtttccatagtgcccacagggtattcctcacattttctccatagaagatgctttttcccaaggctagaacgacttccaccatgatgaatttgctttttaggtcttaattatttcacttctttttagaaacttaggaagaagtggataatcctgaggtcacacaatctgtcctcccagaaatgaacaaaagtcatcaccttttctgcttgctacacaggcaacgattcccccatcagctgcccggaccctttggcctggcttggtgtgcaggcctgtctgtttgcttaaagtcagtgggttctggtgcagggagtgagaagtgggggaagtgaaagggaaagcatccgtgagaaagcggccacggttttccctccttgtgtgcccatggggcaccagctcatggtctttttcagtcatcccagtttgtacagacttagcttctgaactctaagaatgccaaagggaccgacgagactccccatcacagcgagctctgtccttacatgtatttgatgtgcatcagcggaggagaacactggcttggccctgctccgctgagtgtctgtgaaatacctctactttccctcccatatccagaacaaaatgatacttgacatccttccacaaaagtcagcctaaagaagttatggtatcatatgttaaactaagctttcaaaaaccttagtgaaatagcaagtgactgctttcaagcagcagtcgacatgtaaatgaaggtgttcttagaattcgcattttgccagctcagcgcacctccacaacgaatgaaatgctccgtatgatttgcacaaatgacatagacctccccaaaagttaactggctctccttcctcacacagttcatcataacccaaccccccacccccgggtcatgaaaatcacagaacttataaacacattgaaccctagatctcaggcttcctgacctaccgccagtggccccttgctggccaccctatagggtcctccttccctggcagccccccatgtgggagaaatacctgattctcccaatctgcagtgggagagctttgctgaattccatcccaaagtcaaacatgggcaagaggtgaggatttcacttttaccctcaagtccgatttgtctgtgattttaaactaactgtgtatgtattgatgtttggaagattgtttgaattttaaagtgataatagtacttaatgttatccagtattgttcattaaatggtgttatcctaaagctgcacttgggatttttacctaacgctttactgattctctcaagcacatggcaaagtttgatttgcactccgttcatttctgacacgttttgctgcctcctacctttctaagcgtcatgcaaattcgagaatggagaaggacgctgccggtccctgagcggtgtggagagggcggaaggtggactccagcgcagcttgaggggctgaggacggaggctgcagcatctgtgtcgttctactgagcacgcttctctgcctcgctcctgactcagcactttgttcactggctcagcagttatgtttacacatcatttttatgttcctgctttgtaattcatgtttgagatgggtggccactgtacagatatttattacgctttccagactttctgaatagatttttttgaataaacatggttttatgaagtgtaatctttttctagcctaacaataa

SEQ ID NO: 207761 - DNA, 1181 bp, Artificial Sequence
  derived and/or modified sequence
cggagaaggaggcggagggagcgattgtggccccggccgcggtggccggcgcggcctgccctttgtgaccgcagctcgcgccccacgccccgcgcccatggccgccgtgccgggctccctggccacgcgtgcccgcccgcggacctgagccccgcgcctgggatgccggggatgcgcgtcccccggccctgcggctgctccgggctgggcgcggggcgatggacctgagcatgaagaagttcgccgtgcgcaggttcttctctgtgtacctgcgcaggaagtcgcgctccaagagctccagcctgagccggctcgaggaagaaggcgtcgtgaaggagatagacatcagccatcatgtgaaggagggctttgagaaggcagatccttcccagtttgagctgctgaaggttttaggacaaggatcctatggaaaggtgttcctggtgaggaaggtgaaggggtccgacgctgggcagctctacgccatgaaggtccttaagaaagccaccctaaaagttcgggaccgagtgagatcgaagatggagagagacatcttggcagaagtgaatcaccccttcattgtgaagcttcattatgcctttcagacggaaggaaagctctacctgatcctggacttcctgcggggaggggacctcttcacccggctctccaaagaggtcatgttcacggaggaggatgtcaagttctacctggctgagctggccttggctttagaccatctccacagcctggggatcatctacagagatctgaagcctgagaacatcctcctggatgaagaggggcacattaagatcacagatttcggcctgagtaaggaggccattgaccacgacaagagagcgtactccttctgcgggacgatcgagtacatggcgcccgaggtggtgaaccggcgaggacacacgcagagtgccgactggtggtccttcggcgtgctcatgtttgagatgctcacggggtccctgccgttccaggggaaggacaggaaggagaccatggctctcatcctcaaagccaagctggggatgccgcagttcctcagtggggaggcacagagtttgctgcgagctctcttcaaacggaacccctgcaaccggctgggtgagaaaacggccctctgcccccgtgtgagttgctccaggctcctaggcttctga

SEQ ID NO: 207762 - DNA, 2282 bp, Artificial Sequence
  derived and/or modified sequence
actgtttacagtagctgtgctggaaaccacatgctcctgccatggatgcagccgattcaggaacagacttgatcttcctaaggcattgcatgcaaatcctcatcaagctctagataaaattacctgcttcataaaacagaaaaggcacatatttcaaaatgaaatgaagaaggcgtcgtgaaggagatagacatcagccatcatgtgaaggagggctttgagaaggcagatccttcccagtttgagctgctgaaggttttaggacaaggatcctatggaaaggtgttcctggtgaggaaggtgaaggggtccgacgctgggcagctctacgccatgaaggtccttaagaaagccaccctaaaagttcgggaccgagtgagatcgaagatggagagagacatcttggcagaagtgaatcaccccttcattgtgaagcttcattatgcctttcagacggaaggaaagctctacctgatcctggacttcctgcggggaggggacctcttcacccggctctccaaagaggtcatgttcacggaggaggatgtcaagttctacctggctgagctggccttggctttagaccatctccacagcctggggatcatctacagagatctgaagcctgagaacatcctcctggatgaagaggggcacattaagatcacagatttcggcctgagtaaggaggccattgaccacgacaagagagcgtactccttctgcgggacgatcgagtacatggcgcccgaggtggtgaaccggcgaggacacacgcagagtgccgactggtggtccttcggcgtgctcatgtttgagatgctcacggggtccctgccgttccaggggaaggacaggaaggagaccatggctctcatcctcaaagccaagctggggatgccgcagttcctcagtggggaggcacagagtttgctgcgagctctcttcaaacggaacccctgcaaccggctgggtgctggcattgacggagtggaggaaattaagcgccatcccttctttgtgaccatagactggaacacgctgtaccggaaggagatcaagccaccgttcaaaccagcagtgggcaggcctgaggacaccttccactttgaccccgagttcacagcgcggacgcccacagactctcctggcgtccccccgagtgcaaacgctcatcacctgtttagaggattcagctttgtggcctcaagcctgatccaggagccctcacagcaagatctgcacaaagtcccagttcacccaatcgtgcagcagttacacgggaacaacatccacttcaccgatggctacgagatcaaggaggacatcggggtgggctcctactcagtgtgcaagcgatgtgtgcataaagccacagacaccgagtatgccgtgaagatcattgataagagcaagagagacccctcggaagagattgagatcctcctgcggtacggccagcacccgaacatcatcaccctcaaggatgtctatgatgatggcaagtttgtgtacctggtaatggagctgatgcgtggtggggagctcctggaccgcatcctccggcagagatacttctcggagcgcgaagccagtgacgtcctgtgcaccatcaccaagaccatggactacctccattcccagggggttgttcatcgagacctgaagccgagtaacatcctgtacagggatgagtcggggagcccagaatccatccgagtctgcgacttcggctttgccaagcagctgcgcgcggggaacgggctgctcatgacaccctgctacacggccaatttcgtggccccggaggtcctgaagcgtcaaggctatgatgcggcgtgtgacatctggagtttggggatcctgttgtacaccatgctggcaggatttaccccttttgcaaatgggccagacgatacccctgaggagattctggcgcggatcggcagtgggaagtatgccctttctgggggaaactgggactcgatatctgacgcagctaaagacgtcgtgtccaagatgctccacgtggaccctcatcagcgcctgacggcgatgcaagtgctcaaacacccgtgggtggtcaacagagagtacctgtccccaaaccagctcagccgacaggacgtgcacctggtgaagggcgcgatggccgccacctactttgctctaaacagaacacctcaggccccgcggctggagcccgtgctgtcatccaacctggctcagcgcagaggcatgaagagactcacgtccacgcggctgtagcgggtgggaccctg

SEQ ID NO: 207763 - protein, 776 aa, Artificial Sequence
  derived and/or modified sequence
MAAPGDPQDELLPLAGPGSQWLRHRGEGENEAVTPKGATPAPQAGEPSPGLGARAREAASREAGSGPARQSPVAMETASTGVAGVSSAMDHTFSTTSKDGEGSCYTSLISDICYPPQEDSTYFTGILQKENGHVTISESPEELGTPGPSLPDVPGIESRGLFSSDSGIEMTPAESTEVNKILADPLDQMKAEAYKYIDITRPEEVKHQEQHHPELEDKDLDFKNKDTDISIKPEGVREPDKPAPVEGKIIKDHLLEESTFAPYIDDLSEEQRRAPQITTPVKITLTEIEPSVETTTQEKTPEKQDICLKPSPDTVPTVTVSEPEDDSPGSITPPSSGTEPSAAESQGKGSISEDELITAIKEAKGLSYETAENPRPVGQLADRPEVKARSGPPTIPSPLDHEASSAESGDSEIELVSEDPMAAEDALPSGYVSFGHVGGPPPSPASPSIQYSILREEREAELDSELIIESCDASSASEESPKREQDSPPMKPSALDAIREETGVRAEERAPSRRGLAEPGSFLDYPSTEPQPGPELPPGDGALEPETPMLPRKPEEDSSSNQSPAATKGPGPLGPGAPPPLLFLNKQKAIDLLYWRDIKQTGIVFGSFLLLLFSLTQFSVVSVVAYLALAALSATISFRIYKSVLQAVQKTDEGHPFKAYLELEITLSQEQIQKYTDCLQFYVNSTLKELRRLFLVQDLVDSLKFAVLMWLLTYVGALFNGLTLLLMAVVSMFTLPVVYVKHQAQIDQYLGLVRTHINAVVAKIQAKIPGAKRHAE

SEQ ID NO: 207764 - protein, 356 aa, Artificial Sequence
  derived and/or modified sequence
MAAEDALPSGYVSFGHVGGPPPSPASPSIQYSILREEREAELDSELIIESCDASSASEESPKREQDSPPMKPSALDAIREETGVRAEERAPSRRGLAEPGSFLDYPSTEPQPGPELPPGDGALEPETPMLPRKPEEDSSSNQSPAATKGPGPLGPGAPPPLLFLNKQKAIDLLYWRDIKQTGIVFGSFLLLLFSLTQFSVVSVVAYLALAALSATISFRIYKSVLQAVQKTDEGHPFKAYLELEITLSQEQIQKYTDCLQFYVNSTLKELRRLFLVQDLVDSLKFAVLMWLLTYVGALFNGLTLLLMAVVSMFTLPVVYVKHQAQIDQYLGLVRTHINAVVAKIQAKIPGAKRHAE

SEQ ID NO: 207765 - protein, 702 aa, Artificial Sequence
  derived and/or modified sequence
METASTGVAGVSSAMDHTFSTTSKDGEGSCYTSLISDICYPPQEDSTYFTGILQKENGHVTISESPEELGTPGPSLPDVPGIESRGLFSSDSGIEMTPAESTEVNKILADPLDQMKAEAYKYIDITRPEEVKHQEQHHPELEDKDLDFKNKDTDISIKPEGVREPDKPAPVEGKIIKDHLLEESTFAPYIDDLSEEQRRAPQITTPVKITLTEIEPSVETTTQEKTPEKQDICLKPSPDTVPTVTVSEPEDDSPGSITPPSSGTEPSAAESQGKGSISEDELITAIKEAKGLSYETAENPRPVGQLADRPEVKARSGPPTIPSPLDHEASSAESGDSEIELVSEDPMAAEDALPSGYVSFGHVGGPPPSPASPSIQYSILREEREAELDSELIIESCDASSASEESPKREQDSPPMKPSALDAIREETGVRAEERAPSRRGLAEPGSFLDYPSTEPQPGPELPPGDGALEPETPMLPRKPEEDSSSNQSPAATKGPGPLGPGAPPPLLFLNKQKAIDLLYWRDIKQTGIVFGSFLLLLFSLTQFSVVSVVAYLALAALSATISFRIYKSVLQAVQKTDEGHPFKAYLELEITLSQEQIQKYTDCLQFYVNSTLKELRRLFLVQDLVDSLKFAVLMWLLTYVGALFNGLTLLLMAVVSMFTLPVVYVKHQAQIDQYLGLVRTHINAVVAKIQAKIPGAKRHAE

SEQ ID NO: 207766 - DNA, 2331 bp, Artificial Sequence
  derived and/or modified sequence
atggccgcccccggtgacccccaagatgaactgctgcctctggctggtccaggatcccaatggctgcggcataggggcgaaggagaaaatgaagctgtgacaccaaagggagcaacccccgctccacaggctggtgagccatcgcctggacttggagcacgcgccagagaagccgcaagcagggaggccggtagcggacccgctcgtcaatccccagtggccatggagaccgcttcaaccggcgtcgctggagtctcaagtgcgatggaccacaccttttcaaccacatcaaaggacggggagggatcctgctacacttctctcatctccgatatttgctaccctccgcaagaggattccacatattttacaggaattctgcagaaggaaaacggtcatgtgacaatttctgaaagtcccgaggagctggggacgcctggtccatctctgccggatgtccctggaattgaatccaggggcctgtttagctccgatagcgggattgaaatgacccccgctgaaagcactgaagtcaataagattctcgccgacccactggatcaaatgaaagccgaagcttataaatatatcgatataacacggcctgaggaggttaagcaccaggagcagcatcacccggagcttgaggacaaagacttggacttcaagaataaggacaccgacataagcataaagcctgagggtgtcagagaaccggataaaccggcacccgttgagggcaagatcatcaaagaccacctcctagaagagagtacttttgccccatatatcgatgacctgagcgaggagcagcgccgggcgccacaaattactacacccgttaaaattactctgaccgaaattgagccgagtgttgaaacaactacccaggaaaaaactcccgagaagcaggatatatgtctcaagccctcccctgacaccgtgcccactgtgaccgtgtcagagccagaggacgatagtcctggctcaattacacctccatctagtgggaccgaaccgagcgcagccgagtctcaaggcaagggtagcatctcagaagatgagctcataaccgccatcaaagaagccaaaggtttatcttatgagaccgcggaaaatcccaggcccgtaggccagctcgccgatcggcccgaggttaaggcccgtagcggtcccccaaccattccatctcccttggaccacgaggccagtagtgcggagtctggggactcagagatcgagttagtcagtgaggacccaatggccgccgaagatgccttgccttctggatacgtgagtttcggccacgtgggaggtcctcctcctagtccagccagtcctagcattcagtacagcattctgcgtgaggagagggaagccgaactggacagcgaactaatcatcgaatcttgtgatgcaagttcggcaagtgaagaatcaccaaagcgtgagcaggattctcctccaatgaagccaagcgctctggatgccatacgcgaagaaaccggagtgagggccgaagagagggctccctcgcgcagaggcctggccgagcctggttcctttctggactatccgagtacagagccccagccaggcccagagctgccacccggtgacggggcattggagcctgagacaccgatgcttccccgtaagccggaggaagatagctcaagtaaccagagccctgcagccaccaaggggccaggccccttggggccaggtgctccaccaccgctgctctttctcaacaaacaaaaagctattgatctgctttactggagggatattaaacagactgggatagtatttggaagctttctcctgttattgttctcattgacccagtttagcgtggtgtctgttgtggcttatctagccctggccgctctatcggctacaatctctttccgtatctacaagtctgtcttgcaggctgtgcagaaaacagacgaaggccacccatttaaggcttatctggaactagaaattacactctcccaggaacaaatccagaagtacactgactgtctccagttctatgttaacagcacacttaaagagctgcgacggttgttcctggttcaggatctggttgactccctcaaattcgcagttttgatgtggctgctcacctatgtgggcgccctgtttaacggattgaccttgctgctcatggccgtcgtgtccatgttcactctgcctgttgtttacgtcaagcaccaggctcagatcgaccagtacctgggcctcgtccggacacacatcaacgcagttgtggcgaaaatccaggccaaaattcctggggccaaacgccacgccgagtag

SEQ ID NO: 207767 - DNA, 1071 bp, Artificial Sequence
  derived and/or modified sequence
atggccgcggaggatgccttacccagcgggtacgtgtcttttggccatgttggtgggccacctccctccccagcctctccctccatccagtactctatcctacgagaggaacgcgaggccgagttagatagtgaactaatcatcgagtcatgtgacgcctcatctgcctcagaagaatccccaaaaagagagcaggatagccctccgatgaagcccagtgccttggacgccataagagaagaaaccggcgtgcgggctgaggaacgcgcccccagtagacggggcctggcagaacctggctcatttctggattacccgagtaccgagccacaacccggcccggagctacctcctggtgacggagctctcgagcctgagacacccatgctcccaaggaagcctgaagaagattcatcttccaatcagtcccctgcggctacgaagggtcctggcccccttggaccaggggccccccccccactgctgttcctgaataagcagaaggctatcgacctactttattggagggacattaagcagaccggaatcgtgttcgggagttttctgctactactgttctcacttacccagttctcagtagtgtctgttgtggcctatctggccctggcagcacttagcgcgacaataagcttcaggatttacaagagcgtgttgcaggccgttcagaagaccgatgagggacaccccttcaaggcttatttagagcttgagataactctttctcaagagcagatacaaaagtatacagactgcctgcagttttatgtaaactccacactgaaggaactcaggaggctatttctcgtacaggatctggtggatagtttgaagtttgctgtactcatgtggttattgacatacgtgggcgccctatttaacggcctcactttactgcttatggcagtggtctccatgttcactctgccagttgtctacgtgaagcatcaagcccaaatagaccagtatctgggtcttgtgcggacacacatcaacgcagtggtggctaagatacaggccaaaatacccggagccaagcgccatgcggaatag

SEQ ID NO: 207768 - DNA, 2109 bp, Artificial Sequence
  derived and/or modified sequence
atggaaactgcctctacgggcgtggctggagtcagctcggctatggaccatacattttcaacgacatccaaggacggagaaggctcatgctacacatcccttatatccgatatctgctaccctccgcaggaagattctacctattttaccgggatactgcagaaggagaacggccacgtgacaatctctgagtcccctgaggagttgggcacacctggaccatcattgccagatgtgcctggcattgagagcaggggactgttttcaagtgatagtgggatcgaaatgacccctgctgagtctactgaagtaaataagatattagcagaccccctggaccagatgaaggctgaagcgtacaagtacattgatattacccggccagaggaagtaaaacatcaggagcaacatcaccccgaactagaggataaggacttagatttcaaaaataaggatactgatattagtattaaacccgaaggagtgagagaacccgataagccagcaccagtcgaagggaagataataaaggatcatttactggaagaatctacatttgccccctacattgacgacctcagcgaggagcagcgacgtgctcctcagatcacgacgccggtgaaaatcacactaacggaaatcgagccttcagtcgaaactaccacccaggaaaaaactcctgagaaacaagacatttgtcttaaacccagccctgatacggtgcctacagtaacagtgagtgagcctgaggacgacagccccggaagtattacacctccatcttcaggtaccgaaccatctgcggctgagtctcaggggaagggcagtatctcagaggatgaactgatcacagccatcaaagaagccaaaggactgtcatatgagactgccgagaaccctaggccagtgggacagctagcagaccgcccagaggtcaaagcacggagcggtcctccaaccatacctagtccactggatcacgaggcttcttcagcagagtcaggagacagcgagattgagctggtaagtgaagaccctatggccgcagaggatgctttgccctctggctacgtgtcgttcggccacgtggggggtccccctccctccccagcttctccgtctattcagtattctatactgagggaagaacgcgaggccgagctcgattcagagctaattatagagtcctgcgatgccagttctgcctccgaagagtcccccaagagagagcaggattcccctcccatgaaacccagcgccctagatgcgattcgggaagaaaccggggtgagagcagaggagcgcgctccatcacgtagagggcttgccgagccaggaagttttctggactatcccagcaccgagcctcagcctgggccagaactgcccccaggggatggtgccctggaaccagaaacacccatgctccctagaaagcctgaagaagatagctcatcaaaccagtcacccgctgccaccaaagggcccggaccactgggccccggagccccgccgcccctgctgtttctgaataaacagaaggccatagatctgttgtattggcgcgatattaagcagaccggcatcgtgttcggctccttcttgctgcttttgttcagcctcacgcagttcagcgtagtgtctgtcgttgcctatctggcgctggcagccctgagtgccacgatctccttccgcatctacaaatcagtcttgcaagcggtccaaaagacggacgagggacacccgtttaaggcctacttagagcttgaaatcaccttatctcaagagcaaatccagaagtataccgactgcttgcagttctacgtgaacagcaccctgaaggagctgcgccgcctttttctcgttcaggacctagtcgactccctgaaatttgcggtacttatgtggctgctgacctacgtgggcgcactcttcaatggcctgacgttgctcctgatggcggttgtgtctatgtttactctgcccgtggtgtacgtaaagcaccaggcccaaattgaccagtacctgggccttgttagaactcacatcaatgccgtggtggcgaagattcaggccaagattccaggggcaaaacggcatgcagaatag

SEQ ID NO: 207769 - DNA, 2331 bp, Artificial Sequence
  derived and/or modified sequence
atggccgcccctggggacccccaggatgagctgctgcccctggccggccctggcagccagtggctgcggcacagaggagaaggagaaaatgaggccgtgacccccaagggggccaccccagccccccaggccggggagcccagccctggcctgggcgcccgggcccgggaggccgccagccgggaggccggcagcggccctgcccggcagagccctgtggccatggagacagccagcactggagtggccggcgtgtcctctgccatggaccacaccttcagcaccaccagcaaggatggagagggcagctgctacaccagcctcatcagtgacatctgctacccaccccaggaggacagcacctacttcaccggcatcctgcagaaggaaaatggacatgtgaccatcagcgagagccctgaggagctgggcaccccaggccccagcctgcctgatgtgcccggcatcgagagccggggcctcttcagcagtgacagcggcatcgagatgaccccagctgagagcacagaggtgaacaagatcctggccgaccccctggaccagatgaaggccgaggcctacaagtacatcgacatcaccaggcctgaggaggtgaagcaccaggagcagcaccaccctgagctggaggacaaggacctggacttcaagaacaaggacacagacatcagcatcaagccagagggcgtgcgggagccagacaagccagcccctgtggagggcaagatcatcaaggaccacctgctggaggagagcacctttgccccctacattgatgacctgtctgaggagcagaggcgggccccccagatcaccacccctgtgaagatcaccctgacagaaattgagcccagcgtggagaccaccacccaggagaagaccccagagaagcaggacatctgcctgaagcccagcccagacacagtgcccaccgtgacagtgtctgagccagaagatgacagccctggcagcatcaccccacccagcagcggcacagagcccagcgctgctgagagccagggcaagggcagcatcagtgaagatgagctgatcacagccatcaaggaggccaagggcctgtcctatgaaacagctgagaaccccaggcctgtgggccagctggccgacaggcctgaggtgaaggcccggagcggcccccccaccatccccagccccctggaccacgaggccagcagcgctgagagcggggacagcgagattgagctggtgtctgaggaccccatggctgctgaagatgccctgcccagcggctacgtgtcctttggccacgtgggcggccccccacccagccctgccagccccagcatccagtacagcatcctgcgggaggagcgggaggccgagctggacagcgagctgatcatcgagagctgtgatgccagcagcgccagcgaggagagccccaagcgggagcaggacagcccccccatgaagcccagcgccctggatgccatccgggaggagaccggggtgcgggcagaggagcgggcccccagcagaagaggcctggccgagcccggcagcttcctggactaccccagcacagagccccagcccggccctgagctgcccccaggagatggagccctggagcctgagacccccatgctgcccaggaagccagaggaggacagcagcagcaaccagagccctgctgccaccaagggccctggccccctgggccctggggcccccccacccctgctcttcctgaacaagcagaaggccatcgacctgctgtactggagggacatcaagcagacaggaattgtgtttggcagcttcctgctgctgctcttcagcctgacccagttctctgtggtgtctgtggtggcctacctggccctggccgccctgagcgccaccatctccttccgcatctacaagtctgtgctgcaggccgtgcagaagacagatgagggccaccccttcaaggcctacctggagctggagatcaccctgagccaggagcagatccagaagtacacagactgcctgcagttctacgtgaacagcaccctgaaggagctgcggcggctcttcctggtgcaggacctggtggacagcctgaagtttgctgtgctgatgtggctgctgacctacgtgggcgccctcttcaacggcctgaccctgctgctgatggctgtggtgtccatgttcaccctgcctgtggtgtatgtgaagcaccaggcccagattgaccagtacctgggcctggtgaggacccacatcaatgctgtggtggccaagatccaggccaagatccctggggccaagagacatgctgagtag

SEQ ID NO: 207770 - DNA, 1071 bp, Artificial Sequence
  derived and/or modified sequence
atggctgctgaagatgccctgcccagcggctacgtgtcctttggccacgtgggcggccccccacccagccctgccagccccagcatccagtacagcatcctgcgggaggagcgggaggccgagctggacagcgagctgatcatcgagagctgtgatgccagcagcgccagcgaggagagccccaagcgggagcaggacagcccccccatgaagcccagcgccctggatgccatccgggaggagaccggggtgcgggcagaggagcgggcccccagcagaagaggcctggccgagcccggcagcttcctggactaccccagcacagagccccagcccggccctgagctgcccccaggagatggagccctggagcctgagacccccatgctgcccaggaagccagaggaggacagcagcagcaaccagagccctgctgccaccaagggccctggccccctgggccctggggcccccccacccctgctcttcctgaacaagcagaaggccatcgacctgctgtactggagggacatcaagcagacaggaattgtgtttggcagcttcctgctgctgctcttcagcctgacccagttctctgtggtgtctgtggtggcctacctggccctggccgccctgagcgccaccatctccttccgcatctacaagtctgtgctgcaggccgtgcagaagacagatgagggccaccccttcaaggcctacctggagctggagatcaccctgagccaggagcagatccagaagtacacagactgcctgcagttctacgtgaacagcaccctgaaggagctgcggcggctcttcctggtgcaggacctggtggacagcctgaagtttgctgtgctgatgtggctgctgacctacgtgggcgccctcttcaacggcctgaccctgctgctgatggctgtggtgtccatgttcaccctgcctgtggtgtatgtgaagcaccaggcccagattgaccagtacctgggcctggtgaggacccacatcaatgctgtggtggccaagatccaggccaagatccctggggccaagagacatgctgagtag

SEQ ID NO: 207771 - DNA, 2109 bp, Artificial Sequence
  derived and/or modified sequence
atggagacagccagcactggagtggccggcgtgtcctctgccatggaccacaccttcagcaccaccagcaaggatggagagggcagctgctacaccagcctcatcagtgacatctgctacccaccccaggaggacagcacctacttcaccggcatcctgcagaaggaaaatggacatgtgaccatcagcgagagccctgaggagctgggcaccccaggccccagcctgcctgatgtgcccggcatcgagagccggggcctcttcagcagtgacagcggcatcgagatgaccccagctgagagcacagaggtgaacaagatcctggccgaccccctggaccagatgaaggccgaggcctacaagtacatcgacatcaccaggcctgaggaggtgaagcaccaggagcagcaccaccctgagctggaggacaaggacctggacttcaagaacaaggacacagacatcagcatcaagccagagggcgtgcgggagccagacaagccagcccctgtggagggcaagatcatcaaggaccacctgctggaggagagcacctttgccccctacattgatgacctgtctgaggagcagaggcgggccccccagatcaccacccctgtgaagatcaccctgacagaaattgagcccagcgtggagaccaccacccaggagaagaccccagagaagcaggacatctgcctgaagcccagcccagacacagtgcccaccgtgacagtgtctgagccagaagatgacagccctggcagcatcaccccacccagcagcggcacagagcccagcgctgctgagagccagggcaagggcagcatcagtgaagatgagctgatcacagccatcaaggaggccaagggcctgtcctatgaaacagctgagaaccccaggcctgtgggccagctggccgacaggcctgaggtgaaggcccggagcggcccccccaccatccccagccccctggaccacgaggccagcagcgctgagagcggggacagcgagattgagctggtgtctgaggaccccatggctgctgaagatgccctgcccagcggctacgtgtcctttggccacgtgggcggccccccacccagccctgccagccccagcatccagtacagcatcctgcgggaggagcgggaggccgagctggacagcgagctgatcatcgagagctgtgatgccagcagcgccagcgaggagagccccaagcgggagcaggacagcccccccatgaagcccagcgccctggatgccatccgggaggagaccggggtgcgggcagaggagcgggcccccagcagaagaggcctggccgagcccggcagcttcctggactaccccagcacagagccccagcccggccctgagctgcccccaggagatggagccctggagcctgagacccccatgctgcccaggaagccagaggaggacagcagcagcaaccagagccctgctgccaccaagggccctggccccctgggccctggggcccccccacccctgctcttcctgaacaagcagaaggccatcgacctgctgtactggagggacatcaagcagacaggaattgtgtttggcagcttcctgctgctgctcttcagcctgacccagttctctgtggtgtctgtggtggcctacctggccctggccgccctgagcgccaccatctccttccgcatctacaagtctgtgctgcaggccgtgcagaagacagatgagggccaccccttcaaggcctacctggagctggagatcaccctgagccaggagcagatccagaagtacacagactgcctgcagttctacgtgaacagcaccctgaaggagctgcggcggctcttcctggtgcaggacctggtggacagcctgaagtttgctgtgctgatgtggctgctgacctacgtgggcgccctcttcaacggcctgaccctgctgctgatggctgtggtgtccatgttcaccctgcctgtggtgtatgtgaagcaccaggcccagattgaccagtacctgggcctggtgaggacccacatcaatgctgtggtggccaagatccaggccaagatccctggggccaagagacatgctgagtag

SEQ ID NO: 207772 - DNA, 2331 bp, Artificial Sequence
  derived and/or modified sequence
atggccgcccccggcgacccccaggacgagctgctgcccctggccggccctggcagccagtggctccgccaccgtggcgagggtgagaatgaggccgtgactcctaaaggggccacacctgcgccccaggccggtgaacccagcccggggctgggagctcgcgcgcgcgaagctgcttcacgggaggccggaagcggacccgcccgacagagccccgtggcaatggaaaccgcttctactggggtggctggcgtctcgtctgcaatggaccacacatttagcacaactagcaaagatggcgagggctcctgttatacctccctgattagtgatatctgctaccctcctcaggaagattccacttatttcacaggaattttgcagaaggagaacggccatgtaacaatcagtgagtcccccgaggagctaggcacaccagggccatctttgccagatgttcctggcattgaatcccgcggcttgttcagctctgattccggtatagagatgactccagctgagtccaccgaggtgaacaagatactggctgaccctcttgaccagatgaaagccgaggcttacaagtacatagatattacacggcctgaagaggtgaagcaccaggagcagcatcaccccgaactcgaggataaggacctcgatttcaaaaacaaagataccgacattagtattaaaccagagggagtacgagaacccgataagccagcgcctgtcgagggcaagattatcaaggaccatctgttagaagagtccaccttcgctccctacatcgacgatctgtcagaggagcagcgaagagccccccagatcacaacgcccgtaaaaattacattaacagagatagaaccttctgtggagaccaccactcaggaaaaaacacccgagaaacaggatatttgcctcaagccaagccccgacaccgtccccaccgtcacagtctccgaacctgaagatgattctccaggcagcatcaccccaccttccagcggcacggagccatccgccgccgaaagccagggcaaaggcagtatctcagaagacgaacttattacagccataaaggaggccaagggactgtcttacgagaccgcagaaaatccccgaccggtcggccagctggcagaccgcccagaggtgaaggcgaggtccgggccccccacaattccatcccccctggaccacgaggcaagctccgccgagtctggcgacagtgaaatcgaacttgtttctgaagatcccatggctgcagaggacgccctgccttctggttacgtatctttcggacacgtggggggccccccaccctcgccagctagtccctcaatacagtattccatccttagagaagagcgggaagctgagctggacagtgagctgattattgaaagctgcgatgccagttccgcctcggaagagagtcctaagcgggagcaggactcacccccgatgaagccttcagccctcgacgccatccgggaggagacgggcgtacgggccgaagaacgggctccatctcgccgtggactggctgagccaggaagctttttggactatccttccactgaaccccagcccggtcccgaactcccacctggcgacggagccctggaacccgaaacccccatgttgccacgcaagcctgaggaggattcatcgtccaaccagtcccctgctgccactaaaggcccaggaccccttggcccaggcgcccctcctccattactctttctgaacaagcagaaggccatagacctgctgtattggagagatatcaaacagacggggatcgtcttcggttccttcctactactcctgttctctctgacccagttttctgtggtctccgtcgttgcatacctagccctcgcggctctttccgcaacaatctcctttagaatctataagagcgtgctacaggccgtgcagaagaccgatgaaggccatcccttcaaagcttacctggaactcgaaataacactgtcacaggaacagatccagaagtacactgattgccttcagttttatgttaatagcacacttaaggaactgaggaggctctttcttgtacaagacttggtggacagtctcaagtttgctgtcctgatgtggttattaacttacgtgggcgccctttttaatggtttgacactcctgctgatggcagtggtgtccatgtttaccctgcccgtcgtgtatgtgaaacaccaggcacagatcgaccagtacctgggtttggtgagaacacacatcaatgcggtggtcgcaaaaatccaggcaaaaatccctggggccaagcggcacgcagagtag

SEQ ID NO: 207773 - DNA, 1071 bp, Artificial Sequence
  derived and/or modified sequence
atggccgccgaggacgccctgcccagcggctacgtgagcttcggccatgtaggggggccgcccccttctccggcatcccccagtatccagtacagtattctgcgcgaagagcgtgaagcagagctcgattccgagctcattatcgagagttgcgatgcgagcagtgcaagcgaggaatcaccgaagcgggaacaggactcacctccaatgaagccctccgctctggatgccattcgcgaagagaccggagtgcgcgcagaagaaagagctccatcccggagaggtctcgccgagccaggctcgtttctggattatccatccacagagccccagcccggacctgagctgccccccggcgacggcgctttggaacccgaaactcctatgctcccccgaaagcctgaagaggactcaagcagcaaccagtctcctgccgccacaaaaggacccggacccctagggccaggggcccccccaccactgttgttcctcaacaaacagaaggccattgatttactgtactggcgcgacatcaaacaaactggcattgtattcggatcatttctactgctgctgttttcactgacccagttctcagtggtgtccgtggtcgcctaccttgctttagcggccctcagcgccaccatttcgttcaggatctacaagtccgtcttacaggctgtgcaaaagaccgacgagggccacccttttaaagcttacttggaactggagatcaccctctcccaggagcagattcagaagtacaccgattgcctacagttctacgttaactctactctgaaggaattacgtaggcttttcctcgtccaggaccttgtggattccttaaagtttgcagtgctgatgtggctcttgacttatgtgggtgccctgttcaacggattgacactcctcctgatggccgtggtctccatgttcaccctgcccgtcgtgtatgtgaaacaccaagcgcagattgaccaatacctgggcctagtgaggacacacattaacgccgtggtggccaagatccaggctaaaatccccggcgcaaaacgtcatgcagagtag

SEQ ID NO: 207774 - DNA, 2109 bp, Artificial Sequence
  derived and/or modified sequence
atggagaccgccagcaccggcgtggccggcgtgagcagcgccatggaccatacgtttagcacaacctcgaaagacggagagggctcttgctatacaagtttgatcagcgacatctgctaccctcctcaggaggacagcacttactttacaggtatcctccagaaggaaaacgggcacgtaacaatttcggaatctccggaagaattgggaacacctggcccatcactccccgatgtacccggaatcgagagtcggggcttattttcctctgactccggtatagagatgactccagccgagagtactgaagttaacaagatccttgccgatcctctggatcagatgaaggctgaggcttacaagtatatcgacattactcgtcctgaagaagtgaaacatcaggagcagcatcacccagaacttgaggacaaagaccttgactttaagaacaaggatacagatattagcattaagcccgagggtgtgcgggaacctgacaagccagctcccgttgaaggcaagattattaaggatcatctgttggaggagtccacctttgcaccatatatagatgacctttccgaggaacagcgtcgcgcaccccagatcaccaccccagtaaagattaccctgactgaaattgagccgtcggtcgagactactacccaggaaaagacaccggagaagcaagacatttgcctcaagccttcaccagataccgtacctacggtgaccgtgtctgagcccgaagatgatagtcctggctccattacgccaccgagctctgggacagaacctagcgccgccgaatcccaggggaagggatctattagcgaggacgaattaataaccgccattaaggaagccaagggcctctcgtatgagacagctgagaaccctcgacccgtcggtcagctagccgatcggcctgaagtcaaggcgaggtccggcccccctaccatcccctcgccattggaccatgaagcttccagcgctgaaagtggagatagtgagatcgagttggtctcagaggaccccatggccgcggaggatgcactgccatccgggtacgtatctttcggacatgtcggcgggcctcccccgtctcccgcatccccatccatacagtatagcattttgcgcgaggaacgcgaagctgaactcgattctgagctgatcattgaatcatgtgacgcttccagcgcttctgaggagtcgcccaaaagagagcaggactcaccccccatgaaaccaagcgctctcgacgcgatccgggaggagactggcgttagggcagaggaacgggcaccgtcaagaaggggcctagccgagcctgggagctttctggactacccatcaactgaaccacaaccagggccggaacttccaccaggagacggggccctcgagccagaaacacccatgttaccaagaaagccagaggaggactccagcagtaatcagtctcctgctgccacaaaaggccccgggccactcggccccggtgctccacccccgctgctgtttttaaacaaacagaaggcaatcgacctactgtactggcgcgatattaagcagactggcattgttttcgggtcattcttgctccttttgtttagtctcacgcagttcagcgtggtgtccgttgtggcctacttggcactcgccgcactgagcgctactatcagctttagaatctataaatccgtcctgcaagctgtccagaagacagacgaaggccatccctttaaggcgtacttggaacttgaaattactctcagtcaggagcagatacagaagtataccgactgcctgcaattttatgtgaactcaaccctgaaagagctccgcaggctcttcttggtccaggaccttgtcgatagcttgaagttcgccgtcttgatgtggctgcttacatacgtaggagcgctctttaatggcctcactctcctgcttatggcagtggtgtctatgtttacgttgccggtagtgtacgtcaagcaccaagcacaaatcgatcagtatttgggcctcgtgaggacccacatcaatgcagtcgtcgctaagatccaggcaaaaatccctggagccaaaagacatgcagagtag

SEQ ID NO: 207775 - DNA, 2331 bp, Artificial Sequence
  derived and/or modified sequence
atggccgcacccggtgatccacaggatgaactgctccccctggccggtccgggatcccagtggcttcggcacagaggcgagggcgagaacgaggccgttactcccaagggtgctacaccagcccctcaggctggcgaaccgtctcctggcttaggcgctagagccagggaggccgctagcagagaagccggaagcggacccgcacgtcagtcaccagtggccatggaaactgctagcaccggggtggctggagtgtcttcagctatggatcacacattcagtacgacctctaaggatggcgaaggtagctgttacaccagtctcatctccgacatctgctatccaccccaggaagactctacttacttcaccgggatccttcagaaggaaaatggtcacgtgaccatctccgaaagtcctgaagagctagggaccccaggccctagcctgcccgacgtgcccggaatcgagagtagagggctcttctctagcgatagtggcattgagatgaccccagccgagtcaacagaggtcaataagattcttgcagatcctctggaccagatgaaggccgaggcctacaagtatatcgacatcaccaggcccgaggaggtgaagcaccaagaacagcaccatcccgaattagaagacaaggacttggactttaaaaataaggacaccgatatcagcataaagcccgaaggcgtgcgcgagcccgataaaccagccccagtggaaggaaagatcatcaaagaccacctgctggaagaatccaccttcgccccttacatcgacgacctttctgaagagcagcgcagggcccctcaaataaccaccccggtgaagataaccttgacggaaattgagccctcagtagagactaccacccaggaaaagaccccagaaaagcaggacatctgtctgaaaccctcaccagatacagtgccaactgttaccgtgtctgagcctgaggatgactcgcctggcagtatcaccccaccatcttcggggaccgagcccagtgccgctgagtcacagggcaagggaagtatttcagaagacgagctcatcactgcaatcaaggaggccaagggtctgagctacgagactgctgaaaacccacgcccagtgggacaactcgccgatcgcccagaggtgaaggctaggtccggccctccaactatcccatctccactggaccacgaggcctcctcagcggagtctggcgattctgagatcgagctcgtaagtgaggaccccatggctgctgaggacgccctgccctctgggtacgtgagtttcggacacgtgggtggacccccaccttcccccgcatctccttccattcagtatagtatcctccgggaggaacgtgaggccgaactagactcagaactgataattgaatcctgtgacgcatccagtgcctcggaagagtcccctaagcgcgagcaggacagtccacctatgaagccctcagccttggacgccatccgcgaggaaaccggagtccgcgctgaggagcgggctccttcccgacggggacttgctgagcccggttcctttcttgattacccaagcactgagcctcaaccagggccagaactgccccctggcgacggagcgctggagccagaaacaccgatgctgcccaggaagcctgaagaagacagttcatctaaccagtcgccagccgcaaccaagggccctggtcccctgggcccaggcgctccaccgccattattatttctgaacaagcagaaggccattgatctcctctactggcgggacataaaacagaccggcattgtgtttggttcgtttctgttgctcttgttctcgctgacccagttcagtgtggtgtcagtggtggcctaccttgctctcgccgcactctcagctaccatttcgttcaggatttataaatcggtgctccaggcggtccagaaaactgacgagggtcaccccttcaaagcctacttagagctcgaaattacactctcacaggagcagattcagaagtatactgattgtctgcagttctacgtcaactcaacattgaaagagttacgacggctgttcctggtgcaggacctggtcgattctctcaaatttgcggtgctcatgtggcttctgacatacgtgggagcccttttcaatggtcttacacttttgctgatggcagtggtgtccatgttcacgctacctgtggtctatgtaaaacaccaggctcagatcgaccagtacctgggcttggttagaactcatataaacgccgtggtggcgaaaatccaggcaaagatccccggagcgaaaaggcatgcagaatag

SEQ ID NO: 207776 - DNA, 1071 bp, Artificial Sequence
  derived and/or modified sequence
atggcagccgaggatgccctgcctagtgggtacgtgtcattcggtcacgtgggaggtccccctcctagccccgcttctcctagcatccagtactctattctccgggaagagcgggaagcagaattggatagcgagcttatcatcgagagctgcgatgcaagttcagcaagtgaagagtcccctaagcgcgaacaagactctccaccaatgaagccctcagcgctggatgctatcagagaggagacaggcgtccgggctgaagagcgagcgccatcccgacggggattggcagagccaggcagctttctcgactatcccagtaccgagccccagcctgggcctgagctgcctcccggtgacggggctcttgagcccgaaacacctatgttgccaaggaaacctgaagaggactcctcctcaaatcaatcccctgctgctaccaagggaccaggccctctgggaccaggtgcgccacccccactgctgttccttaataagcaaaaagcaatcgacctgctgtactggcgggacatcaagcagacagggatcgtgtttgggtcatttctcctgctgctttttagcttgacccaattctccgtggtgagcgtcgtcgcttacctggcactcgcggctttgtctgccactatctcgtttagaatttacaagtccgtcctgcaagccgtgcagaagaccgatgagggccatccattcaaggcttatctcgagctggaaatcacgctgtcacaagaacagatacagaagtacaccgactgccttcagttctatgtgaactctactctcaaagagctgaggaggctgttcctggttcaggatttggtcgacagccttaagtttgccgtcctaatgtggttgcttacatatgtgggagccctgtttaatgggcttacactattgcttatggccgtcgtgagtatgttcaccctgcccgtagtctacgttaagcaccaggcccagatcgatcaatacctcggactagtgaggactcacattaacgcggtggtggccaagatacaagctaagattcctggcgctaaacgccatgccgagtag

SEQ ID NO: 207777 - DNA, 2109 bp, Artificial Sequence
  derived and/or modified sequence
atggagacagcgagtaccggtgtcgcgggtgtgagcagcgccatggaccacaccttctccaccacctctaaggatggtgagggtagttgttacacatcccttatctcagacatttgttatcctccgcaggaagactcaacatattttacgggaatcttgcagaaagaaaatgggcacgttacaatttctgagtctccagaagagttgggtactccaggaccgagtttgccggacgtgcctggcatagagtctcgcggactgttttccagcgactccggcatcgagatgacccccgctgagtcaactgaggtgaataagattttggccgacccacttgatcagatgaaagccgaagcctacaagtatatcgatattacacgcccagaggaggtcaagcatcaggaacagcatcaccccgagctggaggataaggacctggacttcaaaaacaaagatacggacatttccatcaaacccgaaggtgtgagggagccagacaagcccgcacctgtggaggggaagatcattaaggatcacttattagaagaaagtacttttgccccatatatcgacgacctgagcgaagaacagcggagagccccacagatcaccaccccggtgaaaattacattaaccgaaatcgagccctctgttgagaccaccacccaggaaaagaccccagagaagcaagacatctgccttaagcccagcccagatactgtgccaaccgtgaccgttagtgagcctgaggacgactcgcccggatcgatcaccccaccatcatcaggcaccgagccctccgctgccgaatcccaggggaaggggtccatcagtgaggatgaactgataaccgcaattaaggaagcaaaaggattgagctacgaaactgcagaaaatcctcgacctgtgggccagctggccgaccggccagaggttaaagctagaagcggccctcctacaatcccatctccactggaccatgaggcctcaagcgctgaatccggggatagtgagattgaacttgtgtcagaggatcctatggcagcggaagacgccctgcctagtggatacgtgagcttcggccacgtcggcggaccacccccaagccccgcttccccctctattcagtatagcatcctgcgggaggagagggaggctgagctagactctgaacttatcatagaatcttgcgatgcttcatcagcctccgaagagagtcctaaacgggaacaggattctccccctatgaaaccaagcgccctggatgcaattcgggaggagactggggttagggctgaagaaagagccccttcccgcagaggactcgccgaaccaggatctttcttagactaccccagcaccgagcctcagcctggcccagagttgccccctggcgacggggcactagaacctgaaactccaatgctgccgcgtaaacctgaggaagatagcagtagtaatcagagtcctgctgcaactaagggcccaggacccctgggtccaggagcaccacccccacttcttttcctgaataagcagaaggccatcgatttgctatattggcgagatattaaacagactggtattgtgtttggcagcttcctgctcttgctgtttagccttacacaatttagcgtcgtgtcagtggttgcatatctggccttggccgctctcagtgcgaccatcagttttaggatctacaagagcgttttgcaggccgtgcagaagacagatgaaggacatcccttcaaggcttacctggagcttgaaatcaccctgtctcaggaacagattcaaaagtacactgattgcttacagttctacgttaattccactctgaaagagctccgcaggctgttccttgtacaagatctagtggacagtctgaaatttgcagtgttaatgtggctcctgacatacgtgggggcactgttcaacgggctcaccttactgctgatggccgtcgtctctatgtttacactgcccgttgtctatgtaaagcatcaggcgcagatcgaccagtacctgggccttgtgcgcactcacatcaatgcagtggtcgccaagatccaagcaaagatccctggagctaaacgccatgcagagtag

SEQ ID NO: 207778 - DNA, 3435 bp, Artificial Sequence
  derived and/or modified sequence
aggaggacccggaccaagcaggccattttcacctgcgtaataacaggattgggaatagcgaagcagcggcggcagcagcgagtggagtaggaggaggagcgcaggcagcggccgcggcggggccggaggaagaggaggggggagaaggaggagctgaagcgggaagagcggcaggcagcggctcggcggagttgcagcagaggcggcggcgacgctgagacaccgcagcttccctgagcgccgagtccctccggggacagcagcagggagcgcccgcgcagccaccgagcctctgcccagccaagccgccgtcgccgcgccgggggaccgccagccatggccgcgccgggggatccgcaggacgagctgctgccgctggccggccccgggtcccagtggctcaggcaccggggggagggggagaacgaagcggtgacgccgaaaggggccacgccggcgccgcaggctggggagcccagcccggggttgggcgccagggcccgggaagcggcgtcgcgggaagccggctcgggccccgcccggcagtcgcccgttgccatggaaactgcatccacaggtgtggcaggtgtttccagtgccatggaccacaccttctcaacaacatcaaaagatggggaaggatcgtgttacacatctctcatttctgacatctgctatccacctcaggaggattctacatattttactggaattcttcagaaggaaaatggccacgtcaccatttcagagagccctgaggagctgggtacacccggcccctccttaccagatgtgcctgggatagagtctcgtggcttatttagttctgattctggaatagagatgactcctgcagagtccacggaagtgaacaagatcttagcagaccctctggaccagatgaaagcagaggcctataaatacattgacataaccagacccgaggaggtgaagcaccaagaacaacatcaccccgagctggaagataaagacttggactttaagaataaagacactgacatctcaattaaacctgaaggagtccgtgaacctgacaaaccagctcctgtggagggaaaaatcatcaaggaccatttattggaagaatccacatttgctccatacatagatgatctctctgaagaacagcgcagggctcctcagatcaccacccctgtcaaaatcacactgacggaaatagaaccttctgttgaaaccactacccaagagaagacccctgagaagcaagatatatgtctaaagccaagtcctgacacagtccccactgtcactgtctcggagcctgaagacgacagcccaggatctatcacccctccatcttctggaacagaaccatctgctgcagaatcccaggggaaaggcagcatctccgaggatgagctgatcaccgccatcaaagaagcaaagggattatcgtatgaaaccgccgagaacccacggccggtgggccagctggccgacaggcccgaggtcaaggccaggtccggaccgccaaccatccccagccccctggaccacgaggccagcagcgcggagtcgggggactcagagatcgagctggtgtccgaggaccccatggccgcggaggacgcgctgccctcaggctatgtgagctttggccacgtgggcggcccgccgccctcgcccgcctcgccatccatccagtacagcatcctgagggaggagcgcgaggccgagctggacagcgagctcatcatcgagtcgtgcgacgcctcctcggcctcggaggagagccccaagcgggagcaggactcacccccgatgaagcccagcgccctggatgccatccgggaggagactggcgtccgggccgaggagcgtgcgccaagccggcggggcctggccgagccgggttccttcctcgactacccctcaactgagccccagcctggccccgagctgccccctggagacggagccctggagcctgagacgcccatgttgccacggaagcctgaagaagactcgagttccaaccaaagtcctgcggccacaaagggccctgggcctctaggtcctggcgccccgcccccactgctgtttctcaataagcaaaaagctattgacctgttgtattggcgggacatcaagcagacgggcatcgtgtttgggagtttcctgctgctgctcttctccctgacccagttcagcgtggtgagcgtcgtggcctacctggccctggccgcactctcagccaccatcagtttccgcatctacaagtctgttttacaagcagtgcagaaaaccgacgaaggccaccctttcaaggcctacttggagcttgagatcaccctttctcaggagcagattcagaagtacacggactgcctgcagttctacgtgaacagcacacttaaggaactgaggaggctcttccttgtccaggacctggtggattccttaaaatttgcagtcctgatgtggctcctgacctacgttggcgctctcttcaatggcctgaccctgctgctcatggctgtggtttcaatgtttactctacctgtagtgtatgttaagcaccaggcacagattgaccaatatctgggacttgtgaggactcacataaatgctgttgtggcaaagattcaggctaaaatcccaggcgctaagaggcatgctgagtaaactgatttcccaccggggactggacacaaacaggaatgtctggagtggtaacagctctcttcttactcattactgcaaattgattgtctttcccccctccctccagtaccataatcttagagacaaaccttaaaacagctgtttttaggctgttccttgtactcttaggatatttgagtcacttgtgtcaaccactaaagtatagagaaaagtgtattagatgtggtttttaattttgtgttgctaaaaaaagtgcatgatggtgagagcccaagttatctttccctcttcggtgttcttcttctcttctctgcaatgcttctgtagcttctaatgttccccgtggctaggcctttcctgccgagtgctctgatgcaatagtggaaatcgcttatatgtccttgggttgctggttggattaatctttaataacaatatatagaattgtagactgatgttttagcatttttccaacacacacaacgtaaaaataaaagcagtcgaccgcacttatggtaatcagttttgtataacttaaaataattaaataaatgaataaatccaaaacaaacatgcagtacttttgttgtatgggattggtgggctgatttacatgtatggttactaaaaagtaccagcatgttaactttattacaatttgtattactttctctgtagttcctaatggattcaattacggactctggatatttgcacttatgtacttgatactgaatgcataaataaatgttactaaatgtagaatgt

SEQ ID NO: 207779 - DNA, 2130 bp, Artificial Sequence
  derived and/or modified sequence
cgtgtgtgtgcctccgtggctctccttcgctctgtgggacgacagaaccatctgctgcagaatcccaggggaaaggcagcatctccgaggatgagctgatcaccgccatcaaagaagcaaagggattatcgtatgaaaccgccgagaacccacggccggtgggccagctggccgacaggcccgaggtcaaggccaggtccggaccgccaaccatccccagccccctggaccacgaggccagcagcgcggagtcgggggactcagagatcgagctggtgtccgaggaccccatggccgcggaggacgcgctgccctcaggctatgtgagctttggccacgtgggcggcccgccgccctcgcccgcctcgccatccatccagtacagcatcctgagggaggagcgcgaggccgagctggacagcgagctcatcatcgagtcgtgcgacgcctcctcggcctcggaggagagccccaagcgggagcaggactcacccccgatgaagcccagcgccctggatgccatccgggaggagactggcgtccgggccgaggagcgtgcgccaagccggcggggcctggccgagccgggttccttcctcgactacccctcaactgagccccagcctggccccgagctgccccctggagacggagccctggagcctgagacgcccatgttgccacggaagcctgaagaagactcgagttccaaccaaagtcctgcggccacaaagggccctgggcctctaggtcctggcgccccgcccccactgctgtttctcaataagcaaaaagctattgacctgttgtattggcgggacatcaagcagacgggcatcgtgtttgggagtttcctgctgctgctcttctccctgacccagttcagcgtggtgagcgtcgtggcctacctggccctggccgcactctcagccaccatcagtttccgcatctacaagtctgttttacaagcagtgcagaaaaccgacgaaggccaccctttcaaggcctacttggagcttgagatcaccctttctcaggagcagattcagaagtacacggactgcctgcagttctacgtgaacagcacacttaaggaactgaggaggctcttccttgtccaggacctggtggattccttaaaatttgcagtcctgatgtggctcctgacctacgttggcgctctcttcaatggcctgaccctgctgctcatggctgtggtttcaatgtttactctacctgtagtgtatgttaagcaccaggcacagattgaccaatatctgggacttgtgaggactcacataaatgctgttgtggcaaagattcaggctaaaatcccaggcgctaagaggcatgctgagtaaactgatttcccaccggggactggacacaaacaggaatgtctggagtggtaacagctctcttcttactcattactgcaaattgattgtctttcccccctccctccagtaccataatcttagagacaaaccttaaaacagctgtttttaggctgttccttgtactcttaggatatttgagtcacttgtgtcaaccactaaagtatagagaaaagtgtattagatgtggtttttaattttgtgttgctaaaaaaagtgcatgatggtgagagcccaagttatctttccctcttcggtgttcttcttctcttctctgcaatgcttctgtagcttctaatgttccccgtggctaggcctttcctgccgagtgctctgatgcaatagtggaaatcgcttatatgtccttgggttgctggttggattaatctttaataacaatatatagaattgtagactgatgttttagcatttttccaacacacacaacgtaaaaataaaagcagtcgaccgcacttatggtaatcagttttgtataacttaaaataattaaataaatgaataaatccaaaacaaacatgcagtacttttgttgtatgggattggtgggctgatttacatgtatggttactaaaaagtaccagcatgttaactttattacaatttgtattactttctctgtagttcctaatggattcaattacggactctggatatttgcacttatgtacttgatactgaatgcataaataaatgttactaaatgtagaatgtt

SEQ ID NO: 207780 - DNA, 2647 bp, Artificial Sequence
  derived and/or modified sequence
ctgagacaccgcagcttccctgagcgccgagtccctccggggacagcagcagggagcgcccgcgcagccaccgagcctctgcccagccaagccgccgtcgccgcgccggtcgcccgttgccatggaaactgcatccacaggtgtggcaggtgtttccagtgccatggaccacaccttctcaacaacatcaaaagatggggaaggatcgtgttacacatctctcatttctgacatctgctatccacctcaggaggattctacatattttactggaattcttcagaaggaaaatggccacgtcaccatttcagagagccctgaggagctgggtacacccggcccctccttaccagatgtgcctgggatagagtctcgtggcttatttagttctgattctggaatagagatgactcctgcagagtccacggaagtgaacaagatcttagcagaccctctggaccagatgaaagcagaggcctataaatacattgacataaccagacccgaggaggtgaagcaccaagaacaacatcaccccgagctggaagataaagacttggactttaagaataaagacactgacatctcaattaaacctgaaggagtccgtgaacctgacaaaccagctcctgtggagggaaaaatcatcaaggaccatttattggaagaatccacatttgctccatacatagatgatctctctgaagaacagcgcagggctcctcagatcaccacccctgtcaaaatcacactgacggaaatagaaccttctgttgaaaccactacccaagagaagacccctgagaagcaagatatatgtctaaagccaagtcctgacacagtccccactgtcactgtctcggagcctgaagacgacagcccaggatctatcacccctccatcttctggaacagaaccatctgctgcagaatcccaggggaaaggcagcatctccgaggatgagctgatcaccgccatcaaagaagcaaagggattatcgtatgaaaccgccgagaacccacggccggtgggccagctggccgacaggcccgaggtcaaggccaggtccggaccgccaaccatccccagccccctggaccacgaggccagcagcgcggagtcgggggactcagagatcgagctggtgtccgaggaccccatggccgcggaggacgcgctgccctcaggctatgtgagctttggccacgtgggcggcccgccgccctcgcccgcctcgccatccatccagtacagcatcctgagggaggagcgcgaggccgagctggacagcgagctcatcatcgagtcgtgcgacgcctcctcggcctcggaggagagccccaagcgggagcaggactcacccccgatgaagcccagcgccctggatgccatccgggaggagactggcgtccgggccgaggagcgtgcgccaagccggcggggcctggccgagccgggttccttcctcgactacccctcaactgagccccagcctggccccgagctgccccctggagacggagccctggagcctgagacgcccatgttgccacggaagcctgaagaagactcgagttccaaccaaagtcctgcggccacaaagggccctgggcctctaggtcctggcgccccgcccccactgctgtttctcaataagcaaaaagctattgacctgttgtattggcgggacatcaagcagacgggcatcgtgtttgggagtttcctgctgctgctcttctccctgacccagttcagcgtggtgagcgtcgtggcctacctggccctggccgcactctcagccaccatcagtttccgcatctacaagtctgttttacaagcagtgcagaaaaccgacgaaggccaccctttcaaggcctacttggagcttgagatcaccctttctcaggagcagattcagaagtacacggactgcctgcagttctacgtgaacagcacacttaaggaactgaggaggctcttccttgtccaggacctggtggattccttaaaatttgcagtcctgatgtggctcctgacctacgttggcgctctcttcaatggcctgaccctgctgctcatggctgtggtttcaatgtttactctacctgtagtgtatgttaagcaccaggcacagattgaccaatatctgggacttgtgaggactcacataaatgctgttgtggcaaagattcaggctaaaatcccaggcgctaagaggcatgctgagtaaactgatttcccaccggggactggacacaaacaggaatgtctggagtggtaacagctctcttcttactcattactgcaaattgattgtctttcccccctccctccagtaccataatcttagagacaaaccttaaaacagctgtttttaggctgttccttgtactcttaggatatttgagtcacttgtgtcaaccactaaagtatagagaaaagtgtattagatgtggtttttaattttgtgttgctaaaaaaagtgcatgatggtgagagcccaagttatctttccctcttcggtgttcttcttctcttctctgcaatgcttctgtagcttctaatgttccccgtggctaggcctttcctgccgagtgctctgatgcaatagtggaaatcgcttatatgtccttgggttgctggttgg

SEQ ID NO: 207781 - DNA, 2331 bp, Artificial Sequence
  derived and/or modified sequence
atggccgcccccggcgacccccaggacgagctgctgcccctggccggccccggcagccagtggctgagacacagaggcgagggcgagaacgaggccgtgacccccaagggcgccacccccgccccccaggccggcgagcccagccccggcctgggcgccagagccagagaggccgccagcagagaggccggcagcggccccgccagacagagccccgtggccatggagaccgccagcaccggcgtggccggcgtgagcagcgccatggaccacaccttcagcaccaccagcaaggacggcgagggcagctgctacaccagcctgatcagcgacatctgctaccccccccaggaggacagcacctacttcaccggcatcctgcagaaggagaacggccacgtgaccatcagcgagagccccgaggagctgggcacccccggccccagcctgcccgacgtgcccggcatcgagagcagaggcctgttcagcagcgacagcggcatcgagatgacccccgccgagagcaccgaggtgaacaagatcctggccgaccccctggaccagatgaaggccgaggcctacaagtacatcgacatcaccagacccgaggaggtgaagcaccaggagcagcaccaccccgagctggaggacaaggacctggacttcaagaacaaggacaccgacatcagcatcaagcccgagggcgtgagagagcccgacaagcccgcccccgtggagggcaagatcatcaaggaccacctgctggaggagagcaccttcgccccctacatcgacgacctgagcgaggagcagagaagagccccccagatcaccacccccgtgaagatcaccctgaccgagatcgagcccagcgtggagaccaccacccaggagaagacccccgagaagcaggacatctgcctgaagcccagccccgacaccgtgcccaccgtgaccgtgagcgagcccgaggacgacagccccggcagcatcaccccccccagcagcggcaccgagcccagcgccgccgagagccagggcaagggcagcatcagcgaggacgagctgatcaccgccatcaaggaggccaagggcctgagctacgagaccgccgagaaccccagacccgtgggccagctggccgacagacccgaggtgaaggccagaagcggcccccccaccatccccagccccctggaccacgaggccagcagcgccgagagcggcgacagcgagatcgagctggtgagcgaggaccccatggccgccgaggacgccctgcccagcggctacgtgagcttcggccacgtgggcggccccccccccagccccgccagccccagcatccagtacagcatcctgagagaggagagagaggccgagctggacagcgagctgatcatcgagagctgcgacgccagcagcgccagcgaggagagccccaagagagagcaggacagcccccccatgaagcccagcgccctggacgccatcagagaggagaccggcgtgagagccgaggagagagcccccagcagaagaggcctggccgagcccggcagcttcctggactaccccagcaccgagccccagcccggccccgagctgccccccggcgacggcgccctggagcccgagacccccatgctgcccagaaagcccgaggaggacagcagcagcaaccagagccccgccgccaccaagggccccggccccctgggccccggcgcccccccccccctgctgttcctgaacaagcagaaggccatcgacctgctgtactggagagacatcaagcagaccggcatcgtgttcggcagcttcctgctgctgctgttcagcctgacccagttcagcgtggtgagcgtggtggcctacctggccctggccgccctgagcgccaccatcagcttcagaatctacaagagcgtgctgcaggccgtgcagaagaccgacgagggccaccccttcaaggcctacctggagctggagatcaccctgagccaggagcagatccagaagtacaccgactgcctgcagttctacgtgaacagcaccctgaaggagctgagaagactgttcctggtgcaggacctggtggacagcctgaagttcgccgtgctgatgtggctgctgacctacgtgggcgccctgttcaacggcctgaccctgctgctgatggccgtggtgagcatgttcaccctgcccgtggtgtacgtgaagcaccaggcccagatcgaccagtacctgggcctggtgagaacccacatcaacgccgtggtggccaagatccaggccaagatccccggcgccaagagacacgccgagtag

SEQ ID NO: 207782 - DNA, 1071 bp, Artificial Sequence
  derived and/or modified sequence
atggccgccgaggacgccctgcccagcggctacgtgagcttcggccacgtgggcggccccccccccagccccgccagccccagcatccagtacagcatcctgagagaggagagagaggccgagctggacagcgagctgatcatcgagagctgcgacgccagcagcgccagcgaggagagccccaagagagagcaggacagcccccccatgaagcccagcgccctggacgccatcagagaggagaccggcgtgagagccgaggagagagcccccagcagaagaggcctggccgagcccggcagcttcctggactaccccagcaccgagccccagcccggccccgagctgccccccggcgacggcgccctggagcccgagacccccatgctgcccagaaagcccgaggaggacagcagcagcaaccagagccccgccgccaccaagggccccggccccctgggccccggcgcccccccccccctgctgttcctgaacaagcagaaggccatcgacctgctgtactggagagacatcaagcagaccggcatcgtgttcggcagcttcctgctgctgctgttcagcctgacccagttcagcgtggtgagcgtggtggcctacctggccctggccgccctgagcgccaccatcagcttcagaatctacaagagcgtgctgcaggccgtgcagaagaccgacgagggccaccccttcaaggcctacctggagctggagatcaccctgagccaggagcagatccagaagtacaccgactgcctgcagttctacgtgaacagcaccctgaaggagctgagaagactgttcctggtgcaggacctggtggacagcctgaagttcgccgtgctgatgtggctgctgacctacgtgggcgccctgttcaacggcctgaccctgctgctgatggccgtggtgagcatgttcaccctgcccgtggtgtacgtgaagcaccaggcccagatcgaccagtacctgggcctggtgagaacccacatcaacgccgtggtggccaagatccaggccaagatccccggcgccaagagacacgccgagtag

SEQ ID NO: 207783 - DNA, 2109 bp, Artificial Sequence
  derived and/or modified sequence
atggagaccgccagcaccggcgtggccggcgtgagcagcgccatggaccacaccttcagcaccaccagcaaggacggcgagggcagctgctacaccagcctgatcagcgacatctgctaccccccccaggaggacagcacctacttcaccggcatcctgcagaaggagaacggccacgtgaccatcagcgagagccccgaggagctgggcacccccggccccagcctgcccgacgtgcccggcatcgagagcagaggcctgttcagcagcgacagcggcatcgagatgacccccgccgagagcaccgaggtgaacaagatcctggccgaccccctggaccagatgaaggccgaggcctacaagtacatcgacatcaccagacccgaggaggtgaagcaccaggagcagcaccaccccgagctggaggacaaggacctggacttcaagaacaaggacaccgacatcagcatcaagcccgagggcgtgagagagcccgacaagcccgcccccgtggagggcaagatcatcaaggaccacctgctggaggagagcaccttcgccccctacatcgacgacctgagcgaggagcagagaagagccccccagatcaccacccccgtgaagatcaccctgaccgagatcgagcccagcgtggagaccaccacccaggagaagacccccgagaagcaggacatctgcctgaagcccagccccgacaccgtgcccaccgtgaccgtgagcgagcccgaggacgacagccccggcagcatcaccccccccagcagcggcaccgagcccagcgccgccgagagccagggcaagggcagcatcagcgaggacgagctgatcaccgccatcaaggaggccaagggcctgagctacgagaccgccgagaaccccagacccgtgggccagctggccgacagacccgaggtgaaggccagaagcggcccccccaccatccccagccccctggaccacgaggccagcagcgccgagagcggcgacagcgagatcgagctggtgagcgaggaccccatggccgccgaggacgccctgcccagcggctacgtgagcttcggccacgtgggcggccccccccccagccccgccagccccagcatccagtacagcatcctgagagaggagagagaggccgagctggacagcgagctgatcatcgagagctgcgacgccagcagcgccagcgaggagagccccaagagagagcaggacagcccccccatgaagcccagcgccctggacgccatcagagaggagaccggcgtgagagccgaggagagagcccccagcagaagaggcctggccgagcccggcagcttcctggactaccccagcaccgagccccagcccggccccgagctgccccccggcgacggcgccctggagcccgagacccccatgctgcccagaaagcccgaggaggacagcagcagcaaccagagccccgccgccaccaagggccccggccccctgggccccggcgcccccccccccctgctgttcctgaacaagcagaaggccatcgacctgctgtactggagagacatcaagcagaccggcatcgtgttcggcagcttcctgctgctgctgttcagcctgacccagttcagcgtggtgagcgtggtggcctacctggccctggccgccctgagcgccaccatcagcttcagaatctacaagagcgtgctgcaggccgtgcagaagaccgacgagggccaccccttcaaggcctacctggagctggagatcaccctgagccaggagcagatccagaagtacaccgactgcctgcagttctacgtgaacagcaccctgaaggagctgagaagactgttcctggtgcaggacctggtggacagcctgaagttcgccgtgctgatgtggctgctgacctacgtgggcgccctgttcaacggcctgaccctgctgctgatggccgtggtgagcatgttcaccctgcccgtggtgtacgtgaagcaccaggcccagatcgaccagtacctgggcctggtgagaacccacatcaacgccgtggtggccaagatccaggccaagatccccggcgccaagagacacgccgagtag

SEQ ID NO: 207784 - protein, 316 aa, Artificial Sequence
  derived and/or modified sequence
MSGDTCLCPASGAKPKLSGFKGGGLGNKYVQLNVGGSLYYTTVRALTRHDTMLKAMFSGRMEVLTDKEGWILIDRCGKHFGTILNYLRDDTITLPQNRQEIKELMAEAKYYLIQGLVNMCQSALQDKKDSYQPVCNIPIITSLKEEERLIESSTKPVVKLLYNRSNNKYSYTSNSDDHLLKNIELFDKLSLRFNGRVLFIKDVIGDEICCWSFYGQGRKLAEVCCTSIVYATEKKQTKVEFPEARIYEETLNVLLYETPRVPDNSLLEATSRSRSQASPSEDEETFELRDRVRRIHVKRYSTYDDRQLGHQSTHRD

SEQ ID NO: 207785 - protein, 212 aa, Artificial Sequence
  derived and/or modified sequence
MAEAKYYLIQGLVNMCQSALQDKKDSYQPVCNIPIITSLKEEERLIESSTKPVVKLLYNRSNNKYSYTSNSDDHLLKNIELFDKLSLRFNGRVLFIKDVIGDEICCWSFYGQGRKLAEVCCTSIVYATEKKQTKVEFPEARIYEETLNVLLYETPRVPDNSLLEATSRSRSQASPSEDEETFELRDRVRRIHVKRYSTYDDRQLGHQSTHRD

SEQ ID NO: 207786 - DNA, 951 bp, Artificial Sequence
  derived and/or modified sequence
atgagcggcgacacctgcctgtgccccgccagcggcgccaagcccaagctgagcggcttcaagggcggcggcctgggcaacaagtacgtgcagctgaacgtgggcggcagcctgtactacaccaccgtgagagccctgaccagacacgacaccatgctgaaggccatgttcagcggcagaatggaggtgctgaccgacaaggagggctggatcctgatcgacagatgcggcaagcacttcggcaccatcctgaactacctgagagacgacaccatcaccctgccccagaacagacaggagatcaaggagctgatggccgaggccaagtactacctgatccagggcctggtgaacatgtgccagagcgccctgcaggacaagaaggacagctaccagcccgtgtgcaacatccccatcatcaccagcctgaaggaggaggagagactgatcgagagcagcaccaagcccgtggtgaagctgctgtacaacagaagcaacaacaagtacagctacaccagcaacagcgacgaccacctgctgaagaacatcgagctgttcgacaagctgagcctgagattcaacggcagagtgctgttcatcaaggacgtgatcggcgacgagatctgctgctggagcttctacggccagggcagaaagctggccgaggtgtgctgcaccagcatcgtgtacgccaccgagaagaagcagaccaaggtggagttccccgaggccagaatctacgaggagaccctgaacgtgctgctgtacgagacccccagagtgcccgacaacagcctgctggaggccaccagcagaagcagaagccaggccagccccagcgaggacgaggagaccttcgagctgagagacagagtgagaagaatccacgtgaagagatacagcacctacgacgacagacagctgggccaccagagcacccacagagactag

SEQ ID NO: 207787 - DNA, 639 bp, Artificial Sequence
  derived and/or modified sequence
atggccgaggccaagtactacctgatccagggcctggtgaacatgtgccagagcgccctgcaggacaagaaggacagctaccagcccgtgtgcaacatccccatcatcaccagcctgaaggaggaggagagactgatcgagagcagcaccaagcccgtggtgaagctgctgtacaacagaagcaacaacaagtacagctacaccagcaacagcgacgaccacctgctgaagaacatcgagctgttcgacaagctgagcctgagattcaacggcagagtgctgttcatcaaggacgtgatcggcgacgagatctgctgctggagcttctacggccagggcagaaagctggccgaggtgtgctgcaccagcatcgtgtacgccaccgagaagaagcagaccaaggtggagttccccgaggccagaatctacgaggagaccctgaacgtgctgctgtacgagacccccagagtgcccgacaacagcctgctggaggccaccagcagaagcagaagccaggccagccccagcgaggacgaggagaccttcgagctgagagacagagtgagaagaatccacgtgaagagatacagcacctacgacgacagacagctgggccaccagagcacccacagagactag

SEQ ID NO: 207788 - DNA, 951 bp, Artificial Sequence
  derived and/or modified sequence
atgtccggagacacctgtctctgtcccgctagtggggcgaagcctaagctctcaggctttaagggcgggggactgggcaacaaatacgtgcagctcaatgtcggcggcagtctttactacaccaccgttagagcactaactcgacacgacaccatgctcaaagcaatgttcagtgggaggatggaggtgctcactgacaaagaggggtggattctgatcgacaggtgtggaaagcactttggtaccatcctgaattaccttcgtgacgacactattaccttaccgcagaatcgccaagagattaaagaacttatggccgaggccaagtattacctgatccagggcctggtaaacatgtgtcagtctgccctgcaggataagaaggattcctaccagcccgtttgtaatattcctattatcacctctctgaaggaggaggaacggttgatagagtcctctaccaaaccagtggtgaagctcttgtacaaccgaagtaacaataaatactcctataccagcaactctgacgaccatcttttgaagaacatagagctgtttgataaactgtcactccggttcaacgggcgtgttctgttcattaaggatgtgattggggacgaaatctgctgttggtccttttatgggcaaggacgcaagctggctgaagtttgttgcactagcattgtgtacgctacagagaaaaagcagacaaaagtggagttcccggaggctcgaatctacgaggaaactctgaacgttcttctttatgaaaccccaagggtccccgataacagtctgttagaggcaacttctcgatctagatctcaagcttctccttccgaggacgaagagacctttgaactgagggaccgggttcgcagaatccatgtcaagagatattcgacctatgacgacaggcagcttggccatcagagtacgcatagggattag

SEQ ID NO: 207789 - DNA, 639 bp, Artificial Sequence
  derived and/or modified sequence
atggctgaggccaagtattacctaatccaagggctggtaaacatgtgtcaatcggccctacaagacaaaaaggactcctatcagcctgtgtgcaatattcctattatcacgtcactcaaagaggaggagcgccttatcgaatctagcaccaagcctgtggtcaaactgctgtacaaccggtccaataacaaatactcctacacatccaactccgacgatcatctattgaaaaatatcgagctttttgataaactgagtttaagatttaatggccgagtactgtttatcaaggacgtcattggagacgagatttgttgttggagcttttatggacagggtcgcaagctcgccgaagtgtgctgtactagcattgtctacgccactgagaagaagcagaccaaggtcgaatttcctgaggcaaggatctacgaagagaccctgaatgtgctcctgtacgaaacacctcgagtccctgacaactccctgttggaggccacctctcgttcaagaagccaagctagcccgtccgaggacgaagagacatttgaactccgagaccgggtgcgcagaatccacgttaagagatatagcacctatgacgaccgacaactgggccaccaatccactcatcgggattag

SEQ ID NO: 207790 - DNA, 951 bp, Artificial Sequence
  derived and/or modified sequence
atgtctggggacacctgcctgtgcccagccagcggggccaagcccaagctgagcggcttcaagggcggcggcctgggcaacaagtatgtgcagctgaatgtgggcggcagcctgtactacaccaccgtgcgggccctgaccaggcatgacaccatgctgaaggccatgttcagcggccgcatggaggtgctgacagacaaggagggctggatcctgattgacagatgtgggaagcacttcggcaccatcctgaactacctgagagatgacaccatcaccctgccccagaaccggcaggagatcaaggagctgatggccgaggccaagtactacctgatccagggcctggtgaacatgtgccagagcgccctgcaggacaagaaggacagctaccagcctgtgtgcaacatccccatcatcaccagcctgaaggaggaggagcggctcatcgagagcagcaccaagcctgtggtgaagctgctgtacaacagaagcaacaacaagtacagctacaccagcaacagtgatgaccacctgctgaagaacatcgagctgtttgacaagctgagcctgcgcttcaacggccgggtgctcttcatcaaggatgtgattggagatgagatctgctgctggagcttctacggccagggcaggaagctggccgaggtgtgctgcaccagcatcgtgtatgccacagagaagaagcagaccaaggtggagttccctgaggcccgcatctatgaggagaccctgaatgtgctgctgtatgagaccccccgggtgcctgacaacagcctgctggaggccaccagccgcagccgcagccaggccagccccagtgaagatgaggagacctttgagctgcgggacagagtgcggcgcatccacgtgaagcgctacagcacctatgatgaccggcagctgggccaccagagcacccaccgggactag

SEQ ID NO: 207791 - DNA, 639 bp, Artificial Sequence
  derived and/or modified sequence
atggccgaggccaagtactacctgatccagggcctggtgaacatgtgccagagcgccctgcaggacaagaaggacagctaccagcctgtgtgcaacatccccatcatcaccagcctgaaggaggaggagcggctcatcgagagcagcaccaagcctgtggtgaagctgctgtacaacagaagcaacaacaagtacagctacaccagcaacagtgatgaccacctgctgaagaacatcgagctgtttgacaagctgagcctgcgcttcaacggccgggtgctcttcatcaaggatgtgattggagatgagatctgctgctggagcttctacggccagggcaggaagctggccgaggtgtgctgcaccagcatcgtgtatgccacagagaagaagcagaccaaggtggagttccctgaggcccgcatctatgaggagaccctgaatgtgctgctgtatgagaccccccgggtgcctgacaacagcctgctggaggccaccagccgcagccgcagccaggccagccccagtgaagatgaggagacctttgagctgcgggacagagtgcggcgcatccacgtgaagcgctacagcacctatgatgaccggcagctgggccaccagagcacccaccgggactag

SEQ ID NO: 207792 - DNA, 951 bp, Artificial Sequence
  derived and/or modified sequence
atgagcggcgacacctgcctgtgccccgccagcggcgccaagcccaagctaagcggtttcaaaggggggggtctgggcaacaaatatgtccagctgaatgtgggcggatcactgtactacacaactgtgagagctctgacgcgccacgacacaatgctaaaagcaatgtttagcgggagaatggaagtgctcaccgataaggaaggttggattctcatagaccggtgcggcaaacacttcgggacaattctgaattacttgcgggacgataccataactctccctcagaatcgacaggagattaaagaactgatggctgaggctaaatattacctgatacagggcctggtgaatatgtgccagagcgcgctgcaagacaagaaggactcgtaccagcccgtctgcaatattcctatcattactagtctgaaagaggaagagcggttaattgaaagctcaacaaaaccagtggtgaaattgttgtataaccggtcaaacaacaaatactcctacaccagcaatagcgatgaccatttactgaagaacatcgagcttttcgataagctgagtctacgttttaacggtcgggtgttgttcatcaaagacgtaatcggtgatgagatttgctgctggtccttttacggtcaaggaaggaaactggccgaagtgtgctgcaccagcatcgtatacgccacagagaaaaaacagaccaaagtcgagttccccgaagccaggatatacgaagagaccctgaacgttttgctctatgaaacaccacgggtcccggacaacagtttgctggaggccacaagtcgctcgcggtcgcaggcttctcccagcgaagacgaggagaccttcgagctgcgggacagggttaggaggatccacgttaagcgatactctacatatgacgataggcagctcgggcatcagtctacacatcgggactag

SEQ ID NO: 207793 - DNA, 639 bp, Artificial Sequence
  derived and/or modified sequence
atggccgaggccaagtactacctgatccagggcctggtgaacatgtgccagagtgcattgcaggacaaaaaggacagctaccagccagtctgcaatattcctattatcacctcacttaaagaagaagagcggctgatcgaatcttcaaccaagccagtggtcaagctgctctataataggagcaacaataagtattcttatactagcaattctgacgaccacttgctcaagaatattgaattgttcgataaactgtctttgcgcttcaacggccgggtcctgttcattaaagacgtgataggcgacgagatctgctgttggtcattctacgggcaaggcagaaaattggctgaagtgtgctgcaccagcatcgtgtatgccactgaaaagaaacagactaaggtcgaatttcccgaagccaggatttatgaggagacactcaacgtgcttctgtatgaaacccctagagtgcctgataacagtctgctggaggccacaagtcggtctcggagtcaagccagcccatcagaggacgaagagaccttcgagctccgggaccgcgtgcgaaggatccatgtcaagcgctacagcacatacgacgatagacaactaggacaccagagtacacatcgcgactag

SEQ ID NO: 207794 - DNA, 951 bp, Artificial Sequence
  derived and/or modified sequence
atgtcaggagatacgtgtttgtgtccagcatcaggagccaaaccaaagctcagcgggtttaagggcggaggattgggtaataagtatgtgcagctgaacgtcggtggcagcctgtattataccacagtgagggctttgacgagacacgacactatgctcaaggcgatgttttccgggaggatggaagtcctcaccgataaggagggttggatactgatcgaccgatgcggtaaacactttggaaccatcctcaactacttgcgcgacgacactatcactctgcctcagaaccggcaagagatcaaggagcttatggcagaagccaaatactatctgatccaggggctcgttaatatgtgtcagtccgctttacaggacaagaaggactcgtaccagccagtttgcaatattccgatcatcacctccctgaaggaagaggagcggctgattgaaagctctactaaacctgtcgtcaaacttttatataatagaagtaataacaaatactcatacacaagcaactccgatgatcacttattgaagaacatcgagctgtttgataaactgtcactgcggttcaacggccgtgtcctgttcatcaaagacgttattggcgacgagatatgttgttggtcgttctacggacaaggccgaaagctggctgaagtttgctgtacaagtatagtgtacgcaaccgagaagaagcagacaaaggtcgaattcccagaagcacggatctacgaggaaactctgaacgtgctcttgtacgagactccaagagtccctgacaactctctgctcgaggcgacctcccgttcacgcagtcaagcatcaccttccgaggatgaagagactttcgaacttcgcgatcgggtgcgtcggattcacgtgaagcgctacagtacctacgacgacagacaactgggccatcagtccacacacagagactag

SEQ ID NO: 207795 - DNA, 639 bp, Artificial Sequence
  derived and/or modified sequence
atggcagaggccaaatattacctgatacagggcctggtgaacatgtgccaaagcgccttgcaggacaaaaaagattcttatcagcctgtctgtaacattccaatcatcacgagccttaaggaagaggaacgactgattgagagttctaccaagccggtcgtgaagttgctctacaatcgatcaaacaataaatattcctatacgtcaaatagtgacgatcacttgctgaagaatatcgaacttttcgacaaactgagcttgaggttcaatggacgggttctattcatcaaggacgtcatcggcgacgaaatttgctgttggtccttttatggccagggcaggaagctcgcagaggtgtgctgtactagcatcgtatacgccaccgagaaaaaacagacgaaagtcgagttcccagaggctcgcatttacgaggagacattgaacgtgctgttatacgaaacgccccgagtcccagataattctctcctggaagctaccagccgctccaggtcccaggcttcccctagtgaagacgaggaaacatttgaattaagggatcgcgtccggcgtattcacgtcaagagatactctacatacgatgaccggcagcttggccaccagtccacccatcgcgactag

SEQ ID NO: 207796 - DNA, 3627 bp, Artificial Sequence
  derived and/or modified sequence
agccggctgggctgggcagcactccgggcggagtcgacgagcgcaggatgtgagctcacagcttgggactgctgaggggcaggcggctgcaggctaggggcggctcggagtccgctggccacccagctgagaggagaggcgcccccggggacgcactgagattatgaggctctggcctccactggccactcactcgtgaccctttccaccacggcggagccttccaagcctacctcctgccgtgtggtgatctacctgcagcgggagatgtcgggggacacctgcctgtgcccagcctcaggggccaagcccaagctcagtggcttcaagggaggagggttgggcaacaagtatgtccagctcaacgtgggcggctctctgtactacaccactgtgcgggccctgacccgccacgacaccatgctcaaggccatgttcagtgggcgcatggaggtgctgaccgacaaagaaggctggatcctcatagaccgttgtggaaagcactttggcaccattttgaattacctccgagatgacaccatcaccctccctcagaaccggcaagaaatcaaggaattgatggctgaagcaaagtattacctcatccaggggctggtgaatatgtgccagagtgccctgcaggacaagaaggactcctaccagcctgtgtgcaacatccccatcatcacatccctaaaggaggaggagcggctcatcgaatcctccaccaagcccgtggtgaagctgctgtacaacagaagcaacaacaagtattcctacaccagcaactctgacgaccacctgctgaaaaacatcgagctgtttgacaagctctccctgcgcttcaacggccgcgtgctcttcatcaaggatgtcattggtgacgagatctgctgctggtccttttatggccagggccgtaagctggcagaggtgtgctgtacctccatcgtgtatgccacggagaagaagcagaccaaggtggaattcccagaggcccgaatctatgaggagacactcaacgtcctactctatgagactccccgcgtccccgacaactccttgttggaggccacaagccgtagccgcagccaggcttcccccagtgaagatgaggagacctttgaactgcgggaccgtgtccgccgcatccacgtcaagcgctacagcacttacgatgaccggcagctcggccaccagtctacccatcgcgactgaccagaccctcagggagtcagggcacgggaggccctatctcccatcctgtggaacccgccccattggccaccccatgctgctgctgcctgggtctctgctctagcacccagaggcatgacaggccctgctcagaggtcagagggtctgggcagaggagggaccacattcccctgccttgcccctgagcacttctggagactgcgtcctgtcctatctgctcaccatcacccttcctgcccgacggagctgcttctgctccctggggcatatggactgacccacctcctgctgagaaccttcccctaggccctgtgcagaaggctactgccccttaggcctcagctgggggaaaggcagttctggtgctgtagaggccctggtgcagaaagtgggacgtcttttttcctaaggtgtttaagcacaggcttgataagtttggtttttaaaaaataatctaggaaatgaataattctaaatctagtaatgaggaaactgagcatttcttttgccctccagggtgccaagaccctacatatgacagaacccttggcccttctccatgcctgtgggatctgtttctttaaagcactttgtactgttattcaggaggttgataatctccttgacccatgtctttctaccctaatccccacttccctgcagaatcaatctgagggaggggataaagaggaagcaataaaaaaaaaacatccgacagagcagctctggctttgcagcctggccagcagctcagagtgcaccgaggagggaaggatggctaagctgggaccggcagtcctcacagggtgcctgtgagaaaggacattttacccccacatcatagtcacatcactgactcctaggtctagcacgactgctctttgtgattctcttgagtacccttggcttccagccatgctgtcctcacatacggtaaagccaaagagctgtcacatgggccagaaacatgagccacggcaggaagaccgtggagcccgtgggcactgcatggtgttggctggcatgcccatcagctgaggacagcaaactcccagcagcccctacagaggtggcacatgcttggccacacatctactccctgcccacaccatctatgctcttggttggtgctggctgggatggcggttctgcccagtggtgtctctgagcgcgggatgacaggagcaaccgaagcaccctgaaggccttcactccttgttgggtaactcagccatggagatgccaagcactagccaggaggtgagttcctctttagggctttggttttcattcctttttgtttggcttggccaaaccagaattcagcttatctgaattattttccaaaggaatgctgtcagggagggactgttctgccagcctaacaaagcaacgtagccacgtatagtacccactttctgctctttggagagaacacaggttatcaagttcatctctcttgactactcttatgatagctgatgccacagagcctatgggcaaatgccagacccagggttagacacaaggacctgaagtgacatgacggcgggacaggggaaatgtgactttctaattaggcattttatgttagtcacagtcttgaatgtataaacagcactaagactctcaggtcaggtaccttggtgatcagctactagttcttccagccctcattgaggtaacaagataaagacaaatccacttctttggccaaattcaggctttggctttatgactttcccacagagactggaatgcgtcagcctgagaccactggcctattttctcagctgccctcttgaggtcctttaacactcaaattcccagctccccactgaggtgttgtgatgcttgccttttgacctccccatcccctttagtccctgcttactactttgacattcacatcctcagtgtctcagtcttttttgccgagaaagcacagtagtctgggactgggcatttatcttctctgactgaaaatctctccttggtcttaaggaaaatactaacattgaactcactgacatgatcttagcttctttaatcagactttgtgacttaaaagtttgggggttttctttgaaagtttccagccctattcagaaagcaactcttggctgtgtgcatttttcaactccaagcagcccaggggtaagtaaacaaagtatggatgaaggtcagattttcttgtcagtttctgagaaacctggcagcctgctgttaacaacacaggccagtattgggttttattgaatttggtatgtgaccaaggtcggcctaaaggatggcgcaggtcctgggcaggaaagaatttttcctttatcacataactgtaatatttggttgctcagcataagtgatggaagcaaacactaatttctaataaaattgtgttaaactcaa

SEQ ID NO: 207797 - DNA, 1497 bp, Artificial Sequence
  derived and/or modified sequence
acagcttgggactgctgaggggcaggcggctgcaggctaggggcggctcggagtccgctggccacccagctgagaggagaggcgcccccggggacggctggatcctcatagaccgttgtggaaagcactttggcaccattttgaattacctccgagatgacaccatcaccctccctcagaaccggcaagaaatcaaggaattgatggctgaagcaaagtattacctcatccaggggctggtgaatatgtgccagagtgccctgcaggacaagaaggactcctaccagcctgtgtgcaacatccccatcatcacatccctaaaggaggaggagcggctcatcgaatcctccaccaagcccgtggtgaagctgctgtacaacagaagcaacaacaagtattcctacaccagcaactctgacgaccacctgctgaaaaacatcgagctgtttgacaagctctccctgcgcttcaacggccgcgtgctcttcatcaaggatgtcattggtgacgagatctgctgctggtccttttatggccagggccgtaagctggcagaggtgtgctgtacctccatcgtgtatgccacggagaagaagcagaccaaggtggaattcccagaggcccgaatctatgaggagacactcaacgtcctactctatgagactccccgcgtccccgacaactccttgttggaggccacaagccgtagccgcagccaggcttcccccagtgaagatgaggagacctttgaactgcgggaccgtgtccgccgcatccacgtcaagcgctacagcacttacgatgaccggcagctcggccaccagtctacccatcgcgactgaccagaccctcagggagtcagggcacgggaggccctatctcccatcctgtggaacccgccccattggccaccccatgctgctgctgcctgggtctctgctctagcacccagaggcatgacaggccctgctcagaggtcagagggtctgggcagaggagggaccacattcccctgccttgcccctgagcacttctggagactgcgtcctgtcctatctgctcaccatcacccttcctgcccgacggagctgcttctgctccctggggcatatggactgacccacctcctgctgagaaccttcccctaggccctgtgcagaaggctactgccccttaggcctcagctgggggaaaggcagttctggtgctgtagaggccctggtgcagaaagtgggacgtcttttttcctaaggtgtttaagcacaggcttgataagtttggtttttaaaaaataatctaggaaatgaataattctaaatctagtaatgaggaaactgagcatttcttttgccctccagggtgccaagaccctacatatgacagaacccttggcccttctccatgcctgtgggatctgtttctttaaagcactttgtactgttattcaggaggttgataatctccttgacccatgtctttctaccctaatccccactt

SEQ ID NO: 207798 - DNA, 1506 bp, Artificial Sequence
  derived and/or modified sequence
atggccgccgccagcgtgaccccccccggcagcctggagctgctgcagcccggcttcagcaagaccctgctgggcaccaagctggaggccaagtacctgtgcagcgcctgcagaaacgtgctgagaagacccttccaggcccagtgcggccacagatactgcagcttctgcctggccagcatcctgagcagcggcccccagaactgcgccgcctgcgtgcacgagggcatctacgaggagggcatcagcatcctggagagcagcagcgccttccccgacaacgccgccagaagagaggtggagagcctgcccgccgtgtgccccagcgacggctgcacctggaagggcaccctgaaggagtacgagagctgccacgagggcagatgccccctgatgctgaccgagtgccccgcctgcaagggcctggtgagactgggcgagaaggagagacacctggagcacgagtgccccgagagaagcctgagctgcagacactgcagagccccctgctgcggcgccgacgtgaaggcccaccacgaggtgtgccccaagttccccctgacctgcgacggctgcggcaagaagaagatccccagagagaagttccaggaccacgtgaagacctgcggcaagtgcagagtgccctgcagattccacgccatcggctgcctggagaccgtggagggcgagaagcagcaggagcacgaggtgcagtggctgagagagcacctggccatgctgctgagcagcgtgctggaggccaagcccctgctgggcgaccagagccacgccggcagcgagctgctgcagagatgcgagagcctggagaagaagaccgccaccttcgagaacatcgtgtgcgtgctgaacagagaggtggagagagtggccatgaccgccgaggcctgcagcagacagcacagactggaccaggacaagatcgaggccctgagcagcaaggtgcagcagctggagagaagcatcggcctgaaggacctggccatggccgacctggagcagaaggtgctggagatggaggccagcacctacgacggcgtgttcatctggaagatcagcgacttcgccagaaagagacaggaggccgtggccggcagaatccccgccatcttcagccccgccttctacaccagcagatacggctacaagatgtgcctgagaatctacctgaacggcgacggcaccggcagaggcacccacctgagcctgttcttcgtggtgatgaagggccccaacgacgccctgctgagatggcccttcaaccagaaggtgaccctgatgctgctggaccagaacaacagagagcacgtgatcgacgccttcagacccgacgtgaccagcagcagcttccagagacccgtgaacgacatgaacatcgccagcggctgccccctgttctgccccgtgagcaagatggaggccaagaacagctacgtgagagacgacgccatcttcatcaaggccatcgtggacctgaccggcctgtag

SEQ ID NO: 207799 - DNA, 1662 bp, Artificial Sequence
  derived and/or modified sequence
atggccgccgccagcgtgaccccccccggcagcctggagctgctgcagcccggcttcagcaagaccctgctgggcaccaagctggaggccaagtacctgtgcagcgcctgcagaaacgtgctgagaagacccttccaggcccagtgcggccacagatactgcagcttctgcctggccagcatcctgagcagcggcccccagaactgcgccgcctgcgtgcacgagggcatctacgaggagggcatcagcatcctggagagcagcagcgccttccccgacaacgccgccagaagagaggtggagagcctgcccgccgtgtgccccagcgacggctgcacctggaagggcaccctgaaggagtacgaggtgaagatgcccgcctgcggcatggtgaccgaggcccccgccgtgggcagcagacccagaagccccagcagctacgacctggtgctgcacgtgcccctgaccggcgccgaggcctgcctgatgagcgtggaggaggagaccgagctgctgctgagaagctgccacgagggcagatgccccctgatgctgaccgagtgccccgcctgcaagggcctggtgagactgggcgagaaggagagacacctggagcacgagtgccccgagagaagcctgagctgcagacactgcagagccccctgctgcggcgccgacgtgaaggcccaccacgaggtgtgccccaagttccccctgacctgcgacggctgcggcaagaagaagatccccagagagaagttccaggaccacgtgaagacctgcggcaagtgcagagtgccctgcagattccacgccatcggctgcctggagaccgtggagggcgagaagcagcaggagcacgaggtgcagtggctgagagagcacctggccatgctgctgagcagcgtgctggaggccaagcccctgctgggcgaccagagccacgccggcagcgagctgctgcagagatgcgagagcctggagaagaagaccgccaccttcgagaacatcgtgtgcgtgctgaacagagaggtggagagagtggccatgaccgccgaggcctgcagcagacagcacagactggaccaggacaagatcgaggccctgagcagcaaggtgcagcagctggagagaagcatcggcctgaaggacctggccatggccgacctggagcagaaggtgctggagatggaggccagcacctacgacggcgtgttcatctggaagatcagcgacttcgccagaaagagacaggaggccgtggccggcagaatccccgccatcttcagccccgccttctacaccagcagatacggctacaagatgtgcctgagaatctacctgaacggcgacggcaccggcagaggcacccacctgagcctgttcttcgtggtgatgaagggccccaacgacgccctgctgagatggcccttcaaccagaaggtgaccctgatgctgctggaccagaacaacagagagcacgtgatcgacgccttcagacccgacgtgaccagcagcagcttccagagacccgtgaacgacatgaacatcgccagcggctgccccctgttctgccccgtgagcaagatggaggccaagaacagctacgtgagagacgacgccatcttcatcaaggccatcgtggacctgaccggcctgtag

SEQ ID NO: 207800 - DNA, 1269 bp, Artificial Sequence
  derived and/or modified sequence
atggccgccgccagcgtgaccccccccggcagcctggagctgctgcagcccggcttcagcaagaccctgctgggcaccaagctggaggccaagtacctgtgcagcgcctgcagaaacgtgctgagaagacccttccaggcccagtgcggccacagatactgcagcttctgcctggccagcatcctgagcagcggcccccagaactgcgccgcctgcgtgcacgagggcatctacgaggagggcatcagcatcctggagagcagcagcgccttccccgacaacgccgccagaagagaggtggagagcctgcccgccgtgtgccccagcgacggctgcacctggaagggcaccctgaaggagtacgaggtgaagatgcccgcctgcggcatggtgaccgaggcccccgccgtgggcagcagacccagaagccccagcagctacgacctggtgctgcacgtgcccctgaccggcgccgaggcctgcctgatgagcgtggaggaggagaccgagctgctgctgagaagctgccacgagggcagatgccccctgatgctgaccgagtgccccgcctgcaagggcctggtgagactgggcgagaaggagagacacctggagcacgagtgccccgagagaagcctgagctgcagacactgcagagccccctgctgcggcgccgacgtgaagagactggaccaggacaagatcgaggccctgagcagcaaggtgcagcagctggagagaagcatcggcctgaaggacctggccatggccgacctggagcagaaggtgctggagatggaggccagcacctacgacggcgtgttcatctggaagatcagcgacttcgccagaaagagacaggaggccgtggccggcagaatccccgccatcttcagccccgccttctacaccagcagatacggctacaagatgtgcctgagaatctacctgaacggcgacggcaccggcagaggcacccacctgagcctgttcttcgtggtgatgaagggccccaacgacgccctgctgagatggcccttcaaccagaaggtgaccctgatgctgctggaccagaacaacagagagcacgtgatcgacgccttcagacccgacgtgaccagcagcagcttccagagacccgtgaacgacatgaacatcgccagcggctgccccctgttctgccccgtgagcaagatggaggccaagaacagctacgtgagagacgacgccatcttcatcaaggccatcgtggacctgaccggcctgtag

SEQ ID NO: 207801 - DNA, 366 bp, Artificial Sequence
  derived and/or modified sequence
atggccgccgccagcgtgaccccccccggcagcctggagctgctgcagcccggcttcagcaagaccctgctgggcaccaagctggaggccaagtacctgtgcagcgcctgcagaaacgtgctgagaagacccttccaggcccagtgcggccacagatactgcagcttctgcctggccagcatcctgagcagcggcccccagaactgcgccgcctgcgtgcacgagggcatctacgaggagggcatcagcatcctggagagcagcagcgccttccccgacaacgccgccagaagagaggtggagagcctgcccgccgtgtgccccagcgacggctgcacctggaagggcaccctgaaggagtactag

SEQ ID NO: 207802 - DNA, 519 bp, Artificial Sequence
  derived and/or modified sequence
atggccgccgccagcgtgaccccccccggcagcctggagctgctgcagcccggcttcagcaagaccctgctgggcaccaagctggaggccaagtacctgtgcagcgcctgcagaaacgtgctgagaagacccttccaggcccagtgcggccacagatactgcagcttctgcctggccagcatcctgagcagcggcccccagaactgcgccgcctgcgtgcacgagggcatctacgaggagggcatcagcatcctggagagcagcagcgccttccccgacaacgccgccagaagagaggtggagagcctgcccgccgtgtgccccagcgacggctgcacctggaagggcaccctgaaggagtacgagagctgccacgagggcagatgccccctgatgctgaccgagtgccccgcctgcaagggcctggtgagactgggcgagaaggagagacacctggagcacgagtgccccgagagaagcctgagctgcagacactgcagagccccctgctgcggctag

SEQ ID NO: 207803 - DNA, 582 bp, Artificial Sequence
  derived and/or modified sequence
atggccgccgccagcgtgaccccccccggcagcctggagctgctgcagcccggcttcagcaagaccctgctgggcaccaagctggaggccaagtacctgtgcagcgcctgcagaaacgtgctgagaagacccttccaggcccagtgcggccacagatactgcagcttctgcctggccagcatcctgagcagcggcccccagaactgcgccgcctgcgtgcacgagggcatctacgaggagggcatcagcatcctggagagcagcagcgccttccccgacaacgccgccagaagagaggtggagagcctgcccgccgtgtgccccagcgacggctgcacctggaagggcaccctgaaggagtacgagagctgccacgagggcagatgccccctgatgctgaccgagtgccccgcctgcaagggcctggtgagactgggcgagaaggagagacacctggagcacgagtgccccgagagaagcctgagctgcagacactgcagagccccctgctgcggcgccgacgtgaaggcccaccacgaggtgtgccccaagttccccctgacctgcgacggctgcggctag

SEQ ID NO: 207804 - DNA, 1506 bp, Artificial Sequence
  derived and/or modified sequence
atggcggctgctagcgttaccccgcccggatctctggagctcttacaacctggattctcgaaaacgcttctgggcaccaagttggaggccaagtatctgtgttcagcatgtcggaacgttctgaggagacccttccaggctcagtgcggtcaccggtattgctccttttgtctggccagtattctatccagtggcccccagaactgtgccgcctgtgtccacgaaggaatttatgaggagggaatctcgattctggagagcagctccgcgtttcccgacaacgcagctcgccgtgaggtggagtccttacctgctgtgtgcccaagtgacgggtgcacctggaagggcactttaaaagagtacgagtcctgtcatgagggcagatgtccattgatgctgaccgaatgtcctgcctgcaagggtttggtgagactcggggagaaggagagacatctagaacacgaatgtccggagagatccctttcgtgtaggcattgtagagcaccttgctgcggcgccgacgttaaagcgcaccacgaggtttgtccgaaatttcccttaacctgtgacgggtgtggcaagaaaaaaattccaagagaaaagtttcaagatcacgtcaagacttgcgggaaatgccgggtgccctgtagattccacgccatcggttgcctggaaaccgtcgaaggggagaaacagcaggaacatgaagtgcagtggctacgggagcatcttgcaatgttactctcctctgtgctcgaggccaagccgctgctgggagatcagtcccatgccggctcagagctgctgcagcgctgtgaatctttggagaagaaaaccgccacctttgaaaacattgtgtgtgtgctgaaccgtgaggtcgagagggtggcgatgactgcagaggcctgttcaaggcaacatcggcttgaccaggacaagatagaggccttgagctccaaggtgcagcagctggagcgcagcattggtttgaaggacttggccatggcagacctggaacagaaagtcctggagatggaggcctcaacatacgacggcgtgttcatctggaaaatttctgatttcgccagaaagagacaagaagccgtcgctgggcggatccctgccatttttagtcccgctttctacacatcccgatatgggtacaagatgtgcctccgcatctacctgaacggcgatggcactggcaggggcactcatttgtcactatttttcgtcgtgatgaaaggccctaatgatgctttactgagatggccgttcaaccaaaaagtgacacttatgctcctggaccagaacaatagggaacacgttatcgatgcctttaggcctgacgtgactagctcctcttttcagaggcccgttaatgatatgaacatagcgtcagggtgcccacttttttgtccagtgtccaaaatggaggccaaaaattcttacgtgcgcgacgatgccattttcatcaaggctattgtggatctgacggggctgtag

SEQ ID NO: 207805 - DNA, 1662 bp, Artificial Sequence
  derived and/or modified sequence
atggctgctgcatccgtcactccgcccggctctcttgagctgctccagcccggattctccaaaaccctgctgggtacaaaacttgaagccaaatatctttgctcagcatgtaggaacgtgttacgtcggccattccaggcgcagtgcggtcataggtattgttcgttttgtttggcctccatcctgtcgagcggccctcagaactgcgccgcctgcgtgcacgagggaatttacgaggaagggattagtattctggaaagttcgagtgccttccccgacaatgcagccaggcgggaagtggaaagccttccagcggtttgcccctccgacggttgcacttggaagggaacactcaaggagtatgaggtcaaaatgccagcatgcggtatggtcaccgaggccccagcagtggggtcacgacctcgctcaccttcgtcgtatgacttggttttgcacgtgcccctaaccggggccgaagcttgcctgatgtctgtggaagaggagactgaattactattgcggtcctgtcatgaggggcgatgtccactaatgctcactgagtgcccagcctgcaagggacttgtacgtctaggtgaaaaagaacgacacttagaacatgaatgccccgagcgctctctctcctgcagacattgccgtgctccctgctgtggagctgacgtgaaggcccatcacgaagtgtgccctaagtttccgctgacctgcgacgggtgcgggaagaagaagattcctcgggaaaagtttcaggatcacgtcaagacctgcggaaagtgccgtgtaccctgtaggttccacgctattggatgcttggagaccgttgagggcgagaagcagcaggagcatgaagtgcagtggcttcgggaacacttagcaatgttactgagctctgtgctcgaggcgaagccactccttggcgatcagagtcatgcgggttccgaattgctccagcggtgcgagagtctggagaagaaaactgcaacttttgagaatattgtctgcgtacttaatcgtgaggtggagcgcgttgcaatgaccgcagaggcttgctctcgccagcacagactcgatcaggacaagattgaggcgttgagctccaaagtgcagcagctggagagatctatcgggcttaaggatctggccatggccgaccttgaacaaaaggtcctggaaatggaagctagtacctacgacggcgtttttatttggaaaatcagcgattttgctcgcaaacgccaggaggccgttgcaggccgcatcccagccatcttttctcccgcgttttacacgagcaggtacggctataaaatgtgtctgaggatctatctaaatggagacggaactggtagaggaacacatctcagtctctttttcgtggtgatgaagggacctaatgacgcactgctgaggtggccgtttaaccagaaggtcactttaatgctgctggaccagaacaaccgcgagcacgtaatagatgcctttaggccggacgtcacctctagctcctttcagaggccagtgaacgatatgaacatcgcaagcggctgtccgttattttgtccagtcagcaaaatggaagcgaaaaattcctacgtgcgggacgacgccatctttattaaggccatcgtcgatctgaccggtctctag

SEQ ID NO: 207806 - DNA, 1269 bp, Artificial Sequence
  derived and/or modified sequence
atggcagctgcttctgtaactcccccagggtctcttgagctgctgcaacccggattctccaagaccctgttgggcacaaagctggaagcaaaatacctgtgttctgcttgccgaaatgttcttcggcgacccttccaggcccagtgtggccatcgttactgtagcttttgtctcgcctccatactttcctccggccctcaaaattgcgccgcatgtgtgcatgagggaatatatgaggagggcatttcgatcctggagtcatcaagcgctttccccgataacgcagcaaggagagaggtcgagagcttacctgccgtgtgtccctccgatggctgcacgtggaaaggaactctgaaggaatacgaggttaaaatgcccgcatgcggtatggtcacagaagcacctgccgtggggagcaggcctcgctccccctcttcttacgatctcgtgttacatgtgcctctcaccggggctgaagcctgtctgatgagcgttgaggaagagaccgagctgctattacggtcctgccatgaggggcggtgtccactgatgttaaccgaatgtcccgcctgcaaaggacttgtcaggctgggtgaaaaagaaaggcacctggaacacgaatgtccagaacgatcactgagttgcaggcattgcagagctccctgttgtggagccgacgttaaaaggttggaccaagacaaaattgaagctctgtccagcaaggtgcagcagttggagcgctcgatcggactcaaagacctggccatggcagatttggaacagaaggtgttagagatggaagcgagcacatacgatggagtcttcatctggaagatcagtgacttcgctaggaagagacaggaagcagtggctggacggattcctgccattttttcccccgccttttacacaagtagatatggctacaaaatgtgcctcagaatttatctgaatggggatggaacaggccggggcactcacctgagtcttttctttgtggtcatgaaggggcctaatgacgcacttttgcgctggccatttaatcagaaggtgactttgatgttgctcgatcaaaataatagggaacatgtgatagacgcgtttaggcccgatgtgaccagcagcagctttcagagacccgtcaatgacatgaatatcgcgtccggttgtccgcttttctgtcctgtgagtaagatggaagcaaaaaatagttacgtccgagatgacgccatcttcataaaagcgatcgtggatctgacaggcttatag

SEQ ID NO: 207807 - DNA, 366 bp, Artificial Sequence
  derived and/or modified sequence
atggccgccgcgtccgtcacccctccaggttcactggaactgcttcagcccgggttctccaagaccttactgggcacaaagcttgaagccaagtacctctgttcagcttgtcgcaatgttctacgccgccccttccaggcccagtgcgggcacaggtactgctcgttctgcctggcatctatcctcagctccggaccacagaattgcgccgcgtgcgtgcatgaggggatttacgaggaaggtataagtatcctggagagctctagcgcgtttcctgataatgctgcgcgccgcgaagtggaatcattacctgctgtgtgcccaagtgatggatgcacctggaaggggacactcaaggagtactag

SEQ ID NO: 207808 - DNA, 519 bp, Artificial Sequence
  derived and/or modified sequence
atggcggccgcatctgttacacccccaggcagcctggagctgctgcaacccggatttagtaaaaccctcctaggaacaaaactcgaagctaagtatctatgcagcgcttgtcggaatgtgctacgacggcccttccaggcacagtgcggccaccgatattgttcattttgcctggcctcaatcctgtcgagtggcccacagaattgcgccgcctgtgttcacgaagggatttatgaggaggggatatctattctcgagtcctccagcgcctttcccgataatgctgccaggagagaggtggagtcccttccggccgtgtgtccttccgacggctgcacttggaaggggaccctaaaggaatacgaaagctgtcatgagggcaggtgcccactgatgctaactgaatgtcctgcctgcaagggtctggttcgtcttggtgaaaaggagcgccatctggaacacgagtgtcctgagcgcagcttaagctgtaggcattgtcgtgcaccttgttgcgggtag

SEQ ID NO: 207809 - DNA, 582 bp, Artificial Sequence
  derived and/or modified sequence
atggcggctgccagcgtaaccccaccaggatcccttgaattgctacagccaggattcagcaagacactgctggggaccaaacttgaggccaagtatctgtgctcggcttgtcgtaatgtgctccggagacccttccaggcccagtgcggtcaccgttactgctccttttgcttggccagcatcttaagtagcggccctcagaactgcgcggcctgcgtccatgaggggatatacgaagaaggaatcagcattttagagtcttcgtccgcttttccagataatgcagcccgtcgcgaggtggagagcctgcccgccgtgtgtccatcggacgggtgtacttggaaagggacacttaaagagtacgagtcctgtcacgaagggcgctgcccactgatgctgaccgaatgcccagcttgcaaaggactcgtgcggctgggtgagaaagagaggcacctggaacatgaatgccccgagagatctctgagttgcaggcactgccgggccccctgttgcggagctgacgttaaagcccatcacgaagtgtgtcccaaatttcccctcacctgtgacggctgcggttag

SEQ ID NO: 207810 - DNA, 1506 bp, Artificial Sequence
  derived and/or modified sequence
atggcggccgcctctgtgaccccaccagggtccttggaactgttgcaacccggcttcagcaagacattgcttggaactaaattagaagcaaaatacctgtgtagcgcatgtcggaatgtgctgagaaggcccttccaagcacagtgcgggcatagatactgctcattctgtctcgcctcaattcttagctcaggtccccagaactgcgccgcatgtgtgcacgagggcatttatgaggaaggtatctccattctggagagctccagcgcattccctgacaacgctgcacggagagaggtggagagcctgcctgccgtgtgtccatcggacggttgcacgtggaagggcactcttaaggaatatgaatcttgccatgagggaaggtgtccccttatgctgacagaatgtccagcttgtaaaggccttgtgcgcctgggcgaaaaggagcggcacctggaacacgaatgtccggagcgaagcctatcttgtaggcactgccgtgcgccctgctgcggggctgatgtgaaagctcatcatgaagtgtgccccaagtttcctcttacttgcgacgggtgtggcaaaaaaaagatcccaagggaaaagttccaggaccacgtgaaaacatgtggtaagtgcagggtaccttgtcggtttcatgcaattggatgtctggagaccgttgagggggagaagcagcaggagcacgaagtgcagtggctgcgggagcacttagccatgctactctcatctgtcctggaagccaaacccctacttggcgatcaatcgcatgccggcagcgagctgctacagcggtgtgagtccttagagaagaaaacagccactttcgaaaacatcgtgtgtgtgctcaatagagaagtggagagagtagccatgacggccgaagcttgtagccggcagcaccgcttagatcaagacaaaattgaggccctgtcaagtaaggtgcagcaactggaacgtagtatcgggctaaaggacctggcaatggccgacctggagcagaaggtgttggagatggaggcatccacctacgatggagtctttatctggaagataagcgatttcgcgcgcaaaaggcaggaggcagttgctggtagaattcctgctattttcagtccggccttttatacctcccgatacggctataaaatgtgcctgcggatttatcttaacggcgatggtacgggcaggggaactcatctgtccctattcttcgtcgttatgaaagggcctaacgacgccctgctcaggtggcccttcaatcagaaagtgactctgatgctgctggaccagaacaatagagagcacgtcatcgatgcttttcgtccagacgtgacatcctctagttttcagcgaccggtgaatgacatgaatatcgcatctggctgtcctctcttttgtcccgtgagcaaaatggaggccaagaactcctatgtcagagacgacgccatttttatcaaggcgatcgttgaccttactggactgtag

SEQ ID NO: 207811 - DNA, 1506 bp, Artificial Sequence
  derived and/or modified sequence
atggctgctgcctctgtgaccccacctggcagcctggagctgctgcagcccggcttcagcaagaccctgctgggcaccaagctggaggccaagtacctgtgcagcgcctgcagaaatgtgctgcggcggcccttccaggcccagtgtggccaccgctactgcagcttctgcctggccagcatcctgagcagcggcccccagaactgtgccgcctgtgtgcatgagggcatctatgaggagggcatcagcatcctggagagcagcagcgccttcccagacaatgctgcccggcgggaggtggagagcctgcctgctgtgtgccccagtgatggctgcacctggaagggcaccctgaaggagtatgagagctgccacgagggccgctgccccctgatgctgacagaatgtcctgcctgcaagggcctggtgcggctgggggagaaggagcggcacctggagcatgaatgtcctgagaggagcctgagctgccgccactgccgggccccctgctgcggggctgatgtgaaggcccaccacgaggtgtgccccaagttccccctgacctgtgatggctgtgggaagaagaagatcccccgggagaagttccaggaccacgtgaagacctgtgggaaatgtcgggtgccctgccgcttccacgccatcggctgcctggagaccgtggagggggagaagcagcaggagcacgaggtgcagtggctgcgggagcacctggccatgctgctgagctctgtgctggaggccaagcccctgctgggggaccagagccacgccggcagcgagctgctgcagagatgtgagagcctggagaagaagacagccacctttgaaaatattgtgtgtgtgctgaaccgggaggtggagcgggtggccatgacagctgaggcctgcagccggcagcaccggctggaccaggacaagattgaggccctgagcagcaaggtgcagcagctggagaggagcatcggcctgaaggacctggccatggctgacctggagcagaaggtgctggagatggaggccagcacctatgatggagtcttcatctggaagatcagtgactttgccaggaagaggcaggaggccgtggccggccgcatcccagccatcttctccccagccttctacaccagccgctatggctacaagatgtgcctgcgcatctacctgaatggagatggcaccggccggggcacccacctgagcctcttctttgtggtgatgaagggccccaatgatgccctgctgcgctggcccttcaaccagaaggtgaccctgatgctgctggaccagaacaaccgggagcacgtgattgatgccttccggccagatgtgaccagcagcagcttccagaggcctgtgaatgacatgaacatcgccagcggctgccccctcttctgccctgtgtccaagatggaggccaagaacagctatgtgagagatgatgccatcttcatcaaggccatcgtggacctgaccggcctgtag

SEQ ID NO: 207812 - DNA, 1662 bp, Artificial Sequence
  derived and/or modified sequence
atggctgctgcctctgtgaccccacctggcagcctggagctgctgcagcccggcttcagcaagaccctgctgggcaccaagctggaggccaagtacctgtgcagcgcctgcagaaatgtgctgcggcggcccttccaggcccagtgtggccaccgctactgcagcttctgcctggccagcatcctgagcagcggcccccagaactgtgccgcctgtgtgcatgagggcatctatgaggagggcatcagcatcctggagagcagcagcgccttcccagacaatgctgcccggcgggaggtggagagcctgcctgctgtgtgccccagtgatggctgcacctggaagggcaccctgaaggagtatgaggtgaagatgcctgcctgtggcatggtgacagaggccccagctgtgggcagccggcccaggagccccagcagctatgacctggtgctgcacgtgcccctgaccggggctgaggcctgcctgatgtctgtggaggaggagacagagctgctgctgcggagctgccacgagggccgctgccccctgatgctgacagaatgtcctgcctgcaagggcctggtgcggctgggggagaaggagcggcacctggagcatgaatgtcctgagaggagcctgagctgccgccactgccgggccccctgctgcggggctgatgtgaaggcccaccacgaggtgtgccccaagttccccctgacctgtgatggctgtgggaagaagaagatcccccgggagaagttccaggaccacgtgaagacctgtgggaaatgtcgggtgccctgccgcttccacgccatcggctgcctggagaccgtggagggggagaagcagcaggagcacgaggtgcagtggctgcgggagcacctggccatgctgctgagctctgtgctggaggccaagcccctgctgggggaccagagccacgccggcagcgagctgctgcagagatgtgagagcctggagaagaagacagccacctttgaaaatattgtgtgtgtgctgaaccgggaggtggagcgggtggccatgacagctgaggcctgcagccggcagcaccggctggaccaggacaagattgaggccctgagcagcaaggtgcagcagctggagaggagcatcggcctgaaggacctggccatggctgacctggagcagaaggtgctggagatggaggccagcacctatgatggagtcttcatctggaagatcagtgactttgccaggaagaggcaggaggccgtggccggccgcatcccagccatcttctccccagccttctacaccagccgctatggctacaagatgtgcctgcgcatctacctgaatggagatggcaccggccggggcacccacctgagcctcttctttgtggtgatgaagggccccaatgatgccctgctgcgctggcccttcaaccagaaggtgaccctgatgctgctggaccagaacaaccgggagcacgtgattgatgccttccggccagatgtgaccagcagcagcttccagaggcctgtgaatgacatgaacatcgccagcggctgccccctcttctgccctgtgtccaagatggaggccaagaacagctatgtgagagatgatgccatcttcatcaaggccatcgtggacctgaccggcctgtag

SEQ ID NO: 207813 - DNA, 1269 bp, Artificial Sequence
  derived and/or modified sequence
atggctgctgcctctgtgaccccacctggcagcctggagctgctgcagcccggcttcagcaagaccctgctgggcaccaagctggaggccaagtacctgtgcagcgcctgcagaaatgtgctgcggcggcccttccaggcccagtgtggccaccgctactgcagcttctgcctggccagcatcctgagcagcggcccccagaactgtgccgcctgtgtgcatgagggcatctatgaggagggcatcagcatcctggagagcagcagcgccttcccagacaatgctgcccggcgggaggtggagagcctgcctgctgtgtgccccagtgatggctgcacctggaagggcaccctgaaggagtatgaggtgaagatgcctgcctgtggcatggtgacagaggccccagctgtgggcagccggcccaggagccccagcagctatgacctggtgctgcacgtgcccctgaccggggctgaggcctgcctgatgtctgtggaggaggagacagagctgctgctgcggagctgccacgagggccgctgccccctgatgctgacagaatgtcctgcctgcaagggcctggtgcggctgggggagaaggagcggcacctggagcatgaatgtcctgagaggagcctgagctgccgccactgccgggccccctgctgcggggctgatgtgaagaggctggaccaggacaagattgaggccctgagcagcaaggtgcagcagctggagaggagcatcggcctgaaggacctggccatggctgacctggagcagaaggtgctggagatggaggccagcacctatgatggagtcttcatctggaagatcagtgactttgccaggaagaggcaggaggccgtggccggccgcatcccagccatcttcagccctgccttctacaccagccgctatggctacaagatgtgcctgcgcatctacctgaatggagatggcaccggccggggcacccacctgagcctcttctttgtggtgatgaagggccccaatgatgccctgctgcgctggcccttcaaccagaaggtgaccctgatgctgctggaccagaacaaccgggagcacgtgattgatgccttccggccagatgtgaccagcagcagcttccagaggcctgtgaatgacatgaacatcgccagcggctgccccctcttctgccctgtgtccaagatggaggccaagaacagctatgtgagagatgatgccatcttcatcaaggccatcgtggacctgaccggcctgtag

SEQ ID NO: 207814 - DNA, 366 bp, Artificial Sequence
  derived and/or modified sequence
atggctgctgcctctgtgaccccacctggcagcctggagctgctgcagcccggcttcagcaagaccctgctgggcaccaagctggaggccaagtacctgtgcagcgcctgcagaaatgtgctgcggcggcccttccaggcccagtgtggccaccgctactgcagcttctgcctggccagcatcctgagcagcggcccccagaactgtgccgcctgtgtgcatgagggcatctatgaggagggcatcagcatcctggagagcagcagcgccttcccagacaatgctgcccggcgggaggtggagagcctgcctgctgtgtgccccagtgatggctgcacctggaagggcaccctgaaggagtactag

SEQ ID NO: 207815 - DNA, 519 bp, Artificial Sequence
  derived and/or modified sequence
atggctgctgcctctgtgaccccacctggcagcctggagctgctgcagcccggcttcagcaagaccctgctgggcaccaagctggaggccaagtacctgtgcagcgcctgcagaaatgtgctgcggcggcccttccaggcccagtgtggccaccgctactgcagcttctgcctggccagcatcctgagcagcggcccccagaactgtgccgcctgtgtgcatgagggcatctatgaggagggcatcagcatcctggagagcagcagcgccttcccagacaatgctgcccggcgggaggtggagagcctgcctgctgtgtgccccagtgatggctgcacctggaagggcaccctgaaggagtatgagagctgccacgagggccgctgccccctgatgctgacagaatgtcctgcctgcaagggcctggtgcggctgggggagaaggagcggcacctggagcatgaatgtcctgagaggagcctgagctgccgccactgccgggccccctgctgcggctag

SEQ ID NO: 207816 - DNA, 582 bp, Artificial Sequence
  derived and/or modified sequence
atggctgctgcctctgtgaccccacctggcagcctggagctgctgcagcccggcttcagcaagaccctgctgggcaccaagctggaggccaagtacctgtgcagcgcctgcagaaatgtgctgcggcggcccttccaggcccagtgtggccaccgctactgcagcttctgcctggccagcatcctgagcagcggcccccagaactgtgccgcctgtgtgcatgagggcatctatgaggagggcatcagcatcctggagagcagcagcgccttcccagacaatgctgcccggcgggaggtggagagcctgcctgctgtgtgccccagtgatggctgcacctggaagggcaccctgaaggagtatgagagctgccacgagggccgctgccccctgatgctgacagaatgtcctgcctgcaagggcctggtgcggctgggggagaaggagcggcacctggagcatgaatgtcctgagaggagcctgagctgccgccactgccgggccccctgctgcggggctgatgtgaaggcccaccacgaggtgtgccccaagttccccctgacctgtgatggctgcggctag

SEQ ID NO: 207817 - DNA, 1506 bp, Artificial Sequence
  derived and/or modified sequence
atggccgccgccagcgtgaccccccccggcagcctggagctgctgcagcctggctttagcaaaaccctcctaggaacaaaactcgaggccaaatatctgtgttccgcgtgccgcaacgtgttgagacgcccttttcaggctcaatgtggccatagatattgttccttctgtcttgccagtatcctgtcctctggccctcaaaactgtgccgcttgtgttcacgaagggatctatgaagaagggatcagcatcctggagagcagttctgctttcccagataacgcagcccgaagggaggtggagtccctccccgccgtgtgtcccagcgacgggtgcacatggaagggcactctgaaggagtatgaaagctgccatgagggacgctgccccctgatgctcactgagtgtccagcttgtaaggggctagtccggttgggagagaaggaacgacatttggagcacgagtgcccagagcggtcgttgtcctgcagacactgccgagccccatgctgcggggccgacgtcaaggcccatcacgaggtttgccccaagtttccgttgacctgcgatggctgtggtaaaaaaaagatcccgcgggagaaattccaagaccacgtcaagacctgcggcaagtgtcgggtgccttgtaggtttcatgctatcggatgtcttgagacagtggaaggtgagaaacagcaagaacacgaggtgcagtggttgcgtgaacatctggcgatgctgctcagttctgtgctggaagccaaacctcttctgggcgaccagagccacgccggcagcgaacttctccagaggtgtgagagtctggaaaagaagacagctacgttcgaaaatattgtctgcgtcctaaaccgtgaggtcgaaagagttgcaatgactgctgaggcatgcagtagacagcatcgcctggaccaggataaaatcgaggccctctccagtaaggtgcagcaactcgaaagaagcatcggtctcaaagacctggccatggccgacctggaacagaaagtattggagatggaagccagcacctacgatggggtgttcatatggaagatttctgactttgcccgtaagcgtcaagaggccgtagcaggacgaattcctgccatcttctccccagcgttctacacatccaggtatggctacaaaatgtgtttgaggatttatctgaacggcgacggaacaggccggggtacccacctctctctgttcttcgtggtgatgaaaggtcctaacgacgcccttttacggtggcctttcaatcagaaagtgacattgatgctgctggaccagaataatcgcgaacacgtaattgacgcgtttagacccgacgttacttccagctcctttcagagacccgtaaacgatatgaacatcgcatctggctgccctcttttctgccctgtcagcaagatggaggccaaaaacagctacgtacgggacgacgcaatcttcatcaaagctattgtggacctgacaggcctctag

SEQ ID NO: 207818 - DNA, 1662 bp, Artificial Sequence
  derived and/or modified sequence
atggccgccgccagcgtgaccccccccggcagcctggagctgctgcaacctggattctcaaagacacttctgggcaccaagctcgaggccaagtacttgtgctctgcttgccgaaacgtcctgcggcgaccgtttcaggcccaatgcgggcaccgctactgcagcttctgcctcgcatcgatcctgtctagcggacctcagaactgcgctgcttgcgtacacgaggggatctacgaagaggggatttctattctggagtcctcttctgcctttccagataacgcagctagaagggaggttgaaagcttgccagcagtttgccccagtgatgggtgcacctggaagggcactctgaaagaatatgaagtgaagatgcctgcttgtggaatggtcaccgaagcccctgcggtcgggtctcggccccgctcgcctagctcctacgatctggttctgcatgtgccgcttacgggcgccgaggcctgcctgatgtccgtggaggaagaaaccgagctgctgttacgctcctgccatgaaggcagatgccccctaatgctcactgagtgtccggcctgtaagggtttagtaaggctaggagagaaggaacgacatcttgaacatgaatgccctgaacgatcacttagttgtcgacattgccgggcaccctgctgtggcgcagacgttaaagcgcaccacgaggtttgtcccaagttccctctgacttgtgatggctgcggaaagaaaaagattcctcgagagaagtttcaagatcacgtgaagacctgcggcaagtgccgcgtcccttgcagattccacgctatcggatgtctggaaaccgtggaaggggaaaaacagcaggaacacgaggtgcagtggctacgggaacacctcgccatgttactgagctccgtgctggaagctaagcccctcttgggcgatcagtctcatgccggcagtgagctgttacagcgctgcgagtcattggagaaaaagaccgcaactttcgagaatattgtttgtgtgctcaacagggaggtcgaaagagtggcgatgaccgcggaggcatgttccagacagcacagactggatcaggacaaaatcgaggcactgtcttctaaggtccagcagctggaacgatcaataggactgaaagatttggcaatggcggatctcgagcagaaagtgctggagatggaagccagcacgtacgacggcgttttcatttggaagattagtgattttgcccggaagaggcaggaagccgtggcaggccgcattcccgcaattttttcacccgccttctatacgagcagatacgggtacaaaatgtgcttaagaatttacctcaacggcgacggtacggggagagggacccatttgagtttgttttttgtggtgatgaaaggccccaacgacgctctattgagatggccttttaatcagaaggtgacgctgatgctcctcgaccagaacaaccgggaacatgtaatcgacgcttttcggccggacgtgacgtctagcagttttcaacgaccggttaatgatatgaacatcgccagcggatgcccgctattttgccccgtgtccaaaatggaggcgaaaaattcctacgtccgcgacgacgcgatttttatcaaggccattgttgacctgactgggctgtag

SEQ ID NO: 207819 - DNA, 1269 bp, Artificial Sequence
  derived and/or modified sequence
atggccgccgccagcgtgaccccccccggcagcctggagctgctgcagccaggcttctctaagactctgctcgggactaagttggaggcaaaatacctgtgtagcgcttgccgcaatgtcctgaggcgacctttccaggctcaatgtgggcacagatactgtagcttctgcctcgcaagtatcctttcttcgggacctcagaactgcgcagcctgtgtccacgagggaatttacgaggagggaatttccattttagaatcttccagcgcctttcccgataacgctgcccgtcgcgaagttgaatccctcccagcggtatgtcccagcgatggttgcacatggaagggaaccctgaaagaatatgaggtcaagatgccagcttgtgggatggtcactgaagccccagccgtgggctcaaggccacggagcccctcctcatatgatctggttctacatgtgcctctgacgggtgcagaggcttgtctgatgtcggtggaagaggagaccgagcttctgctcagaagttgccatgaaggacggtgtccccttatgcttacagaatgtcctgcctgcaagggcctcgtccgcctgggggaaaaagaacgtcacttggagcatgaatgtcctgaaagatcactctcttgtaggcactgcagggcgccatgttgcggcgcggatgtcaagcgtttggaccaggacaaaattgaggcactctcttccaaggtgcagcagctggagaggtctattggactgaaagatttggcgatggccgatctggaacaaaaggtacttgagatggaggcctcaacctatgatggagttttcatctggaaaatatcagatttcgcacgcaaacgccaggaagccgttgcaggacgaattcctgccatcttctctcctgctttctatacctctcgctacgggtataaaatgtgcttgcgcatctacctaaatggcgacggaactggcaggggaactcacttgagcctgttttttgttgtgatgaagggaccaaacgacgccttgctgcgttggcctttcaatcagaaagttaccctcatgttactcgaccaaaacaaccgggaacacgtgattgatgcgttccggccggatgttacttcttcatcatttcagagacccgtaaacgatatgaatatcgcttctggatgccccctattctgccccgtctccaagatggaagcaaaaaacagttacgtgagagatgacgcaatttttataaaggccatcgtggatctcactggtctgtag

SEQ ID NO: 207820 - DNA, 366 bp, Artificial Sequence
  derived and/or modified sequence
atggccgccgccagcgtgaccccccccggcagcctggagctgctgcaaccgggtttcagcaagacactcttgggtaccaagctagaggccaagtatttgtgctctgcatgcagaaatgtcttgaggagaccttttcaagcccagtgcggacaccgttactgctccttctgtctggcctccattctctcctctggcccacagaactgcgcggcctgtgtgcacgaaggtatttacgaagaaggcatttccattttggagagttcttcagcgtttcctgacaacgccgccaggagggaagttgaatcgttaccagcagtatgcccctctgatgggtgtacctggaaaggcactctcaaagagtattag

SEQ ID NO: 207821 - DNA, 519 bp, Artificial Sequence
  derived and/or modified sequence
atggccgccgccagcgtgaccccccccggcagcctggagctgctgcaacctggattcagtaaaaccctgcttgggacaaagttagaagctaagtacctgtgctcggcttgtcggaacgtgttgcggagaccatttcaggctcaatgcgggcaccgttactgttccttctgcctcgccagcatcctaagttccggcccacagaactgtgcagcatgtgtgcacgaggggatttacgaagagggtatcagtattctcgagtcaagctccgcttttccagataatgcagcccggcgagaagtggaaagccttccagctgtctgtccgagtgatggctgtacatggaagggtacattaaaggaatatgagtcttgccatgaaggtcgctgcccattgatgcttaccgagtgccctgcctgcaaggggctagtacgtctgggcgagaaggaaagacatttggagcacgaatgcccagaaagaagcctgtcgtgtcggcattgtagggctccttgctgcggctag

SEQ ID NO: 207822 - DNA, 582 bp, Artificial Sequence
  derived and/or modified sequence
atggccgccgccagcgtgaccccccccggcagcctggagctgctgcaacccggctttagcaaaaccctacttgggacaaaactggaagcaaagtatctctgcagcgcgtgtcggaacgtcctgcgccgcccatttcaagcacagtgcgggcaccggtattgctccttttgtttggcttccatcctaagcagcgggccccagaactgcgctgcttgtgtccatgagggaatttatgaagagggcatcagcattctcgagtcatcttctgccttccccgacaacgctgcccgtcgcgaggtcgagtctctgccagctgtttgtcccagcgatggttgcacatggaaaggaaccttaaaggagtacgagtcatgccacgagggcaggtgtcctctgatgcttaccgagtgcccagcttgcaaaggcttggtcaggttaggcgagaaggagcggcatctagagcacgagtgtcccgagcggtcgctcagttgtagacactgccgcgctccttgctgtggggccgatgtgaaggcacatcatgaagtctgtccgaagtttcctttaacgtgtgacgggtgtgggtag

SEQ ID NO: 207823 - DNA, 1506 bp, Artificial Sequence
  derived and/or modified sequence
atggccgccgccagcgtgaccccccccggcagcctggagctgctgcagcctgggtttagcaagacgctgcttggcactaagttagaagccaagtatctctgctccgcctgtcgtaacgtattaaggcgacctttccaggctcaatgtggccaccgatactgtagtttctgtctagccagtatcctgtcaagcgggccccagaactgcgcagcttgtgtccacgaaggcatatatgaggaaggcatctctatcctggaaagctcctccgcgttccccgataatgccgctcgaagggaggttgagtcattgccagcggtttgtccaagtgatggatgtacctggaaggggaccttgaaggaatatgaaagctgtcatgaaggtcgctgccccctgatgctcacagagtgcccggcctgtaaaggtctggtgcgcctgggcgaaaaagagagacatctggaacacgaatgccctgaacgatccctgtcatgccggcactgcagggctccctgttgcggggccgacgtgaaggctcatcatgaggtctgcccaaagttccccctgacgtgcgacggatgcggtaagaagaagataccaagggagaaattccaagaccatgtcaaaacatgcggaaaatgtcgcgttccctgtagattccatgcaattggatgcctggagacggtagagggcgagaagcagcaagaacatgaagtccagtggttacgggaacatctggcaatgctgctgagctcagtgcttgaagccaagccactattgggcgatcagtcccatgctgggtctgagcttctgcaaagatgtgaatccctggaaaaaaagacagctacttttgaaaatatagtatgcgtgttaaatcgcgaggtggaacgcgtggccatgaccgctgaggcgtgctcacgccagcatcgtctggatcaggacaagatcgaagcactcagttcaaaggttcaacagctcgaacgcagcatcggtctgaaggaccttgccatggcagatctggaacaaaaagtcctggagatggaggctagcacatacgatggggtgtttatatggaaaatatcagacttcgcacgcaaaagacaggaagccgtggctggccggattccagctatctttagtcctgcgttttacacaagccgttacgggtacaagatgtgtttgaggatctacctgaatggagatgggaccggccgcggcacacacctttctctgtttttcgtcgtgatgaagggtcccaacgacgccctgctccgctggcccttcaatcaaaaagtgacgctgatgctgctcgatcaaaacaacagggaacatgttattgacgcattccgccccgatgtaacttcctctagcttccagcgtcctgtgaacgacatgaacattgcttccggctgtcccctgttttgccctgtctccaagatggaggcaaagaattcatacgtgcgcgacgacgctatttttataaaagctatagttgatctgaccggattatag

SEQ ID NO: 207824 - DNA, 1506 bp, Artificial Sequence
  derived and/or modified sequence
atggcagcagcctcggttacaccccctggatctctggagttgttacagcctgggttctccaagacactcctaggaaccaaactggaggccaagtatctgtgtagtgcctgccgcaatgtgctgcgcaggccattccaggcgcagtgtggccaccgctattgctctttctgcctcgcatctatcctctcctctggcccacagaattgcgcagcatgcgtacatgagggaatttatgaggaaggaatatctatattagaatcatcaagtgcattccctgataatgccgctaggagggaggtagaatcgctaccggcagtgtgtccctccgatggctgcacctggaaaggtactcttaaggagtacgaatcctgtcacgaaggcagatgtccgctgatgttgactgagtgtccagcgtgcaaagggctagtgagactgggagaaaaagagcgccatcttgagcacgaatgtccagaaagaagcctgtcttgccggcattgccgcgcaccttgttgcggcgctgatgtgaaagctcaccatgaggtgtgccctaagtttccacttacctgcgatgggtgtgggaagaaaaagattcccagagagaaatttcaggaccatgtgaagacgtgcgggaagtgtagggtgccttgccggtttcacgctatcgggtgtttggaaactgtcgagggggagaaacagcaggaacatgaggttcaatggctgcgagagcatctcgcgatgctcctctcaagtgtactggaagccaaacccctgttaggtgaccagtcccacgcaggctccgagctgctccagcgatgtgaaagcctcgaaaaaaaaaccgcaaccttcgagaacatagtatgtgtgcttaacagagaggtagagagagtggccatgaccgctgaagcctgttcaagacagcacagattggatcaagataaaatagaggcgctttcttcgaaagtacagcaattggaacggtctatcggcctgaaggatttggcgatggcagatttggaacaaaaggtgttggagatggaagcctctacctacgatggagtgtttatatggaagatttccgactttgctcggaaaaggcaggaagcggtggcaggtaggatccctgccattttcagcccagcgttctataccagtcggtacgggtataagatgtgcctgagaatctatctgaacggggacggtacgggtcgagggacccacctctcccttttctttgtcgtcatgaagggcccaaatgacgcactcttacgctggcctttcaatcagaaggttacactcatgcttctggatcagaataatcgggaacacgtgattgacgcttttcgcccagacgtgacatcatctagttttcagcgaccagtaaatgacatgaacatcgcatcaggatgtcccctattctgcccagtcagcaagatggaagctaagaattcctacgtccgcgacgacgcaattttcataaaggccatcgttgacttaactggactctag

SEQ ID NO: 207825 - DNA, 1662 bp, Artificial Sequence
  derived and/or modified sequence
atggccgcagccagcgtcactccccctggttctctggagctgctccagcctggttttagcaagacccttttggggacaaaactggaggccaagtacctgtgtagcgcctgcaggaatgttctccgccgacctttccaagcacagtgtggacacagatattgcagtttttgtctggctagcatactatcctccggtccacagaactgtgctgcatgtgtacatgaggggatctacgaagagggtattagtattctagagagctcatccgccttccccgataatgcagccagaagggaggtcgaatctctccccgcagtttgtccttctgacggctgcacttggaaaggcactcttaaggagtacgaggtcaagatgcccgcttgcggaatggtgactgaggcgccagccgtgggatcacggcctaggagtccctccagctacgacctcgtgctgcacgtccctctgactggtgccgaggcctgcttaatgagcgtagaagaggaaacagagttgctcttgcgttcttgtcatgaaggcaggtgtccactgatgctgacggagtgtcctgcctgcaaggggcttgtgcgtctgggcgaaaaagaacggcacctggagcacgaatgccccgagagatcactgagttgccgtcactgcagggcaccctgctgcggggcagacgtcaaagcccaccacgaagtgtgccccaaattccctctgacctgtgacggctgcggcaagaagaagatacctcgtgagaagttccaagatcacgtgaagacttgtgggaaatgcagagtgccctgccgttttcatgccatcggttgcctggagactgtggagggagaaaaacagcaagagcacgaggttcagtggctgcgagagcacctcgccatgctgctgtctagtgttctcgaagctaagcccctgctgggcgatcaaagccacgctggcagcgaactgctccagcgctgtgaaagcctcgagaaaaagaccgccacattcgagaatatcgtgtgcgtactgaatcgggaagttgagcgagttgccatgactgcagaagcttgttcaaggcagcacaggctagatcaggataaaattgaggccctgagcagtaaagtgcagcagctggaacgatcaatcggactgaaggacttagcaatggcggatctggagcaaaaggtacttgaaatggaggcttctacttatgacggcgttttcatctggaagatatctgatttcgctaggaagaggcaagaggctgtcgccggacgtatccctgccatttttagccccgcattctacacgagcaggtacggctacaaaatgtgcctcaggatctacttgaatggtgatgggaccggcagaggaacccatctttcattattttttgtggtcatgaagggacccaatgacgctctgttacgctggcctttcaatcaaaaggtaactctaatgttgctcgatcaaaacaatcgggagcatgtcatcgatgcttttcggcctgatgtaacatcaagtagcttccaacgtcccgtcaacgatatgaacattgcttccgggtgtcctctgttttgccctgtatccaagatggaggccaagaactcatacgtgcgggacgacgcaattttcatcaaggccattgtcgacctaaccggcctatag

SEQ ID NO: 207826 - DNA, 1269 bp, Artificial Sequence
  derived and/or modified sequence
atggcggctgccagcgtaacacctcctgggagtctggagctacttcaaccaggcttttcaaagactcttctgggaaccaagctcgaagctaaatacctgtgtagcgcctgcagaaatgttctcagacgcccattccaggctcagtgtgggcatcggtactgtagcttctgcttggcatccatactctcctcagggccacaaaactgcgctgcctgcgttcacgagggaatatacgaggaggggatcagcattttggagagctcttcagccttccctgacaatgcagcgaggagggaagtcgagagcttgcccgcagtgtgcccttcagacggttgtacatggaaagggaccctcaaagagtatgaggtaaagatgccggcttgcggaatggtcacggaagcaccagccgtcggctcacgcccaagatccccctcttcgtacgatctggtactgcatgtgcctctcaccggggctgaagcttgtttaatgagtgtcgaggaagagaccgaactgctcttaaggtcctgtcacgagggccgatgtccactcatgcttactgaatgtccagcctgcaaggggctggtgagactgggtgaaaaggagaggcatttggaacatgaatgtcctgagcgttccctgtcatgtcggcattgtcgagctccttgttgtggtgctgacgtgaaacgacttgaccaggataagatagaggctctgtcctccaaagtgcaacagcttgaacggagtattgggttgaaggacctcgccatggcagacctggaacagaaggtgttagagatggaagccagtacctacgacggcgtttttatctggaagatcagcgatttcgccagaaaaagacaggaggccgtggccggacggatacccgcaatctttagtccggctttctacacgtcccggtacggatacaaaatgtgcctgcgaatctatttgaatggggacgggacggggagaggaacccacttgagtctgttctttgttgtgatgaaaggtccaaatgacgccctactcaggtggccctttaaccagaaagtgacactgatgttactcgatcagaataaccgggagcacgtcatagatgcttttcgacccgacgtgacgagctcctcctttcaacgccctgtgaatgatatgaatatagctagcgggtgccctctgttctgccccgtttcgaaaatggaggcgaaaaacagctatgttcgggacgacgccatcttcataaaggcaatagtggacctgaccgggctgtag

SEQ ID NO: 207827 - DNA, 366 bp, Artificial Sequence
  derived and/or modified sequence
atggcagccgcttcagtgacccctcccggtagtcttgagctcctccagcccggtttttcgaagacattgctcgggactaagttagaggcaaagtacctgtgctcagcgtgccgtaatgtcctgagacgtccctttcaggcccaatgcggccacaggtattgctccttttgtctggcatccatcctgtcctcaggcccacagaactgcgctgcatgcgtgcatgaaggtatctatgaggaggggatatccatactcgagtctagctccgccttccccgataacgctgccagacgcgaagtggagtccctgccagctgtgtgtccttccgacggatgtacatggaaggggactcttaaggaatattag

SEQ ID NO: 207828 - DNA, 519 bp, Artificial Sequence
  derived and/or modified sequence
atggctgctgcctcagtaacaccgcctggaagccttgagctcttacagccaggcttctccaaaacactgctgggtaccaagttggaggccaagtatctgtgctccgcatgtcgcaacgtgcttaggcgcccttttcaggcccagtgcggtcatcgctactgtagtttttgcctcgcaagcattctttccagcgggccacagaattgcgccgcttgtgtccacgaagggatatacgaggagggtatcagtatcttagaaagctcctcggcgtttccggacaatgccgctaggcgcgaggttgagtctctgcctgcagtgtgcccctcagacgggtgcacctggaaaggaacacttaaagagtacgaaagctgccacgaagggcgatgccctttaatgctgacagaatgtccagcttgcaagggacttgtccggctcggagagaaggagcggcaccttgagcacgagtgcccagagagatccctcagctgtaggcactgccgtgcgccttgctgcggttag

SEQ ID NO: 207829 - DNA, 582 bp, Artificial Sequence
  derived and/or modified sequence
atggctgctgcatcagtgaccccacccggatccctggagcttttgcagcctggattctctaagaccctgttaggtactaaactggaggctaaatatttatgcagcgcatgcaggaacgtactccgcaggccattccaggctcaatgcggccatcgatactgttccttttgtcttgcgtctattctgtcctcaggtcctcagaactgcgctgcatgcgtccatgagggcatctatgaagaaggaatctctatcctggagagcagttccgctttccccgacaacgccgcacgcagggaagtagagtctctgcccgcagtctgtcctagtgacggttgcacttggaaaggtacactgaaggagtatgagtcctgccacgagggacgatgtcccctaatgctgacagaatgccccgcttgtaagggcctcgttaggttgggtgaaaaagagaggcaccttgagcatgagtgcccagagcgtagcttatcctgtcgacactgcagggccccttgctgcggggctgatgttaaagctcaccacgaagtgtgtccaaaattccccctgacctgcgacgggtgcggatag

SEQ ID NO: 207830 - DNA, 1506 bp, Artificial Sequence
  derived and/or modified sequence
atggctgccgcttcagtgacacctccaggcagcctcgagctcctgcagcccggattctctaagaccctccttgggaccaagttggaggccaagtatctctgcagcgcttgcaggaacgtcctccggagacctttccaagcacaatgtgggcatcgctattgctcattctgcctggcaagcatcctatcatccggcccacaaaattgcgcagcctgtgtgcacgagggcatttatgaggaggggatttctatccttgagagtagttcagccttccccgataacgccgctagacgagaggtggagtccctgcccgctgtgtgtccaagtgacgggtgcacttggaaagggacgctgaaggagtatgagtcttgccatgaaggtagatgccccctcatgttgacagaatgtccggcttgtaaggggctggtgcgacttggcgaaaaggagagacacctggagcatgagtgccctgagcgaagtttgtcatgtaggcattgccgggcaccttgctgcggggctgacgtgaaggcccaccatgaggtgtgtccaaaattcccattaacttgcgacggttgtgggaagaagaagatccccagggaaaaattccaagaccacgtaaagacatgtgggaagtgccgggtgccatgccgattccacgcaattggatgtctggagactgtggagggcgaaaaacagcaggagcacgaggtccagtggctgcgcgagcatctcgctatgttattgagcagcgtgctggaggccaaaccactactcggcgaccagtcccacgctggatccgagctgctgcagaggtgcgagtctttggaaaaaaaaaccgcgacctttgaaaacatcgtttgcgtgctcaatcgggaagtggaacgggtggctatgactgccgaggcttgttcccgtcagcacaggcttgatcaggacaaaatcgaagcgctgtcttctaaagtgcagcagctcgaaagatcgataggcttgaaagacctggcaatggctgacttggagcagaaagtgctcgagatggaagcctccacgtatgacggcgtgtttatctggaagatctcagacttcgctcgtaagcgccaggaggccgtggcaggcagaatccctgccatattctctccagcattctacacctcacgctacgggtataagatgtgccttcgcatatacctgaatggagatgggacaggcagagggactcatctgtcccttttcttcgtagtgatgaaaggcccaaatgacgctctgctgcggtggcctttcaatcagaaggtcactctgatgctgttagatcagaataacagagaacatgtgattgacgcctttaggccagacgtaacctcctcctctttccaacgaccagtgaacgacatgaatattgccagcggatgtcctctcttctgccccgtgtcgaaaatggaggctaaaaactcctatgtgagggatgatgcgatttttattaaggccatcgtcgacctgaccggactgtag

SEQ ID NO: 207831 - DNA, 2019 bp, Artificial Sequence
  derived and/or modified sequence
gcgctgcgaccgttggggctttgttcgcgggggtcacagctctcatggctgcagctagcgtgaccccccctggctccctggagttgctacagcccggcttctccaagaccctcctggggaccaagctggaagccaagtacctgtgctccgcctgcagaaacgtcctccgcaggcccttccaggcgcagtgtggccaccggtactgctccttctgcctggccagcatcctcagctctgggcctcagaactgtgctgcctgtgttcacgagggcatatatgaagaaggcatttctattttagaaagcagttcggccttcccagataatgctgcccgcagggaggtggagagcctgccggccgtctgtcccagtgatggatgcacctggaaggggaccctgaaagaatacgaggtaaagatgcctgcgtgtggcatggtgacagaagctccagcagtcgggagtcgtccacgctccccaagcagttatgaccttgtcctgcacgttcctctcactggggctgaagcctgtctgatgtctgtggaggaagagacggagctgctccttagaagctgccacgaaggccgctgcccgctcatgctgaccgaatgtcccgcgtgcaaaggcctggtccgccttggtgaaaaggagcgccacctggagcacgagtgcccggagagaagcctgagctgccggcattgccgggcaccctgctgcggagcagacgtgaagcggctggaccaagacaagattgaagccctgagtagcaaggtgcagcagctggagaggagcattggcctcaaggacctggcgatggctgacttggagcagaaggtcttggagatggaggcatccacctacgatggggtcttcatctggaagatctcagacttcgccaggaagcgccaggaagctgtggctggccgcatacccgccatcttctccccagccttctacaccagcaggtacggctacaagatgtgtctgcgtatctacctgaacggcgacggcaccgggcgaggaacacacctgtccctcttctttgtggtgatgaagggcccgaatgacgccctgctgcggtggcccttcaaccagaaggtgaccttaatgctgctcgaccagaataaccgggagcacgtgattgacgccttcaggcccgacgtgacttcatcctcttttcagaggccagtcaacgacatgaacatcgcaagcggctgccccctcttctgccccgtctccaagatggaggcaaagaattcctacgtgcgggacgatgccatcttcatcaaggccattgtggacctgacagggctctaactgccccctactggtgtctgggggttgggggcagccaggcacagccggctcacggaggggccaccacgctgggccagggtctcactgtacaagtgggcaggggccgcgcttgggcgcttgggagggtgtcggcctgcagccaagttcactgtcacgggggaaggagccaccagccagtcctcagatttcagagactgcggaggggcttggcagacggtcttagccaagggctgtggtggcattggccgagggtcttcgggtgcttcccagcacaagctgcccttgctgtcctgtgcagtgaagggagaggccctgggtgggggacactcagagtgggagcacatcccagcagtgcccatgtagcaggagcacagtggatggccttgtgtccctcgggcatgacaggcagaaacgagggctgctccaggagaagggcctcctgctggccagagcaaggaaggctgagcagcttggttctcccctctggcccctggagagaagggagcattcctagacccctgggtgcttgtctgcacagagctctggtctgtgccaccttggccaggctggctgtgggagagggtctggtcccacgccgcctctgctcagaccactgtgtgggaggtgcacagcacagcctgcgggtaaagtgtgagagcttgccatccagctcacgaagacagagttattaaaccattcaaatctc

SEQ ID NO: 207832 - DNA, 285 bp, Artificial Sequence
  derived and/or modified sequence
atgcagcacagcctggtgttcttcttcgccgtgatcctgcacctgagtcaccttctacacctcgacgccagcatccatccctttagattgcccttctcctcaaagccttttctgctcatccctatgtcaaatacaactttgccgcacacagcatggccgctgtcctttctgcaccagacagtgtccactctgaaagcagtagccgtgactcattcgctatggcacttgcaaattcctgtggactgtcaggcttgtaatagaaagtccaagaaaatttattgctag

SEQ ID NO: 207833 - protein, 528 aa, Artificial Sequence
  derived and/or modified sequence
MSMKWTSALLLIQLSCYFSSGSCGKVLVWPTEFSHWMNIKTILDELVQRGHEVTVLASSASISFDPNSPSTLKFEVYPVSLTKTEFEDIIKQLVKRWAELPKDTFWSYFSQVQEIMWTFNDILRKFCKDIVSNKKLMKKLQESRFDVVLADAVFPFGELLAELLKIPFVYSLRFSPGYAIEKHSGGLLFPPSYVPVVMSELSDQMTFIERVKNMIYVLYFEFWFQIFDMKKWDQFYSEVLGRPTTLSETMAKADIWLIRNYWDFQFPHPLLPNVEFVGGLHCKPAKPLPKEMEEFVQSSGENGVVVFSLGSMVSNTSEERANVIASALAKIPQKVLWRFDGNKPDTLGLNTRLYKWIPQNDLLGHPKTRAFITHGGANGIYEAIYHGIPMVGVPLFADQPDNIAHMKAKGAAVSLDFHTMSSTDLLNALKTVINDPLYKENAMKLSRIHHDQPVKPLDRAVFWIEFVMRHKGAKHLRVAAHDLTWFQYHSLDVTGFLLACVATVIFIITKCLFCVWKFVRTGKKGKRD

SEQ ID NO: 207834 - DNA, 1587 bp, Artificial Sequence
  derived and/or modified sequence
atgagcatgaagtggaccagcgccctgctgctgatccagctgagctgctacttcagcagcggcagctgcggcaaggtgctggtgtggcccaccgagttcagccactggatgaacatcaagaccatcctggacgagctggtgcagagaggccacgaggtgaccgtgctggccagcagcgccagcatcagcttcgaccccaacagccccagcaccctgaagttcgaggtgtaccccgtgagcctgaccaagaccgagttcgaggacatcatcaagcagctggtgaagagatgggccgagctgcccaaggacaccttctggagctacttcagccaggtgcaggagatcatgtggaccttcaacgacatcctgagaaagttctgcaaggacatcgtgagcaacaagaagctgatgaagaagctgcaggagagcagattcgacgtggtgctggccgacgccgtgttccccttcggcgagctgctggccgagctgctgaagatccccttcgtgtacagcctgagattcagccccggctacgccatcgagaagcacagcggcggcctgctgttcccccccagctacgtgcccgtggtgatgagcgagctgagcgaccagatgaccttcatcgagagagtgaagaacatgatctacgtgctgtacttcgagttctggttccagatcttcgacatgaagaagtgggaccagttctacagcgaggtgctgggcagacccaccaccctgagcgagaccatggccaaggccgacatctggctgatcagaaactactgggacttccagttcccccaccccctgctgcccaacgtggagttcgtgggcggcctgcactgcaagcccgccaagcccctgcccaaggagatggaggagttcgtgcagagcagcggcgagaacggcgtggtggtgttcagcctgggcagcatggtgagcaacaccagcgaggagagagccaacgtgatcgccagcgccctggccaagatcccccagaaggtgctgtggagattcgacggcaacaagcccgacaccctgggcctgaacaccagactgtacaagtggatcccccagaacgacctgctgggccaccccaagaccagagccttcatcacccacggcggcgccaacggcatctacgaggccatctaccacggcatccccatggtgggcgtgcccctgttcgccgaccagcccgacaacatcgcccacatgaaggccaagggcgccgccgtgagcctggacttccacaccatgagcagcaccgacctgctgaacgccctgaagaccgtgatcaacgaccccctgtacaaggagaacgccatgaagctgagcagaatccaccacgaccagcccgtgaagcccctggacagagccgtgttctggatcgagttcgtgatgagacacaagggcgccaagcacctgagagtggccgcccacgacctgacctggttccagtaccacagcctggacgtgaccggcttcctgctggcctgcgtggccaccgtgatcttcatcatcaccaagtgcctgttctgcgtgtggaagttcgtgagaaccggcaagaagggcaagagagactag

SEQ ID NO: 207835 - DNA, 1587 bp, Artificial Sequence
  derived and/or modified sequence
atgtctatgaagtggacttccgccctcttactgattcagctcagctgttatttctcctcaggcagctgtggaaaggtattggtgtggcccacagagttttctcactggatgaatatcaaaacaatcctggatgaactggtgcagaggggtcacgaagttaccgtgctcgcctccagtgccagtatttcttttgatccaaacagtccaagcaccttgaaatttgaagtgtatcccgtctccttgaccaagacggaatttgaagatattattaaacagcttgtgaagcgatgggccgaactcccaaaggatactttctggtcctatttcagtcaggtgcaagaaattatgtggacattcaatgacatcttgaggaaattttgtaaagacattgtgtctaacaagaagcttatgaagaaactgcaagagtctcgcttcgacgtggtactggctgacgctgtgtttcccttcggggaacttctagccgagctattaaaaatcccttttgtctattccctcaggttttcccctggctatgcaatcgaaaagcactcagggggtctgctgttcccgccatcctacgtcccggttgttatgagcgaactcagtgatcagatgacattcattgagcgggttaagaatatgatctacgtgctgtactttgagttctggttccaaatatttgacatgaagaagtgggaccagttctacagcgaagtcttgggacgtcctacaaccttgtctgagactatggccaaagcggatatttggctgatccgaaactactgggatttccagttcccacacccgttattgcccaacgtcgaattcgtgggtggcctacactgcaaacctgctaaaccgctccccaaggaaatggaggagttcgtacagagtagcggcgaaaatggcgttgtcgtcttctctctcgggtctatggtatctaacacctcagaggagcgcgccaacgtgatcgcctccgcactagccaagatcccgcagaaggtgctgtggaggttcgacggcaacaagcccgacactctgggcttgaatacgagactgtacaagtggattccccagaatgacttattagggcatccaaaaacccgcgcgttcattacacacggaggggctaacggcatatacgaagcaatctaccatggcattcccatggttggcgtgcctctgtttgcagatcagcctgacaacatcgctcacatgaaggcaaagggcgcagccgtgagcttagattttcacaccatgagttccaccgacttactcaatgccctgaagaccgtcattaacgaccccctgtataaagagaatgctatgaagctgagtaggatacaccacgatcagccagttaaaccactcgacagggctgtcttttggatagagtttgtgatgagacacaaaggtgccaagcacttgcgggtcgcggcccatgacctgacctggttccaatatcatagcctggatgttacgggattcttactggcatgcgtcgccaccgtgatttttatcattactaagtgcctgttttgcgtgtggaagtttgtgagaacgggcaagaaaggaaaacgggactag

SEQ ID NO: 207836 - DNA, 1587 bp, Artificial Sequence
  derived and/or modified sequence
atgtccatgaagtggaccagcgccctgctgctgatccagctgagctgctacttcagcagcggcagctgtgggaaggtgctggtgtggcccacagagttcagccactggatgaacatcaagaccatcctggatgagctggtgcagaggggccacgaggtgacagtgctggccagcagcgccagcatcagctttgaccccaacagccccagcaccctgaagtttgaggtgtaccctgtgtccctgaccaagacagaatttgaggacatcatcaagcagctggtgaagcgctgggccgagctgcccaaggacaccttctggagctacttcagccaggtgcaggagatcatgtggaccttcaatgacatcctgaggaagttctgcaaggacatcgtgagcaacaagaagctgatgaagaagctgcaggagagcagatttgatgtggtgctggctgatgctgtgttcccctttggagagctgctggccgagctgctgaagatcccctttgtgtacagcctgcgcttcagccctggctacgccatcgagaagcacagcggcggcctgctcttcccccccagctatgtgcctgtggtgatgtctgagctgagtgaccagatgaccttcatcgagcgggtgaagaacatgatctacgtgctgtactttgagttctggttccagatctttgacatgaagaagtgggaccagttctacagcgaggtgctgggccggcccaccaccctgtctgagaccatggccaaggctgacatctggctgatccggaactactgggacttccagttcccccaccccctgctgcccaacgtggagtttgtgggcggcctgcactgcaagccagccaagcccctgcccaaggagatggaggagtttgtgcagagcagtggagaaaatggagtggtggtgttcagcctgggctccatggtgagcaacaccagcgaggagcgggccaacgtcatcgccagcgccctggccaagatcccccagaaggtgctgtggaggtttgatggcaacaagccagacaccctgggcctgaacacccggctgtacaagtggatcccccagaatgacctgctgggccaccccaagacccgggccttcatcacccacggcggggccaacggcatctatgaggccatctaccacggcatccccatggtgggcgtgcccctgtttgctgaccagcctgacaacatcgcccacatgaaggccaagggagctgctgtgtccctggacttccacaccatgagcagcacagacctgctgaatgccctgaagacagtcatcaatgaccccctgtacaaggaaaatgccatgaagctgagccgcatccaccacgaccagcctgtgaagcccctggacagagctgtgttctggattgaatttgtgatgaggcacaagggggccaagcacctgcgggtggccgcccatgacctgacctggttccagtaccacagcctggatgtgacaggcttcctgctggcctgtgtggccaccgtcatcttcatcatcaccaagtgcctcttctgtgtgtggaagtttgtgaggacaggcaagaagggcaagagggactag

SEQ ID NO: 207837 - DNA, 1587 bp, Artificial Sequence
  derived and/or modified sequence
atgagcatgaagtggaccagcgccctgctgctgatccagctgagctgttacttcagttctgggtcttgtgggaaggttctagtgtggccaacagagttcagtcactggatgaacatcaaaacgatcttggacgaactggtgcagcggggacacgaggttactgtgctggcttcctcagcttccatttctttcgaccccaattctcccagcaccctgaagtttgaggtttacccggtgtccttgactaagacggagtttgaagacattataaagcagctggtaaagaggtgggctgaactccccaaagacactttctggtcctacttctcgcaggtgcaggaaatcatgtggacatttaacgacatcctccgcaagttttgcaaggacatcgtgagcaacaaaaaactgatgaagaaactccaggagagccgctttgatgtggtgctggccgatgccgtgtttccctttggagagctgttggccgaactgctcaagattcctttcgtgtacagtttgcgttttagtcccgggtatgctatcgaaaagcattctggggggctgctgtttcctccaagttatgttcctgtggttatgagcgagttaagtgaccaaatgacctttatcgaaagagtaaagaacatgatctacgtgctctacttcgaattctggttccaaatcttcgacatgaaaaaatgggaccagttctatagtgaggtgctgggccgccccaccaccctctctgagacaatggccaaggccgacatctggttaatcagaaattactgggacttccagttcccccacccactgttgcccaatgtcgaattcgtggggggcctgcactgtaagcctgccaagcctttgccaaaggagatggaagaatttgtccagagcagtggagaaaatggcgtggtggtctttagcctgggctccatggtgagtaacacttccgaggagcgagcgaacgttatcgccagcgccctcgccaaaatcccacagaaagtcctgtggcgtttcgatggaaataagcccgatacattggggctgaatacgcggctatataagtggattccccagaacgacctgctgggtcaccccaaaactagggctttcatcacacacggcggagctaatggaatttacgaggccatctaccatggaatccccatggtgggggtgcccttgtttgcggaccaacctgataatatcgcccacatgaaggccaaaggagccgccgtcagcctcgacttccatacgatgagctctaccgatctcttaaatgccctcaaaaccgtaatcaacgaccctctgtacaaggagaatgcaatgaagctcagccggattcaccacgaccagcccgtgaaacccttagatcgcgccgtgttttggatcgagtttgtaatgcgacataagggggccaaacatctaagagtggccgctcacgaccttacgtggttccagtaccattctctggatgtcactgggtttctgctggcctgcgtggccactgtgatttttatcatcaccaaatgcctgttctgtgtgtggaaatttgtaaggacaggcaagaagggtaagcgagactag

SEQ ID NO: 207838 - DNA, 1587 bp, Artificial Sequence
  derived and/or modified sequence
atgtctatgaagtggacatctgccttgttgctgattcagctatcatgttatttctcctcaggatcttgcggaaaggtgctcgtttggccaaccgagttcagccattggatgaatataaaaacaatcctcgatgagctcgtccagcggggacatgaggtgacggtcttggccagcagcgctagtatctctttcgatcccaacagcccctctaccctcaaatttgaggtgtatccagtgtctctgactaagactgaattcgaagacattattaagcagttggtgaagcgctgggctgaactgcccaaggacactttctggtcctatttttcacaggtacaagagattatgtggactttcaacgacattctgaggaagttttgcaaggacatagtgtccaataagaaactcatgaagaagctccaggaatcgagattcgacgtcgttttggctgatgccgtttttccattcggagaactcctggccgaactgttgaagatcccctttgtgtacagtctacgattctcccctggctatgctatcgagaaacactctgggggactgctatttccgccttcctatgtacccgtggtgatgtcagaactgagcgaccagatgacgttcatcgagcgcgttaaaaacatgatctacgtcctgtactttgaattttggtttcaaatctttgatatgaagaagtgggatcagttttactctgaagtgctgggcaggccaacaaccctgtcagaaaccatggcgaaagccgatatttggcttatcagaaattactgggattttcagtttccacatccattactcccgaacgtggaatttgtcggagggctccactgtaagcccgctaaacctttgccgaaggaaatggaggagttcgtgcagtcctccggcgagaacggcgtagtggttttcagcctcggatctatggtctcaaacacctccgaggaaagagcaaacgtaatcgcctcggccctggctaaaattccacagaaggtgctctggcgattcgatggcaataaaccagacactctgggcctgaatacccggctgtataaatggatccctcagaatgatctgctggggcatcccaagacacgagctttcatcacccatggaggcgctaatgggatttatgaggctatttaccacgggattccaatggtgggagtccccctgtttgccgaccagccggacaacattgcccatatgaaggccaagggagctgccgtcagtctcgacttccacactatgtcatctaccgatctgcttaacgcgctaaagactgtgattaacgatccgctttacaaggagaatgctatgaaactgtccagaatccaccacgatcagcctgtgaagcccctggatcgggctgtgttttggatagagttcgtcatgcgccacaaaggtgctaagcatctgcgggttgccgctcatgatcttacttggttccagtatcacagtctggacgtcaccggattcctcctggcctgtgtagcaacggttatttttataattaccaagtgcttgttctgcgtgtggaagttcgtaaggacaggaaaaaagggaaagagagactag

SEQ ID NO: 207839 - DNA, 2103 bp, Artificial Sequence
  derived and/or modified sequence
gacagaaaggagcagcaactggaaaacaagcattgcattgcatcaggatgtctatgaaatggacttcagctcttctgctgatacagctgagctgttactttagctctgggagttgtggaaaggtgctggtgtggcccacagaattcagccactggatgaatataaagacaatcctggatgaacttgtccagagaggtcatgaggtgactgtattggcatcttcagcttccatttctttcgatcccaacagcccatctactcttaaatttgaagtttatcctgtatctttaactaaaactgagtttgaggatattatcaagcagctggttaagagatgggcagaacttccaaaagacacattttggtcatatttttcacaagtacaagaaatcatgtggacatttaatgacatacttagaaagttctgtaaggatatagtttcaaataagaaacttatgaagaaactacaggagtcaagatttgatgttgttcttgcagatgctgttttcccctttggtgagctgctggccgagttacttaaaataccctttgtctacagcctccgcttctctcctggctacgcaattgaaaagcatagtggaggacttctgttccctccttcctatgtgcctgttgttatgtcagaactaagtgaccaaatgactttcatagagagggtaaaaaatatgatctatgtgctttattttgaattttggttccaaatatttgacatgaagaagtgggatcagttctacagtgaagttctaggaagacccactacgttatctgagacaatggcaaaagctgacatatggcttattcgaaactactgggattttcaatttcctcacccactcttaccaaatgttgagttcgttggaggactccactgcaaacctgccaaacccctaccgaaggaaatggaagagtttgtccagagctctggagaaaatggtgttgtggtgttttctctggggtcgatggtcagtaacacatcagaagaaagggccaatgtaattgcatcagcccttgccaagatcccacaaaaggttctgtggagatttgatgggaataaaccagatactttaggactcaatactcggctgtacaagtggataccccagaatgatcttcttggtcacccaaaaaccagagcttttataactcatggtggagccaatggcatctatgaggcaatctaccatggaatccctatggtgggcgttccattgtttgcagatcaacctgataacattgcacacatgaaggccaagggagcagctgttagtttggacttccacacaatgtcgagtacagacttactcaatgcactgaagacagtaattaatgatcctttatataaagagaatgctatgaaattatcaagaattcatcatgatcaaccagtgaagccccttgatcgagcagtcttctggattgaatttgtcatgcgccataaaggagccaagcaccttcgggttgcagcccacgacctcacctggttccagtaccactctttggatgtgactgggttcctgctggcctgtgtggcaactgtgatattcatcatcacaaaatgtctgttttgtgtctggaagtttgttagaacaggaaagaaggggaaaagagattaattacgtctgaggctggaagctgggaaacccaataaatgaactcctttagtttattacaacaagaagacgttgtgatacaagagattcctttcttcttgtgacaaaacatctttcaaaacttaccttgtcaagtcaaaatttgttttagtacctgtttaaccattagaaatatttcatgtcaaggaggaaaacattagggaaaacaaaaatgatataaagccatatgaggttatattgaaatgtattgagcttatattgaaatttattgttccaattcacaggttacatgaaaaaaaatttactaagcttaactacatgtcacacattgtacatggaaacaagaacattaagaagtccactgacagtatcagtactgttttgcaaatactcagcatactttggatccatttcatgcaggattgtgttgttttaactgttgttgaggaagctaataaataattaaattgta

SEQ ID NO: 207840 - protein, 1401 aa, Artificial Sequence
  derived and/or modified sequence
MKSCGVSLATAAAAAAAFGDEEKKMAAGKASGESEEASPSLTAEEREALGGLDSRLFGFVRFHEDGARTKALLGKAVRCYESLILKAEGKVESDFFCQLGHFNLLLEDYPKALSAYQRYYSLQSDYWKNAAFLYGLGLVYFHYNAFQWAIKAFQEVLYVDPSFCRAKEIHLRLGLMFKVNTDYESSLKHFQLALVDCNPCTLSNAEIQFHIAHLYETQRKYHSAKEAYEQLLQTENLSAQVKATVLQQLGWMHHTVDLLGDKATKESYAIQYLQKSLEADPNSGQSWYFLGRCYSSIGKVQDAFISYRQSIDKSEASADTWCSIGVLYQQQNQPMDALQAYICAVQLDHGHAAAWMDLGTLYESCNQPQDAIKCYLNATRSKSCSNTSALAARIKYLQAQLCNLPQGSLQNKTKLLPSIEEAWSLPIPAELTSRQGAMNTAQQNTSDNWSGGHAVSHPPVQQQAHSWCLTPQKLQHLEQLRANRNNLNPAQKLMLEQLESQFVLMQQHQMRPTGVAQVRSTGIPNGPTADSSLPTNSVSGQQPQLALTRVPSVSQPGVRPACPGQPLANGPFSAGHVPCSTSRTLGSTDTILIGNNHITGSGSNGNVPYLQRNALTLPHNRTNLTSSAEEPWKNQLSNSTQGLHKGQSSHSAGPNGERPLSSTGPSQHLQAAGSGIQNQNGHPTLPSNSVTQGAALNHLSSHTATSGGQQGITLTKESKPSGNILTVPETSRHTGETPNSTASVEGLPNHVHQMTADAVCSPSHGDSKSPGLLSSDNPQLSALLMGKANNNVGTGTCDKVNNIHPAVHTKTDNSVASSPSSAISTATPSPKSTEQTTTNSVTSLNSPHSGLHTINGEGMEESQSPMKTDLLLVNHKPSPQIIPSMSVSIYPSSAEVLKACRNLGKNGLSNSSILLDKCPPPRPPSSPYPPLPKDKLNPPTPSIYLENKRDAFFPPLHQFCTNPNNPVTVIRGLAGALKLDLGLFSTKTLVEANNEHMVEVRTQLLQPADENWDPTGTKKIWHCESNRSHTTIAKYAQYQASSFQESLREENEKRSHHKDHSDSESTSSDNSGRRRKGPFKTIKFGTNIDLSDDKKWKLQLHELTKLPAFVRVVSAGNLLSHVGHTILGMNTVQLYMKVPGSRTPGHQENNNFCSVNINIGPGDCEWFVVPEGYWGVLNDFCEKNNLNFLMGSWWPNLEDLYEANVPVYRFIQRPGDLVWINAGTVHWVQAIGWCNNIAWNVGPLTACQYKLAVERYEWNKLQSVKSIVPMVHLSWNMARNIKVSDPKLFEMIKYCLLRTLKQCQTLREALIAAGKEIIWHGRTKEEPAHYCSICEVEVFDLLFVTNESNSRKTYIVHCQDCARKTSGNLENFVVLEQYKMEDLMQVYDQFTLAPPLPSASS

SEQ ID NO: 207841 - DNA, 4206 bp, Artificial Sequence
  derived and/or modified sequence
atgaaatcctgcggtgtgtccctggcaaccgccgcggcagctgcagctgcctttggggatgaggagaaaaagatggccgcagggaaggcttcaggtgagagcgaagaggcttcaccatcactgaccgcagaagagcgagaggcccttggaggcctggacagcagactgttcgggttcgtccggttccatgaggacggcgcccgcactaaagcgctgctgggaaaagcggtgcggtgttacgaaagccttatcctcaaagccgagggtaaggtcgagagtgactttttttgccagttagggcattttaaccttttgctggaagattatccaaaagctctgtccgcataccagcgttattattctctgcaatctgattactggaagaatgctgcgtttctgtatggtctaggactcgtctatttccactataatgccttccaatgggctattaaggcctttcaagaagtgctgtatgtggatccaagtttctgccgggccaaagagatccacctccgcctcggtctgatgtttaaggtaaataccgattacgaatctagcttgaaacacttccagctggccctggtcgattgcaatccttgcactctttccaacgccgagatccagtttcacatagctcacctctacgaaacacagcggaagtatcatagcgcgaaggaggcgtacgaacagcttctccagaccgagaatctgtccgcgcaggtcaaagccaccgttctgcaacagttggggtggatgcatcacaccgttgatctactcggcgataaagcaactaaggaaagttatgccatccaatatttacagaagtcattagaggcagacccgaactccggccagtcatggtactttctaggccgctgttattcatctattggaaaggtccaagacgcttttatctcctacaggcagtccattgacaaatcagaggcaagcgcggacacctggtgctcaatcggcgttctttaccagcagcagaatcagcctatggatgcactccaggcttacatttgcgccgtgcaactggatcatggacacgccgccgcatggatggatttgggcactctctatgagagttgcaatcagccgcaggacgccattaagtgttacttaaatgccactcggtccaaatcgtgctccaacacatccgcacttgcggcaagaattaaatacctccaggcccagctttgcaatctaccccagggtagcttgcagaacaaaaccaaacttctgccaagtatcgaagaagcatggtccttgcctattcctgccgaactgacttcccggcaaggtgcgatgaacacggcccagcagaacacaagcgacaattggtctggaggacacgccgtctcacaccctcctgtgcagcagcaagcccactcatggtgtctaacaccacagaagttgcaacacctcgaacagctgcgggcaaacaggaataatttgaatccggctcagaagctgatgttagaacagttggagtcacagtttgtgctcatgcagcagcaccagatgcggccaacaggcgttgcgcaggtaaggtcaactggaattccaaacgggcctacagctgattccagtttgccaacaaactccgtgagtggacagcagccccagctggcgctgacccgagtgccttctgtgtctcagccgggtgtccgtcccgcctgtcccgggcagccattggcgaatggtcccttttcagccggccatgtgccgtgcagtacatcgcgcacgttaggaagcaccgacaccattttaataggcaacaatcatatcaccgggtcagggtccaatggaaacgtcccatacctacagcgaaatgccttaactctccctcacaaccgtactaatctgacaagctctgctgaagagccttggaaaaatcagctgtctaattctacacaaggcctgcataaaggtcaaagctctcactcggctggtcctaacggggaaaggcctctcagttctaccggtccatcccaacacctgcaggcagccgggagcgggattcagaatcagaatggacaccctactctcccttccaactccgttactcaaggtgccgccctcaaccacctgagcagccatacagcgacgtccgggggacagcaagggatcactctcaccaaagagagtaagccttccggcaacattcttacagttcccgaaacatccaggcacacgggtgagactcctaacagtacagcaagcgtcgaggggctgccaaatcacgtccaccagatgaccgccgatgccgtctgctcacccagccacggggattccaaatctccggggttactaagctctgataacccgcaactcagtgcactcctaatgggcaaagccaataataacgtagggaccgggacttgcgacaaggttaacaatatccacccggctgtgcacaccaaaacagataactcggtagcttccagccccagctccgctatcagcacggcgactccctccccaaagtctaccgagcagactaccactaactcagtcaccagtttaaacagcccccattcaggtctgcataccatcaacggtgagggcatggaggaatctcagtcccctatgaagacagacctcctgctggttaatcacaaacctagcccacagattatcccgtccatgagtgtgtccatttacccctctagcgcagaggttcttaaagcatgcaggaatctgggtaagaacggtctttcaaatagctccattcttttggataagtgtcccccacctaggcccccaagtagtccctaccctccgttgcccaaggacaagctcaaccctccaactccatccatctacttggaaaacaaacgcgacgcattttttccacctctacatcagttttgcactaatccaaacaacccagtgacagtgattagaggtctggctggagcacttaaacttgatctcgggcttttttctactaaaaccctcgtagaggccaataatgagcacatggtggaggtgcgcacacaactgcttcaaccagctgacgagaactgggaccctaccgggaccaagaaaatttggcattgcgaaagcaacagaagccatacaactattgccaaatacgctcaataccaagcgagttccttccaggaatcactgagagaagagaatgagaaacggtcccaccacaaagatcacagcgacagcgagagtacctcctccgacaacagcggacgcagacgaaagggcccctttaaaactatcaagtttggcacaaatattgacttatctgacgacaagaagtggaagctccaattgcatgagcttacaaaactgcctgcctttgtgcgggtagtgtccgctggaaatcttctgtcacacgtggggcacactattcttggcatgaatacagtgcagttgtacatgaaagtgcctggaagccgcacacctggtcatcaggaaaataacaacttctgttcagttaatattaacattggccccggcgactgcgagtggtttgtagtccctgagggatattggggcgtcctgaacgacttttgtgagaaaaataacctcaatttcctgatggggtcttggtggcccaatctcgaggatctctacgaagcaaacgtgcccgtgtatcgttttattcagaggccaggcgacttagtttggatcaacgctggaaccgtccattgggtccaggctatcggttggtgcaacaatatagcgtggaacgtgggacccctcactgcctgtcaatacaaactagcagtcgaacgctacgaatggaataagctgcagtcagtaaagtctatcgttccaatggtccacctgagttggaatatggcgcggaacatcaaggtctctgatcccaagctattcgagatgatcaaatattgtttgctgcgcaccctgaagcagtgccaaacactgcgcgaggcccttatcgctgctggaaaagaaatcatttggcacgggagaactaaggaagagccggcccattattgtagtatctgcgaagttgaggtcttcgatctgctgtttgtgacaaacgagagtaacagtagaaaaacctacatcgttcactgccaggattgcgcccggaagacatctgggaatctggaaaactttgtggtcttggagcaatacaagatggaagacttaatgcaagtatatgaccaattcactctggcacctccactgccctcagcgtcctcttag

SEQ ID NO: 207842 - DNA, 4206 bp, Artificial Sequence
  derived and/or modified sequence
atgaagagctgtggggtgtccctggccacagctgctgctgctgctgctgcctttggagatgaggagaagaagatggctgctgggaaggccagcggggagagcgaggaggccagccccagcctgacagctgaggagcgggaggccctgggcggcctggacagccggctgtttggatttgtgcgcttccatgaagatggagcccggaccaaggccctgctgggcaaggctgtgcgctgctatgagagcctcatcctgaaggccgagggcaaggtggagagtgacttcttctgccagctgggccacttcaacctgctgctggaggactaccccaaggccctgagcgcctaccagcgctactacagcctgcagagcgactactggaagaatgctgccttcctgtatggcctgggcctggtgtacttccactacaatgccttccagtgggccatcaaggccttccaggaggtgctgtatgtggaccccagcttctgccgggccaaggagatccacctgcggctgggcctgatgttcaaggtgaacacagattatgagagcagcctgaagcacttccagctggccctggtggactgcaacccctgcaccctgagcaatgctgagatccagttccacatcgcccacctgtatgagacccagaggaagtaccacagcgccaaggaggcctatgagcagctgctgcagacagagaacctgagcgcccaggtgaaggccaccgtgctgcagcagctgggctggatgcaccacacagtggacctgctgggggacaaggccaccaaggagagctatgccatccagtacctgcagaagagcctggaggccgaccccaacagcggccagagctggtacttcctgggccgctgctacagcagcatcggcaaggtgcaggatgccttcatctcctaccggcagagcattgacaagtctgaggccagcgctgacacctggtgcagcattggagtgctgtaccagcagcagaaccagcccatggatgccctgcaggcctacatctgtgctgtgcagctggaccacggccacgccgccgcctggatggacctgggcaccctgtatgagagctgcaaccagccccaggatgccatcaagtgctacctgaatgccaccaggagcaagagctgcagcaacaccagcgccctggccgcccgcatcaagtacctgcaggcccagctgtgcaacctgccccagggcagcctgcagaacaagaccaagctgctgcccagcattgaggaggcctggagcctgcccatcccagctgagctgaccagccggcagggcgccatgaacacagcccagcagaacaccagtgacaactggagcggcggccatgctgtgagccacccccctgtgcagcagcaggcccacagctggtgcctgaccccccagaagctgcagcacctggagcagctgcgggccaacagaaacaacctgaacccagcccagaagctgatgctggagcagctggagagccagtttgtgctgatgcagcagcaccagatgaggcccactggagtggcccaggtgcgcagcacaggcatccccaacggccccacagctgacagcagcctgcccaccaacagcgtgtctggccagcagccccagctggccctgaccagggtgcccagcgtgtcccagcccggggtgcggcctgcctgccccggccagcccctggccaacggccccttctctgctggccacgtgccctgcagcaccagcaggaccctgggcagcacagacaccatcctgattggcaacaaccacatcactggaagtggcagcaatggaaatgtgccctacctgcagagaaatgccctgaccctgccccacaacagaaccaacctgaccagcagcgctgaggagccctggaagaaccagctgagcaacagcacccagggcctgcacaagggccagagcagccacagcgctggccccaatggagagcggcccctgagcagcacaggccccagccagcacctgcaggccgccggcagcggcatccagaaccagaatggccaccccaccctgcccagcaacagcgtgacccagggcgccgccctgaaccacctgagcagccacacagccaccagcggcggccagcagggcatcaccctgaccaaggagagcaagcccagcggcaacatcctgactgtgcctgagaccagccgccacactggagagacccccaacagcacagcctctgtggagggcctgcccaaccacgtgcaccagatgacagcagatgctgtgtgcagccccagccacggggacagcaagagccctggcctgctgagcagtgacaacccccagctgagcgccctgctgatgggcaaggccaacaacaacgtgggcaccggcacctgtgacaaggtgaacaacatccaccctgctgtgcacaccaagacagacaacagcgtggccagcagccccagcagcgccatcagcacagccacccccagccccaagagcacagagcagaccaccaccaacagcgtgaccagcctgaacagcccccacagcggcctgcacaccatcaatggagagggcatggaggagagccagagccccatgaagacagacctgctgctggtgaaccacaagcccagcccccagatcatccccagcatgtctgtgtccatctaccccagcagcgctgaggtgctgaaggcctgcaggaacctgggcaagaatggcctgagcaacagcagcatcctgctggacaagtgccccccacccaggcctcccagcagcccctacccacccctgcccaaggacaagctgaacccccccacccccagcatctacctggagaacaagagagatgccttcttcccccccctgcaccagttctgcaccaaccccaacaaccctgtgaccgtcatccggggcctggccggggccctgaagctggacctgggcctcttcagcaccaagaccctggtggaggccaacaatgagcacatggtggaggtgaggacccagctgctgcagcctgcagatgagaactgggaccccaccggcaccaagaagatctggcactgtgagagcaacagaagccacaccaccatcgccaagtatgcccagtaccaggccagcagcttccaggagagcctgcgggaggagaatgagaagaggagccaccacaaggaccacagcgacagcgagagcaccagcagtgacaacagcggcagaagaaggaagggccccttcaagaccatcaagtttggcaccaacatcgacctgagtgatgacaagaagtggaagctgcagctgcacgagctgaccaagctgcctgcctttgtgcgggtggtgtctgctggcaacctgctgagccacgtgggccacaccatcctgggcatgaacacagtgcagctgtacatgaaggtgcccggcagcaggaccccaggccaccaggagaacaacaacttctgcagcgtgaacatcaacatcggccctggggactgtgagtggtttgtggtgcctgagggctactggggcgtgctgaatgacttctgtgagaagaacaacctgaacttcctgatgggctcctggtggcccaacctggaggacctgtatgaggccaacgtgcctgtgtaccgcttcatccagaggcctggggacctggtgtggatcaatgccggcaccgtgcactgggtgcaggccatcggctggtgcaacaacatcgcctggaatgtgggccccctgacagcctgccagtacaagctggccgtggagagatatgagtggaacaagctgcagagcgtgaagagcatcgtgcccatggtgcacctgtcctggaacatggccaggaacatcaaggtgtctgaccccaagctgtttgagatgatcaagtactgcctgctgcggaccctgaagcagtgccagaccctgcgggaggccctgattgctgctgggaaggagatcatctggcacggccgcaccaaggaggagcccgcccactactgcagcatctgtgaggtggaggtgtttgacctgctgtttgtgaccaatgaaagcaacagcaggaagacctacatcgtgcactgccaggactgtgccaggaagaccagcggcaacctggagaactttgtggtgctggagcagtacaagatggaggacctgatgcaggtgtatgaccagttcaccctggccccacccctgcccagcgccagcagctag

SEQ ID NO: 207843 - DNA, 5438 bp, Artificial Sequence
  derived and/or modified sequence
ggggggtgtcggcgttggagttgtgaattcgctgcgtttccatgaaatcctgcggagtgtcgctcgctaccgccgccgctgccgccgccgctttcggtgatgaggaaaagaaaatggcggcgggaaaagcgagcggcgagagcgaggaggcgtcccccagcctgacagccgaggagagggaggcgctcggcggactggacagccgcctctttgggttcgtgagatttcatgaagatggcgccaggacgaaggccctactgggcaaggctgttcgctgctatgaatctctaatcttaaaagctgaaggaaaagtggagtctgatttcttttgtcaattaggtcacttcaacctcttattggaagattatccaaaagcattatctgcataccagaggtactacagtttacagtctgactactggaagaatgctgcctttttatatggtcttggtttggtctacttccattataatgcatttcagtgggcaattaaagcatttcaggaggtgctttatgttgatcccagcttttgtcgagccaaggaaattcatttacgacttgggcttatgttcaaagtgaacacagactatgagtctagtttaaagcattttcagttagctttggttgactgtaatccctgcactttgtccaatgctgaaattcaatttcacattgcccacttatatgaaacccagaggaaatatcattctgcaaaagaagcttatgaacaacttttgcagacagagaatctttctgcacaagtaaaagcaactgtcttacaacagttaggttggatgcatcacactgtagatctcctgggagataaagccaccaaggaaagctatgctattcagtatctccaaaagtccttggaagcagatcctaattctggccagtcctggtatttcctcggaaggtgctattcaagtattgggaaagttcaggatgcctttatatcttacaggcagtctattgataaatcagaagcaagtgcagatacatggtgttcaataggtgtgctatatcagcagcaaaatcagcccatggatgctttacaggcctatatttgtgctgtacaattggaccatggccatgctgcagcctggatggacctaggcactctctatgaatcctgcaaccagcctcaggatgccattaaatgctacttaaatgcaactagaagcaaaagttgtagtaatacctctgcacttgcagcacgaattaagtatttacaggctcagttgtgtaaccttccacaaggtagtctacagaataaaactaaattacttcctagtattgaggaggcgtggagcctaccaattcccgcagagcttacctccaggcagggtgccatgaacacagcacagcagaatacttctgacaattggagtggtggacatgctgtgtcacatcctccagtacagcaacaagctcattcatggtgtttgacaccacagaaattacagcatttggaacagctccgcgcaaatagaaataatttaaatccagcacagaaactgatgctggaacagctggaaagtcagtttgtcttaatgcaacaacaccaaatgagaccaacaggagttgcacaggtacgatctactggaattcctaatgggccaacagctgactcatcactgcctacaaactcagtctctggccagcagccacagcttgctctgaccagagtgcctagcgtctctcagcctggagtccgtcctgcctgccctgggcagcctttggccaatggacccttttctgcaggccatgttccctgtagcacatcaagaacgctgggaagtacagacactattttgataggcaataatcatataacaggaagtggaagtaatggaaacgtgccttacctgcagcgaaacgcactcactctacctcataaccgcacaaacctgaccagcagcgcagaggagccgtggaaaaaccaactatctaactccactcaggggcttcacaaaggtcagagttcacattcggcaggtcctaatggtgaacgacctctctcttccactgggccttcccagcatctccaggcagctggctctggtattcagaatcagaacggacatcccaccctgcctagcaattcagtaacacagggggctgctctcaatcacctctcctctcacactgctacctcaggtggacaacaaggcattaccttaaccaaagagagcaagccttcaggaaacatattgacggtgcctgaaacaagcaggcacactggagagacacctaacagcactgccagtgtcgagggacttcctaatcatgtccatcagatgacggcagatgctgtttgcagtcctagccatggagattctaagtcaccaggtttactaagttcagacaatcctcagctctctgccttgttgatgggaaaagccaataacaatgtgggtactggaacctgtgacaaagtcaataacatccacccagctgttcatacaaagactgataactctgttgcctcttcaccatcttcagccatttcaacagcaacaccttctccaaaatccactgagcagacaaccacaaacagtgttaccagccttaacagccctcacagtgggctacacacaattaatggagaagggatggaagaatctcagagccccatgaaaacagatctgcttctggttaaccacaaacctagtccacagatcataccatcaatgtctgtgtccatataccccagctcagcagaagttctgaaggcatgcaggaatctaggtaaaaatggcttatctaacagtagcattttgttggataaatgtccacctccaagaccaccatcttcaccataccctcccttgccaaaggacaagttgaatccacctacacctagtatttacttggaaaataaacgtgatgctttctttcctccattacatcaattttgtacaaatccgaacaaccctgttacagtaatacgtggccttgctggagctcttaagttagacctgggacttttctctactaaaactttggtggaagctaacaatgaacatatggtagaagtgaggacacagttgttgcagccagcagatgaaaactgggatcccactggaacaaagaaaatctggcattgtgaaagtaatagatctcatactacaattgctaaatatgcacagtaccaggcctcctcattccaggaatcattgagagaagaaaatgaaaaaagaagtcatcataaagaccactcagatagtgaatctacatcgtcagataattctgggaggaggaggaaaggaccctttaaaaccataaagtttgggaccaatattgacctatctgatgacaaaaagtggaagttgcagctacatgagctgactaaacttcctgcttttgtgcgtgtcgtatcagcaggaaatcttctaagccatgttggtcataccatattgggcatgaacacagttcaactatacatgaaagttccagggagcagaacaccaggtcatcaggaaaataacaacttctgttcagttaacataaatattggcccaggtgactgtgaatggtttgttgttcctgaaggttactggggtgttctgaatgacttctgtgaaaaaaataatttgaatttcctaatgggttcttggtggcccaatcttgaagatctttatgaagcaaatgttccagtgtataggtttattcagcgacctggagatttggtctggataaatgcaggcactgttcattgggttcaggctattggctggtgcaacaacattgcttggaatgttggtccacttacagcctgccagtataaattggcagtggaacggtacgaatggaacaaattgcaaagtgtgaagtcaatagtacccatggttcatctttcctggaatatggcacgaaatatcaaggtctcagatccaaagctttttgaaatgattaagtattgtcttctaagaactctgaagcaatgtcagacattgagggaagctctcattgctgcaggaaaagagattatatggcatgggcggacaaaagaagaaccagctcattactgtagcatttgtgaagtggaggtttttgatctgctttttgtcactaatgagagtaattcacgaaagacctacatagtacattgccaagattgtgcacgaaaaacaagcggaaacttggaaaactttgtggtgctagaacagtacaaaatggaggacctgatgcaagtctatgaccaatttacattagctcctccattaccatccgcctcatcttgatattgttccatggacattaaatgagaccttttctgctattcaggaaataacccagttctgcaccactggtttttgtagctatctcgtaaggctgctggctgaaaactgtgtctatgcaaccttccaagtgcggagtgtcaaccaactggacgggagagagtactgctcctactccaggactctcacaaagctgatgagctgtacttcagaaaaaaataataatttccatgttttgtatatatctgacaaaactggcaacatcttacagactactgacttgaagacaacctcttttatatttctctatttctgggctgatgaatttgttttcatctgtcttttcccccttcagaattttccttggaaaaaaaatactagcctagctggtcatttctttgtaaggtagttagcaattttaagtctttctttggtcaacttttttttaatgtgaaaagttaggtaagacacttttttactgcttttatgtttttctgtcttgttttgagaccatgatggttacacttttggttcctaaataaaatttaaaaaattaacagccaagtcacaaaggtaatggattgcacatagactaaggaataaacttcagatttgtgatttttgtttctaatcttgatgtaaatttacactatttataaatacatatttattgcttgaaaatatttgtgaatggaatgctgttattttttccagatttacctgccattgaaattttaaggagttctgtaatttcaaacactactcctattacattttctatgtgtaaataaaactgcttagcattgtacagaaacttttattaaaattgtttaatgtttaaagagttttctattgtttgagttttaaaaaagactttatgtacagtgcccagtttttgttcatttttgaaatctgattatatatattttatatatacttatgtatgtatatataatatatatagaaatctggatatatatgtataaatctttagaacttaaatttttctcgttttaagtttcacatctatggtagatttttgaggtgtctactgtaaagtattgcttacaaaaagtatgattatttttaaagaaatatatatggtatgtatcctcaagacctaaaatgtcagactggtttattgttaagttgcaattactgcaatgacagaccaataaacaattgctgccaaaa

SEQ ID NO: 207844 - DNA, 4206 bp, Artificial Sequence
  derived and/or modified sequence
atgaagagctgcggcgtgagcctggccaccgccgccgccgccgccgccgccttcggtgatgaggagaagaaaatggcggcaggcaaggccagcggggaaagcgaagaggcttcgccttcactgaccgccgaagagagagaagccctgggaggcttggatagccggctgttcggatttgtgaggtttcacgaagacggcgcccgcaccaaggccctgcttgggaaggctgtaagatgttatgagagtctgatccttaaggccgaaggtaaagttgagagcgactttttctgccaactgggtcacttcaatctgttgctagaggattatccaaaagccctctctgcctatcagcggtattactcactgcaaagtgactactggaaaaatgcggcctttctgtacgggctaggccttgtctacttccactacaacgccttccaatgggctatcaaggcgtttcaagaagtcctatacgtagatccctcattttgtagggctaaagaaatacacctgcggctcggcctcatgtttaaggtgaacaccgattacgagagtagtcttaagcattttcagctggccctggtcgactgcaacccctgtacattgagtaatgcggaaattcagtttcacattgctcatttatacgaaacacaacgtaaatatcactcggcaaaggaagcatatgagcagttactgcagactgagaacctgagcgcgcaggtcaaagctactgttctgcaacagctgggatggatgcaccacacagtcgatctgctgggagacaaagcaaccaaagaatcctatgccattcagtatcttcagaagagcctggaggccgacccaaactctggccagtcttggtacttcctcggtcgatgttattcctcaataggcaaagtgcaggacgcttttatcagttacaggcagtctattgataagagtgaagcatccgctgatacctggtgttcaattggagtgctttaccagcagcagaaccagcccatggatgctctccaggcgtatatttgcgcagtacaactggaccacggccacgccgccgcgtggatggatcttggcacgctatatgaaagctgtaaccaaccacaggatgccataaaatgttacttaaacgccaccagatccaagtcatgctccaatacaagtgcattggcagcacggatcaagtacctgcaagcgcaactgtgtaatctgcctcagggatccctgcaaaacaagactaagctgctaccatctatagaagaggcctggtccctgcctataccagctgagttgaccagccgccaaggtgccatgaacacagcccaacaaaacacctcagacaactggagtggaggccatgcagtgtcccacccccctgttcaacagcaggcccacagttggtgtctgacaccacagaaactacagcacctcgaacagctccgtgctaataggaataatctaaacccggcgcagaagctgatgttggagcaattggagtctcaattcgtcctgatgcagcagcaccagatgcgccccacaggggtagcacaggttaggagcacaggtattcccaatggacccaccgcagacagctcacttcctaccaattccgtgtcaggccaacagcctcagctggccttaactcgagtaccctccgtcagtcagccgggtgtgagaccagcatgcccgggccagcctctggctaatggccccttctctgccggccatgtgccatgctctacaagccgcaccctcggcagcactgataccatactgataggtaacaatcacattacaggttccggcagcaatggtaacgttccctacctacagagaaatgccctcactttgccacataacaggactaatctgacgtctagcgctgaggaaccatggaaaaatcaattgagcaattcaactcaaggcctgcataaggggcaatcatcccatagcgccggcccaaatggcgaaaggccattgtcgtctacaggaccttcccagcatctgcaagcagctgggtccgggatccagaaccaaaatgggcatccaactttaccttccaatagcgtgacacagggcgccgcgctcaatcatttgtcatcccataccgctacaagtggaggccaacagggaatcacactcaccaaagaaagtaaaccatccggcaatatcctcaccgttcccgaaacgagccgacacactggggagactccaaatagtactgcaagcgtggaaggcttgcccaaccatgtgcaccagatgactgctgacgccgtctgctctcccagccacggtgacagtaaaagccctggactgttgagtagcgacaaccctcagctttcagctttattgatgggaaaagcaaataacaatgtcggaaccggtacttgtgacaaagtgaacaacattcatccggctgtgcacactaaaacggacaattctgtggcctccagcccttctagcgcaatatcaaccgccaccccctctcctaagagcaccgagcagaccactacaaatagcgtgaccagcctcaatagcccgcactccggactgcacacgatcaatggagagggcatggaggagtctcaaagtccgatgaagactgacctattgcttgtgaatcacaagcctagccctcagatcatcccttctatgtccgtgagcatttatccaagttccgcagaagtactaaaggcatgtagaaatctgggcaaaaatggccttagcaacagctctattctcctagacaaatgccctcccccacggcctccctctagcccttacccaccacttcctaaggataagctcaatcccccgacaccgtctatctacctcgagaacaaacgcgacgctttcttccctcccctgcatcaattctgcacaaaccctaacaatccagtcacggtgattcgggggttggccggagccctgaaactggatctgggtctgttcagtacaaagactctggttgaggcaaataatgagcacatggtcgaagtacgtacccagctgctccagcccgccgatgaaaactgggatcccactggaacaaaaaagatctggcattgcgaaagtaatcgaagccacactacaatagccaaatacgcccagtatcaagccagcagtttccaggagagcttgcgcgaagagaacgaaaagcgcagccatcacaaggaccattccgactcagaatccactagtagcgacaattcagggcgcagaagaaagggaccattcaaaacaattaagtttggaacgaatatcgaccttagtgatgacaagaaatggaaactacagttacacgaactgacgaaacttccagcgttcgtgcgggtggtttctgctggaaatttgctatcccacgtggggcacacgatattgggaatgaacacagtgcagttatatatgaaggtgcccggatctcgcacacccggccaccaagaaaataacaacttttgttccgtgaacatcaatatcggcccaggtgattgtgagtggtttgtggtccctgaggggtactggggagtgcttaacgatttctgcgaaaagaataacctgaattttctcatgggatcttggtggccaaatttggaggacctgtatgaggcaaacgtgccggtgtacaggtttatccagagaccaggagaccttgtgtggataaacgcaggcaccgtgcactgggtgcaagcaattggctggtgtaataatatcgcatggaacgttgggcccctgaccgcctgtcagtataagctggcggtcgagcgttatgaatggaacaagctgcagagcgtcaaatctatcgttccaatggttcaccttagctggaatatggctcgtaacatcaaggtttctgatcccaaactatttgagatgataaaatattgtcttctcagaacgctgaaacaatgtcagacattgagagaggccttgatcgcggccggcaaggagatcatctggcacgggaggacgaaggaagagcctgcgcactattgttcaatttgcgaggtcgaggtttttgacctgctgtttgtaactaacgagtcgaatagtcggaaaacctatatcgttcactgtcaagactgcgcacggaagacaagcggaaacctggagaattttgtggtcctggaacagtataagatggaggatctgatgcaagtgtacgaccaattcacgctcgccccgccactgccgtcggccagtagctag

SEQ ID NO: 207845 - DNA, 4206 bp, Artificial Sequence
  derived and/or modified sequence
atgaaatcctgtggcgtgtccctcgccactgcagccgcagccgcagcagccttcggagacgaagaaaagaaaatggctgctggcaaggcttcaggggaaagcgaggaggcctctccctccctgactgctgaggagcgcgaggctctgggcggtttggacagtcggttgttcggtttcgtccggtttcatgaggatggagctagaaccaaagcactgctgggaaaggctgtccgctgctacgagtccctcatccttaaagcagaggggaaggttgagtctgacttcttttgccagctgggacacttcaatctgctcctcgaagattaccccaaagccctctctgcttaccaacggtattattccctacagtcggactactggaagaatgctgcattcctctatggcctaggacttgtatacttccactataacgcttttcagtgggcaattaaggcgtttcaggaggtgttatatgtagatccgagcttttgtcgagccaaagaaatccatctgcgattgggactgatgtttaaggttaataccgattatgagtcgagcctgaagcatttccagctggcactggtggattgtaatccttgtaccctgtccaatgctgagattcagtttcacatcgcccatctatatgagacccagcgaaaatatcattctgctaaggaagcctatgaacagctgcttcagaccgaaaatcttagtgctcaagttaaagccacggtgcttcagcagctagggtggatgcaccataccgtggacctgctgggcgataaagccacgaaagagtcatacgctatccaatacctgcagaaaagcttggaagcggacccgaattcagggcagtcttggtattttctcggacgttgttacagttccattggaaaagtgcaggacgccttcatctcctatcgacagagtattgacaagtctgaggcctcagccgatacatggtgctcaattggggtgctgtaccagcagcagaaccagccgatggacgctctccaggcctatatctgtgcagtccagcttgatcacggacacgcagccgcatggatggacctgggcacactttacgaatcctgcaaccaaccgcaggatgcgataaagtgctacttgaacgcgactcgcagtaaaagctgtagtaacacttcggccttggccgcaaggatcaagtatttgcaagcccaactgtgtaacctccctcaggggagtctgcagaacaaaaccaagctgctgccctcaatcgaagaggcctggtccctgccaattcccgctgaactgacaagcaggcagggggctatgaatacagctcagcagaacacatccgacaattggtctggaggccatgccgtgagtcaccccccagtgcagcagcaggctcactcatggtgcctcaccccacagaagctgcagcatttagagcagctgagagccaataggaataacctgaatccggctcaaaagttgatgctggagcagcttgagagccaattcgttctgatgcagcaacaccagatgaggcctaccggcgttgctcaagtgaggagtaccgggatccccaacggtcccacagccgactcatcattgccaacaaactcagtgagtggacagcagccgcaactagctctcaccagagttccttccgtctctcagcccggagtccgccctgcctgcccgggacagccactggccaacggaccctttagcgccggacacgtaccttgttctactagcagaactttaggatctactgataccatactgataggaaataatcacattacggggtccgggtccaacggcaatgtgccctatttgcagcgcaacgccctcacactgccccacaatagaactaatttgacttccagcgccgaggagccttggaagaatcagctgagcaattctacccaggggctgcataaaggacagtcaagccacagcgcaggcccaaatggcgaacgtcccctctccagcactggcccaagtcagcatttacaagctgccggtagtggcatacagaatcagaacgggcatcccactctgcctagcaattctgtgacgcagggcgctgccctgaatcacctctcctcccacaccgcgactagtggagggcagcagggaatcacgctcaccaaagaatcaaagccatcagggaatatcttgacggtgcccgaaacctctagacacacgggggagactccaaattccacagccagtgtagaaggcctgcccaatcatgtgcatcaaatgacggccgacgcagtgtgtagcccttcccacggggattctaagtcccccggtctgctatcatcagacaatccgcagctctcagctctgttgatgggtaaggccaataacaacgtcgggactggaacttgcgataaggttaataatattcaccctgccgtgcatactaagacagacaacagcgtcgcaagctctccgagctccgcaatttctactgccacaccctcgccaaagagtactgaacagacaacaactaattctgtgacttctttaaacagccctcactcagggctgcacaccataaacggcgagggaatggaggagtctcagtcccccatgaagaccgacttattactcgtgaaccataagccctctccacagatcattccgagcatgtctgtgagcatatacccatcttcggctgaagtcctgaaagcgtgccgcaatttgggaaagaacggcctatccaactcttcaatcttgctcgataaatgtccacccccaagacctccatcctcaccttatccacctctaccaaaagacaaactgaatcctccgactccgtcaatctatttggagaacaaacgggacgcgtttttccccccacttcaccagttttgtactaacccaaacaatcccgtcacagtgattcggggtttggcaggggctctgaaactggatttggggctcttctcaaccaagacgctcgtcgaggccaataacgagcatatggtggaggtacgcacacagctcctgcagcccgctgacgaaaattgggatcctacagggaccaaaaagatctggcactgtgagtctaatcggtctcatactaccatcgccaaatatgcgcagtatcaggcatcaagctttcaggagtccctgagagaggagaatgaaaaacggtctcaccacaaagatcactctgattcagaatccacaagttccgataactccggtcggagacgaaaggggccatttaaaacaatcaagttcggtacaaacatcgacttgtcagacgacaaaaaatggaagcttcagctacacgagctgacaaaacttcctgcatttgtgcgggtggtcagcgcgggtaacctgctctcccatgtagggcataccatcttgggcatgaacaccgtgcagctgtatatgaaagtccctgggagcaggactcctggtcaccaggagaacaataacttctgctcagtgaatataaatatcgggcctggagactgtgagtggttcgtagttcccgagggctactggggggtactgaacgacttttgcgagaagaataatttgaactttttaatgggttcatggtggccaaacttggaagatctgtatgaggctaatgttcccgtgtatcgcttcatccaacgccctggcgacttggtgtggataaacgccggtaccgttcattgggtgcaggccattggctggtgcaataatatcgcctggaatgtcggcccattgaccgcatgtcaatataagctggcagtggagcgctatgagtggaataagctacagtcggtgaaaagcattgtccctatggtgcatttatcttggaacatggctagaaacattaaagtcagcgacccaaaattattcgagatgattaagtattgtcttttgcgcactttgaaacagtgccagacattgagggaggctctgatcgcggctggcaaagaaatcatctggcacgggcgtacgaaggaggaacccgctcactactgcagtatctgcgaggtagaggttttcgatctgttgttcgtgaccaacgagtctaactctcggaagacatacatcgtacattgtcaggactgcgccaggaagacctctggcaatctcgagaatttcgtggttttggaacagtataagatggaagatttgatgcaggtctatgaccaatttactctggccccaccactgccgtccgcatcgagttag

SEQ ID NO: 207846 - DNA, 4206 bp, Artificial Sequence
  derived and/or modified sequence
atgaagagctgcggcgtgagcctggccaccgccgccgccgccgccgccgccttcggcgacgaggagaagaagatggccgccggcaaggccagcggcgagagcgaggaggccagccccagcctgaccgccgaggagagagaggccctgggcggcctggacagcagactgttcggcttcgtgagattccacgaggacggcgccagaaccaaggccctgctgggcaaggccgtgagatgctacgagagcctgatcctgaaggccgagggcaaggtggagagcgacttcttctgccagctgggccacttcaacctgctgctggaggactaccccaaggccctgagcgcctaccagagatactacagcctgcagagcgactactggaagaacgccgccttcctgtacggcctgggcctggtgtacttccactacaacgccttccagtgggccatcaaggccttccaggaggtgctgtacgtggaccccagcttctgcagagccaaggagatccacctgagactgggcctgatgttcaaggtgaacaccgactacgagagcagcctgaagcacttccagctggccctggtggactgcaacccctgcaccctgagcaacgccgagatccagttccacatcgcccacctgtacgagacccagagaaagtaccacagcgccaaggaggcctacgagcagctgctgcagaccgagaacctgagcgcccaggtgaaggccaccgtgctgcagcagctgggctggatgcaccacaccgtggacctgctgggcgacaaggccaccaaggagagctacgccatccagtacctgcagaagagcctggaggccgaccccaacagcggccagagctggtacttcctgggcagatgctacagcagcatcggcaaggtgcaggacgccttcatcagctacagacagagcatcgacaagagcgaggccagcgccgacacctggtgcagcatcggcgtgctgtaccagcagcagaaccagcccatggacgccctgcaggcctacatctgcgccgtgcagctggaccacggccacgccgccgcctggatggacctgggcaccctgtacgagagctgcaaccagccccaggacgccatcaagtgctacctgaacgccaccagaagcaagagctgcagcaacaccagcgccctggccgccagaatcaagtacctgcaggcccagctgtgcaacctgccccagggcagcctgcagaacaagaccaagctgctgcccagcatcgaggaggcctggagcctgcccatccccgccgagctgaccagcagacagggcgccatgaacaccgcccagcagaacaccagcgacaactggagcggcggccacgccgtgagccacccccccgtgcagcagcaggcccacagctggtgcctgaccccccagaagctgcagcacctggagcagctgagagccaacagaaacaacctgaaccccgcccagaagctgatgctggagcagctggagagccagttcgtgctgatgcagcagcaccagatgagacccaccggcgtggcccaggtgagaagcaccggcatccccaacggccccaccgccgacagcagcctgcccaccaacagcgtgagcggccagcagccccagctggccctgaccagagtgcccagcgtgagccagcccggcgtgagacccgcctgccccggccagcccctggccaacggccccttcagcgccggccacgtgccctgcagcaccagcagaaccctgggcagcaccgacaccatcctgatcggcaacaaccacatcaccggcagcggcagcaacggcaacgtgccctacctgcagagaaacgccctgaccctgccccacaacagaaccaacctgaccagcagcgccgaggagccctggaagaaccagctgagcaacagcacccagggcctgcacaagggccagagcagccacagcgccggccccaacggcgagagacccctgagcagcaccggccccagccagcacctgcaggccgccggcagcggcatccagaaccagaacggccaccccaccctgcccagcaacagcgtgacccagggcgccgccctgaaccacctgagcagccacaccgccaccagcggcggccagcagggcatcaccctgaccaaggagagcaagcccagcggcaacatcctgaccgtgcccgagaccagcagacacaccggcgagacccccaacagcaccgccagcgtggagggcctgcccaaccacgtgcaccagatgaccgccgacgccgtgtgcagccccagccacggcgacagcaagagccccggcctgctgagcagcgacaacccccagctgagcgccctgctgatgggcaaggccaacaacaacgtgggcaccggcacctgcgacaaggtgaacaacatccaccccgccgtgcacaccaagaccgacaacagcgtggccagcagccccagcagcgccatcagcaccgccacccccagccccaagagcaccgagcagaccaccaccaacagcgtgaccagcctgaacagcccccacagcggcctgcacaccatcaacggcgagggcatggaggagagccagagccccatgaagaccgacctgctgctggtgaaccacaagcccagcccccagatcatccccagcatgagcgtgagcatctaccccagcagcgccgaggtgctgaaggcctgcagaaacctgggcaagaacggcctgagcaacagcagcatcctgctggacaagtgccccccccccagaccccccagcagcccctacccccccctgcccaaggacaagctgaacccccccacccccagcatctacctggagaacaagagagacgccttcttcccccccctgcaccagttctgcaccaaccccaacaaccccgtgaccgtgatcagaggcctggccggcgccctgaagctggacctgggcctgttcagcaccaagaccctggtggaggccaacaacgagcacatggtggaggtgagaacccagctgctgcagcccgccgacgagaactgggaccccaccggcaccaagaagatctggcactgcgagagcaacagaagccacaccaccatcgccaagtacgcccagtaccaggccagcagcttccaggagagcctgagagaggagaacgagaagagaagccaccacaaggaccacagcgacagcgagagcaccagcagcgacaacagcggcagaagaagaaagggccccttcaagaccatcaagttcggcaccaacatcgacctgagcgacgacaagaagtggaagctgcagctgcacgagctgaccaagctgcccgccttcgtgagagtggtgagcgccggcaacctgctgagccacgtgggccacaccatcctgggcatgaacaccgtgcagctgtacatgaaggtgcccggcagcagaacccccggccaccaggagaacaacaacttctgcagcgtgaacatcaacatcggccccggcgactgcgagtggttcgtggtgcccgagggctactggggcgtgctgaacgacttctgcgagaagaacaacctgaacttcctgatgggcagctggtggcccaacctggaggacctgtacgaggccaacgtgcccgtgtacagattcatccagagacccggcgacctggtgtggatcaacgccggcaccgtgcactgggtgcaggccatcggctggtgcaacaacatcgcctggaacgtgggccccctgaccgcctgccagtacaagctggccgtggagagatacgagtggaacaagctgcagagcgtgaagagcatcgtgcccatggtgcacctgagctggaacatggccagaaacatcaaggtgagcgaccccaagctgttcgagatgatcaagtactgcctgctgagaaccctgaagcagtgccagaccctgagagaggccctgatcgccgccggcaaggagatcatctggcacggcagaaccaaggaggagcccgcccactactgcagcatctgcgaggtggaggtgttcgacctgctgttcgtgaccaacgagagcaacagcagaaagacctacatcgtgcactgccaggactgcgccagaaagaccagcggcaacctggagaacttcgtggtgctggagcagtacaagatggaggacctgatgcaggtgtacgaccagttcaccctggccccccccctgcccagcgccagcagctag

SEQ ID NO: 207847 - protein, 732 aa, Artificial Sequence
  derived and/or modified sequence
MVRSGNKAAVVLCMDVGFTMSNSIPGIESPFEQAKKVITMFVQRQVFAENKDEIALVLFGTDGTDNPLSGGDQYQNITVHRHLMLPDFDLLEDIESKIQPGSQQADFLDALIVSMDVIQHETIGKKFEKRHIEIFTDLSSRFSKSQLDIIIHSLKKCDISLQFFLPFSLGKEDGSGDRGDGPFRLGGHGPSFPLKGITEQQKEGLEIVKMVMISLEGEDGLDEIYSFSESLRKLCVFKKIERHSIHWPCRLTIGSNLSIRIAAYKSILQERVKKTWTVVDAKTLKKEDIQKETVYCLNDDDETEVLKEDIIQGFRYGSDIVPFSKVDEEQMKYKSEGKCFSVLGFCKSSQVQRRFFMGNQVLKVFAARDDEAAAVALSSLIHALDDLDMVAIVRYAYDKRANPQVGVAFPHIKHNYECLVYVQLPFMEDLRQYMFSSLKNSKKYAPTEAQLNAVDALIDSMSLAKKDEKTDTLEDLFPTTKIPNPRFQRLFQCLLHRALHPREPLPPIQQHIWNMLNPPAEVTTKSQIPLSKIKTLFPLIEAKKKDQVTAQEIFQDNHEDGPTAKKLKTEQGGAHFSVSSLAEGSVTSVGSVNPAENFRVLVKQKKASFEEASNQLINHIEQFLDTNETPYFMKSIDCIRAFREEAIKFSEEQRFNNFLKALQEKVEIKQLNHFWEIVVQDGITLITKEEASGSSVTAEEAKKFLAPKDKPSGDTAAVFEEGGDVDDLLDMI

SEQ ID NO: 207848 - DNA, 2199 bp, Artificial Sequence
  derived and/or modified sequence
atggtgagaagcggcaacaaggccgccgtggtgctgtgcatggacgtgggcttcaccatgagcaacagcatccccggcatcgagagccccttcgagcaggccaagaaggtgatcaccatgttcgtgcagagacaggtgttcgccgagaacaaggacgagatcgccctggtgctgttcggcaccgacggcaccgacaaccccctgagcggcggcgaccagtaccagaacatcaccgtgcacagacacctgatgctgcccgacttcgacctgctggaggacatcgagagcaagatccagcccggcagccagcaggccgacttcctggacgccctgatcgtgagcatggacgtgatccagcacgagaccatcggcaagaagttcgagaagagacacatcgagatcttcaccgacctgagcagcagattcagcaagagccagctggacatcatcatccacagcctgaagaagtgcgacatcagcctgcagttcttcctgcccttcagcctgggcaaggaggacggcagcggcgacagaggcgacggccccttcagactgggcggccacggccccagcttccccctgaagggcatcaccgagcagcagaaggagggcctggagatcgtgaagatggtgatgatcagcctggagggcgaggacggcctggacgagatctacagcttcagcgagagcctgagaaagctgtgcgtgttcaagaagatcgagagacacagcatccactggccctgcagactgaccatcggcagcaacctgagcatcagaatcgccgcctacaagagcatcctgcaggagagagtgaagaagacctggaccgtggtggacgccaagaccctgaagaaggaggacatccagaaggagaccgtgtactgcctgaacgacgacgacgagaccgaggtgctgaaggaggacatcatccagggcttcagatacggcagcgacatcgtgcccttcagcaaggtggacgaggagcagatgaagtacaagagcgagggcaagtgcttcagcgtgctgggcttctgcaagagcagccaggtgcagagaagattcttcatgggcaaccaggtgctgaaggtgttcgccgccagagacgacgaggccgccgccgtggccctgagcagcctgatccacgccctggacgacctggacatggtggccatcgtgagatacgcctacgacaagagagccaacccccaggtgggcgtggccttcccccacatcaagcacaactacgagtgcctggtgtacgtgcagctgcccttcatggaggacctgagacagtacatgttcagcagcctgaagaacagcaagaagtacgcccccaccgaggcccagctgaacgccgtggacgccctgatcgacagcatgagcctggccaagaaggacgagaagaccgacaccctggaggacctgttccccaccaccaagatccccaaccccagattccagagactgttccagtgcctgctgcacagagccctgcaccccagagagcccctgccccccatccagcagcacatctggaacatgctgaacccccccgccgaggtgaccaccaagagccagatccccctgagcaagatcaagaccctgttccccctgatcgaggccaagaagaaggaccaggtgaccgcccaggagatcttccaggacaaccacgaggacggccccaccgccaagaagctgaagaccgagcagggcggcgcccacttcagcgtgagcagcctggccgagggcagcgtgaccagcgtgggcagcgtgaaccccgccgagaacttcagagtgctggtgaagcagaagaaggccagcttcgaggaggccagcaaccagctgatcaaccacatcgagcagttcctggacaccaacgagaccccctacttcatgaagagcatcgactgcatcagagccttcagagaggaggccatcaagttcagcgaggagcagagattcaacaacttcctgaaggccctgcaggagaaggtggagatcaagcagctgaaccacttctgggagatcgtggtgcaggacggcatcaccctgatcaccaaggaggaggccagcggcagcagcgtgaccgccgaggaggccaagaagttcctggcccccaaggacaagcccagcggcgacaccgccgccgtgttcgaggagggcggcgacgtggacgacctgctggacatgatctag

SEQ ID NO: 207849 - DNA, 2199 bp, Artificial Sequence
  derived and/or modified sequence
atggtgaggagcggcaataaagctgcagtggttctctgcatggatgtgggatttaccatgtccaactcaatccccggaattgagtcccctttcgagcaagccaagaaggtcatcactatgtttgtccaaagacaagttttcgccgagaataaagacgagattgccttagtgttgttcggaacagatggaactgataatccactctccggcggcgaccagtaccagaatatcacggttcatagacatcttatgctgccagactttgatctgctggaagatatcgagagcaagatacaaccgggctcccaacaagctgattttctggatgcactaatcgtgagcatggatgtgattcagcatgagaccatcggtaaaaaattcgagaagcgacacatcgagatttttacagacttaagctcgcggttctcaaagtctcagctggacattataattcacagcctcaaaaaatgcgatatcagcctccagttttttctacccttcagtctggggaaggaagacgggtcaggcgacaggggggatggtccattccgactgggaggacatggaccttccttccccttgaagggcatcacagagcagcagaaggagggcctggagatagtgaaaatggtcatgatctcactggagggcgaagacggactggatgaaatttattctttcagtgaatcattgaggaagctgtgcgtgtttaagaagattgaaagacactccatccattggccgtgtcgtttgacaattggcagtaatcttagtatcaggattgccgcatataagtctattttacaggaacgcgtgaaaaaaacttggactgttgtcgacgcgaagactctgaagaaagaggatatacagaaggaaacagtgtactgcttaaatgacgatgacgagacagaagtcctcaaagaagacatcatccagggatttcggtatggcagcgatattgttccttttagcaaggtggatgaggaacagatgaagtacaagagtgagggcaaatgcttctccgtcctcggcttctgcaagtctagccaagttcagagacgattctttatggggaaccaagtcctgaaagtcttcgccgccagagacgacgaggcagcagcagtggccctgtcttcactgattcatgccctggacgatcttgatatggtagcaatcgtacgctacgcttacgacaagagagcgaatcctcaggtgggggtggcatttccacacattaagcacaactacgagtgcctggtgtacgtccaactaccgtttatggaggacctgcgccagtacatgttctcctctctgaagaactccaaaaagtacgccccgactgaggcccagctgaacgcagtggatgcactgatcgacagtatgagtctggctaaaaaagacgagaagaccgatacacttgaagaccttttccccacaacaaaaatacctaacccgaggttccagcggctcttccagtgcttgcttcatcgagcgctgcacccaagggagccattaccgcctattcagcagcacatctggaatatgctaaaccctccagctgaggtcactaccaaatctcagattcccctgtcaaaaattaagaccctatttccattgattgaagccaaaaagaaggaccaagtgaccgcacaggagatttttcaagacaaccatgaagacgggcctacagccaagaaactaaaaacagagcaagggggtgcccacttctccgtatcgtcattggctgaagggtcggtgactagcgtgggcagcgttaatcccgctgagaactttcgggttctcgtcaagcaaaaaaaagcatccttcgaggaggcatccaatcagttgatcaatcacattgagcagttcttggatacaaatgagacaccatactttatgaaatccatagactgtattcgggcattccgcgaggaggccataaagtttagcgaagaacagcggttcaacaattttctgaaggccctgcaagaaaaggttgagattaagcagctgaatcatttctgggaaatcgtcgtccaggacggaattacactcatcaccaaggaagaggcctccggttcaagcgtgactgctgaggaggctaaaaagtttctggctccaaaggacaagcccagtggggatacagcagctgtctttgaagaagggggtgacgttgacgacctccttgacatgatctag

SEQ ID NO: 207850 - DNA, 2199 bp, Artificial Sequence
  derived and/or modified sequence
atggttaggtctggcaataaagcagccgtggtcctgtgcatggacgttgggtttaccatgagtaactccattccaggtatcgagtccccctttgaacaggctaagaaggtgataactatgttcgtgcaaaggcaggtgtttgcagaaaataaggacgaaatcgcactcgtcctgttcggcacagatggtacagacaatcccctttctggcggagaccaataccagaacatcaccgtccacagacatttgatgctgcccgacttcgatcttcttgaggatatcgaaagtaagatccaacccgggagccagcaggcggactttctggatgcactaatcgtgagtatggatgtcatacagcacgagacaattggtaaaaagtttgaaaagaggcacatagagatcttcacagacttgagtagccgcttctcaaagtcacagctggatatcatcatccacagcctgaagaagtgcgatatcagcctacagttttttctccccttttctctcgggaaggaagacggctcgggggatcgcggagacgggccctttcggcttggcggtcatgggccctcttttcctctaaagggtattacagagcagcagaaagaaggcctggaaatcgtgaaaatggttatgatcagcctggagggtgaagacggcttggacgaaatctatagtttctccgagtccctgcggaaactgtgcgtattcaaaaagatagagcgacacagcattcactggccttgccggctgaccatcggaagcaatctctccattcggattgcagcctataagtctattttgcaggaacgcgtcaagaagacatggactgtggtagatgccaagacactgaagaaggaagacatccagaaggagacagtctactgcttgaacgatgacgacgaaacagaggtgctgaaggaagacatcattcagggatttaggtacggtagcgacatagtccctttctctaaagtagatgaagagcagatgaagtacaaaagtgagggcaagtgctttagtgtactcggattttgcaaatcgtctcaggtgcagcgccgattctttatggggaatcaggtgctcaaggtgttcgcagctagggacgacgaagccgccgccgtcgccctgtcatccctcatccacgcacttgacgacctcgatatggtagccatcgtgaggtatgcttacgacaaacgagctaaccctcaggtaggggtggcctttccgcacataaagcacaactatgagtgtctcgtttacgtccagttgccatttatggaagacctgaggcaatatatgttctccagcctgaagaattcaaagaaatatgctccaactgaggcccagcttaatgctgtagacgcgcttattgacagtatgtcactggccaagaaggacgagaaaacagatacgctcgaggacttattccctaccaccaagatcccgaacccaagatttcaacgactattccagtgtctgctccatagagcacttcaccctcgcgaaccacttcccccgatccagcaacacatctggaatatgctcaatccaccggcagaagtgacgaccaagtctcagatccccctcagcaagataaaaactttatttccactgattgaagccaaaaaaaaagaccaggtcacagcacaagaaatttttcaggacaatcacgaggacgggcctaccgctaagaaactgaagacagagcagggaggggcccactttagtgtgagcagcttagctgagggatctgtcactagcgtgggatctgtgaaccctgccgagaatttccgcgtgttggtgaagcagaagaaagcatcctttgaggaagccagcaaccagctgattaaccacatagaacagtttttggacacaaacgaaaccccatacttcatgaaatctatcgactgtattagagcattccgggaggaagccataaaattttccgaagagcagcggtttaataattttctgaaggctcttcaggaaaaggtagaaattaaacaactgaatcatttttgggagatcgtggtgcaggacggcattaccctgataaccaaagaagaagcgagtgggtctagtgtaacagcggaggaagctaagaagttcctggctcctaaagataaaccctccggggacacggccgccgtgttcgaagagggcggcgacgttgatgatcttctggatatgatatag

SEQ ID NO: 207851 - DNA, 2199 bp, Artificial Sequence
  derived and/or modified sequence
atggtgcgcagcggcaacaaggctgctgtggtgctgtgcatggatgtgggcttcaccatgagcaacagcatccctggcatcgagagcccctttgagcaggccaagaaggtgatcaccatgtttgtgcagaggcaggtgtttgctgagaacaaggatgagatcgccctggtgctgtttggaacagatggaacagacaaccccctgtctggaggagaccagtaccagaacatcaccgtgcaccgccacctgatgctgcctgactttgacctgctggaggacatcgagagcaagatccagcccggcagccagcaggccgacttcctggatgccctgattgtgtccatggatgtgatccagcacgagaccatcggcaagaagtttgagaagaggcacatcgagatcttcacagacctgagcagccgcttcagcaagagccagctggacatcatcatccacagcctgaagaagtgtgacatcagcctgcagttcttcctgcccttcagcctgggcaaggaggatggcagcggggacagaggagatggccccttccggctgggcggccacggccccagcttccccctgaagggcatcacagagcagcagaaggagggcctggagatcgtgaagatggtgatgatcagcctggagggggaggatggcctggatgagatctacagcttcagcgagagcctgaggaagctgtgtgtgttcaagaagattgaaagacacagcatccactggccctgccgcctgaccatcggcagcaacctgagcatcagaattgctgcctacaagagcatcctgcaggagcgggtgaagaagacctggacagtggtggatgccaagaccctgaagaaggaggacatccagaaggagaccgtgtactgcctgaatgatgatgatgaaacagaggtgctgaaggaggacatcatccagggcttccgctatggcagtgacatcgtgcccttcagcaaggtggatgaggagcagatgaagtacaagtctgagggcaagtgcttctctgtgctgggcttctgcaagagcagccaggtgcagaggcgcttcttcatgggcaaccaggtgctgaaggtgtttgctgccagagatgatgaggccgctgctgtggccctgagcagcctcatccacgccctggatgacctggacatggtggccatcgtgcgctatgcctatgacaagagggccaacccccaggtgggcgtggccttcccccacatcaagcacaactatgaatgtctggtgtatgtgcagctgcccttcatggaggacctgcggcagtacatgttcagcagcctgaagaacagcaagaagtatgcccccacagaggcccagctgaatgctgtggatgccctgattgacagcatgagcctggccaagaaggatgagaagacagacaccctggaggacctcttccccaccaccaagatccccaacccccgcttccagaggctcttccagtgcctgctgcaccgggccctgcacccccgggagcccctgccccccatccagcagcacatctggaacatgctgaaccccccagctgaggtgaccaccaagagccagatccccctgagcaagatcaagaccctcttccccctcatcgaggccaagaagaaggaccaggtgacagcccaggagatcttccaggacaaccatgaagatggccccacagccaagaagctgaagacagagcagggcggggcccacttctctgtgagcagcctggccgagggctctgtgacctctgtgggctctgtgaacccagctgagaacttccgggtgctggtgaagcagaagaaggccagctttgaggaggccagcaaccagctgatcaaccacatcgagcagttcctggacaccaatgagaccccctacttcatgaagagcattgactgcatccgggccttccgggaggaggccatcaagttcagcgaggagcagcgcttcaacaacttcctgaaggccctgcaggagaaggtggagatcaagcagctgaaccacttctgggagatcgtggtgcaggacggcatcaccctcatcaccaaggaggaggccagcggcagctctgtgacagctgaggaggccaagaagttcctggcccccaaggacaagcccagcggggacacagctgctgtgtttgaggagggcggagatgtggatgacctgctggacatgatctag

SEQ ID NO: 207852 - DNA, 2199 bp, Artificial Sequence
  derived and/or modified sequence
atggtgcggagcggcaacaaggccgccgtggtgctgtgcatggacgtaggctttactatgtccaatagtatccctggtatcgaatcccctttcgaacaggccaaaaaagttatcacaatgttcgtccagaggcaagtgttcgcagaaaacaaggacgagatagccctcgttctgttcggtaccgacggcacggacaacccgctgagtggcggcgatcagtatcagaacattaccgtccaccggcacctaatgcttcctgatttcgacttattagaggatatcgagtccaagatacagccaggatcacagcaagccgatttcctagacgcactcatagtgtctatggacgtgatccagcatgagacaatcgggaaaaagtttgagaagcgccatatcgagattttcaccgacctgtctagtagattctctaaatcacagctcgacataattatccacagcctgaagaagtgtgacataagcttgcagttctttctacccttcagcctcggaaaggaggacggttctggcgaccggggcgatggtcctttccggctgggtggtcacggcccgtcttttcctctgaagggtattactgaacagcagaaagaaggccttgagattgtgaagatggtcatgattagcctcgagggagaggacgggctggacgagatctattcgtttagcgagtctcttagaaagctgtgcgtgtttaagaagatcgaacggcattcaattcattggccatgtcggctgaccatcgggtccaatcttagcataagaatcgccgcatacaaaagcatactccaggagagagtaaagaagacatggactgtagtggacgcgaaaaccctaaagaaggaagatatacagaaagaaacagtgtattgtttaaacgatgatgacgagacagaggtcctgaaggaggacatcattcaggggtttaggtatgggtccgacattgtgcccttctccaaagtggacgaagaacagatgaagtataagtccgagggtaaatgtttttcggtgctaggcttttgcaagagctctcaggtgcagaggcgattctttatgggaaatcaggttttgaaggtattcgctgcacgcgacgatgaggccgctgcagtggcattgagcagcctaatacatgcattggatgatctggacatggtcgcgattgtccgctacgcgtacgacaagagagctaatccgcaggtcggtgtcgccttccctcatatcaagcacaattacgagtgcctggtgtacgtccagttacccttcatggaagatcttaggcaatatatgttctcttctttgaaaaattcgaaaaaatacgcaccaactgaggcccagctgaatgccgtggacgctctgatcgactccatgagcttggcaaaaaaagacgagaagacggataccctggaagacttgttccctaccaccaagatcccaaacccccgctttcaacgattgtttcagtgcctgttgcaccgtgctctgcatccacgtgagcctctccctcccattcagcaacacatatggaacatgctgaacccacccgctgaagtcacaacaaagagccagattcccctatctaagataaagactctgttccctctcatagaggctaagaagaaggaccaggtcactgcgcaggagatttttcaggacaatcacgaggatggccccactgccaaaaaactgaagacggagcagggtggagcccatttctccgtgagctccctcgctgaaggctccgtaacgagtgtcggctctgtaaaccccgcagagaacttcagagtattggtaaaacagaagaaagccagtttcgaggaggcctcaaaccagctaattaaccacattgagcaattcctggataccaatgaaacaccctatttcatgaagagcattgactgcattagggcattcagagaagaggccattaagttctccgaggaacaacgcttcaacaattttctgaaggctctccaagagaaggtagagattaagcagctgaatcacttttgggagatcgtcgtgcaggacgggattaccttgatcactaaagaggaggcatctggatcatcagtgaccgccgaggaggccaagaaatttctcgctcctaaggacaagccgtccggtgacaccgcggctgtgttcgaagaagggggcgacgtggacgatttgctggatatgatttag

SEQ ID NO: 207853 - DNA, 2199 bp, Artificial Sequence
  derived and/or modified sequence
atggtgcggagcggcaacaaggccgccgtggtgctgtgcatggacgtgggcttcacaatgagcaacagtatccccggaatagagagccctttcgaacaggctaaaaaggtgatcacgatgtttgtacagcgacaagtattcgcagagaacaaggacgagatcgcccttgttctgtttggaactgacgggactgataaccccctgtctggtggagatcagtaccaaaacataacagtgcaccggcatctgatgctcccagactttgatctgttggaggatatcgagtctaaaattcaacctgggtcacaacaggccgattttctcgatgccttgatagtgagcatggacgtaatccagcacgaaaccattgggaagaaattcgagaagaggcacatcgaaattttcactgacctcagctcccgcttttcaaagtcccagctggatatcattatccatagtctgaaaaagtgcgacatttctctccaattcttcctgcctttctctctcgggaaggaggacggctctggcgatcggggagacggaccctttcgactggggggacacggaccaagcttccccctgaagggaatcactgagcaacagaaagaaggtctggagatcgttaaaatggtgatgatcagcttggagggcgaagacgggctagatgagatctacagcttcagcgaatcactaaggaagctttgcgtgtttaagaaaattgaaaggcattccatccactggccctgtcgtcttactatagggtccaatctaagtattcggattgctgcctacaaatccatcttgcaggaacgggtgaaaaagacgtggacagtggtggatgcaaaaaccctgaaaaaggaggatatccaaaaggagacagtgtactgcttgaatgatgacgatgagaccgaggtgctgaaggaggacattattcagggcttccgctacggaagcgacatcgtcccattcagcaaagtggatgaggagcagatgaagtataagtctgaaggcaagtgtttcagcgtgttagggttttgcaagagctcgcaggtgcagcgccggtttttcatggggaatcaggtactaaaggtcttcgccgcaagagacgacgaagcagccgctgtggccctgtcaagtcttatccatgctctggacgacctggacatggttgctatcgtgagatacgcctacgacaagcgcgccaaccctcaggtcggcgtggcttttccacacataaaacataactacgagtgtttggtatacgtgcagctcccttttatggaagaccttaggcaatatatgtttagcagcctaaagaacagcaaaaagtacgctcctacagaagcccaactcaacgctgtcgatgcattgatcgattccatgtctctcgccaaaaaagacgaaaaaactgacactcttgaggacttgtttcccaccacaaagatcccaaacccaaggtttcaacggctattccaatgtctcctgcaccgggctctgcatccccgcgaaccacttcctccaattcagcagcacatatggaacatgctgaatccccctgctgaggttacgacaaaatcacaaatccctctcagcaagatcaaaaccctttttccactcatcgaagctaaaaagaaggaccaagtgacggctcaagaaattttccaggacaaccacgaggacggccccacggctaagaagttaaagacagagcagggtggcgcccatttcagcgtttcatctctggccgaggggagcgtcacttcggtaggttcagtcaaccccgctgagaatttccgggtgctcgtgaagcagaagaaagcatctttcgaggaagcttctaatcagcttattaatcacattgagcagtttctggatacaaacgaaactccatacttcatgaaatccatcgattgcatccgcgcctttcgcgaggaagctatcaagttcagcgaggagcaacggttcaacaactttctgaaagccctgcaggagaaagtggaaattaaacaactgaatcacttctgggagatcgtcgtacaggacggaataacactcattaccaaagaggaggccagtgggagttctgtgacggcagaggaggccaaaaaatttttagctccaaaggacaagccgtcgggagacaccgcagcagttttcgaggaaggcggcgatgtggacgatttgctggacatgatctag

SEQ ID NO: 207854 - DNA, 2199 bp, Artificial Sequence
  derived and/or modified sequence
atggtgagaagtgggaacaaggcagcagttgtgctgtgcatggatgttgggtttactatgtcaaactccatacccggtatcgaatcacctttcgaacaggccaaaaaagtgattaccatgtttgtgcagcgccaggtgtttgccgagaataaggacgagatagctctggtgttgtttggaacagacggcaccgacaaccctctctccggaggggaccaatatcaaaacatcaccgtgcacaggcaccttatgcttccggacttcgacctgctcgaggacattgaaagtaaaattcagcctgggagtcagcaagcagactttttagacgccctcatcgtgtctatggacgtgattcagcatgaaaccatcggaaaaaaatttgagaagcggcatattgaaatattcacagatctgtcatcgcgatttagtaagagccagctggatatcatcatccactcgctaaaaaaatgtgacatctccctgcagtttttcttgccgttttccctgggaaaggaagacgggtcaggagaccgcggtgatggaccgtttagattaggtggacatggaccgtcatttcccttgaagggaatcacagagcagcaaaaggagggtctggagatcgtgaaaatggtcatgatctccctggagggcgaggacggccttgatgagatatattcatttagtgaaagcctgcggaaactctgcgtttttaagaaaatcgagcgtcactcgattcactggccgtgtagattgaccatagggagcaatctgagtataaggattgcggcatacaagagcattctgcaggagagagtgaagaagacgtggacagtggtggatgccaagacactgaaaaaagaggacatacagaaggagactgtctactgtcttaacgatgacgacgagactgaagttctcaaggaggacattattcagggatttcggtatgggagtgacattgtccccttttcaaaggtggatgaagagcagatgaagtataagagtgagggaaagtgtttctccgtgctgggtttctgcaaatcctcacaggtgcagagacgattttttatgggtaatcaagtcctgaaggtgttcgccgcacgtgatgatgaagccgcagcggtggcactgagttcactaattcatgccctggatgacttggatatggtagcaatcgtgcgttatgcctatgacaagagagccaacccacaggtcggcgtcgcatttcctcacattaagcataactacgagtgtttagtctacgtgcagttgccattcatggaggatttgaggcaatacatgttttcctcactaaaaaacagcaagaaatacgcacccaccgaggcgcagctgaacgcagtggacgccctcatcgattcaatgagcttggccaaaaaggatgagaaaaccgacaccctcgaagatttgtttccaacgaccaagatccctaacccacgctttcagaggctcttccagtgcctcctgcatcgagcgctgcaccccagggagccactgcccccaatccaacagcacatctggaacatgcttaatcctcccgctgaggtgaccacgaagagccaaatcccactttcgaaaatcaagactctgtttccgctgatcgaagcaaagaagaaggatcaggttacagcgcaagagatctttcaggacaaccacgaagacgggcctaccgccaagaaactcaaaacagagcaaggaggagcccacttttcagtgtccagccttgccgagggtagcgtgacaagcgttggcagcgtgaatccagccgagaacttcagggttctagtgaagcaaaagaaggcaagttttgaggaagcaagcaatcagcttatcaaccatattgaacagttcctcgataccaacgagactccctatttcatgaaaagcatcgattgtattcgggcatttagggaagaagcaatcaagttttccgaggagcaaaggttcaataacttcttgaaggcactgcaagagaaggtggaaattaagcaattgaatcatttctgggaaatcgtggttcaagacgggatcaccctcatcacaaaagaggaggcaagcgggtctagtgtgacggcggaggaagccaaaaagttccttgctcctaaggataagccaagcggtgacacagctgcggttttcgaagagggtggagacgttgacgaccttctggacatgatatag

SEQ ID NO: 207855 - DNA, 2199 bp, Artificial Sequence
  derived and/or modified sequence
atggtgaggagcggaaataaagcggcagttgtactatgcatggatgtcgggttcaccatgtcgaatagcattcctggaatcgaatcaccatttgaacaagctaaaaaagtcatcaccatgttcgtgcaaaggcaggtatttgccgagaataaggacgaaatcgcgcttgtactgttcggcactgatggaacagacaaccctctgtccggcggtgaccaatatcagaacattactgtgcaccggcatcttatgctgcccgactttgatctccttgaagacatagagagtaaaatccagcctggctctcagcaggctgatttcctggatgctctcatcgtatccatggatgtgattcagcatgagactataggaaagaaatttgagaagcgccacattgaaattttcacggatctgagcagccggttctctaagtcccaattagatattatcatacattccctcaagaagtgcgacatttccctccagttctttctgcctttctctctcgggaaggaagacggctcaggagacagaggcgacgggccttttcgtcttgggggacatggacccagcttcccactaaaaggcataactgagcagcaaaaagagggactggagatagttaagatggttatgatttccctcgaaggcgaggacgggctagacgaaatttactcattctccgagtccttgagaaaattatgcgtcttcaaaaagattgaaaggcacagtatccactggccctgtagattgacaataggaagcaaccttagcatccggattgccgcttataaatccatcttgcaggagcgagtaaagaaaacatggaccgtggttgacgctaagacattgaagaaggaagatatccagaaagaaacggtgtactgtttgaacgatgacgatgaaaccgaagtgctgaaagaggacattattcagggatttcgatatggctctgatatcgttccgttcagcaaggtcgacgaagaacagatgaaatataaaagcgagggcaagtgtttctcggtgttggggttttgcaagtcgtcccaggtgcagcgacgttttttcatgggtaatcaggtgctaaaggtcttcgccgctcgggacgacgaagccgcagctgtcgccctctcatctcttattcatgcattggacgatcttgacatggtggccattgttcggtacgcctacgataagagagccaatccacaagtcggtgtggctttccctcatatcaagcataattatgagtgccttgtatacgtacagcttccttttatggaggatcttaggcaatatatgttctcttccttgaaaaatagcaagaagtacgctcccacggaggcacaactcaacgctgtcgatgccttgatagattcaatgtcactggctaaaaaggatgagaaaacggacacactcgaggatttattccctaccaccaaaataccaaatccacggttccaacgcctattccagtgcctgctgcatcgggcattacacccgagggagccactccccccaatacagcagcatatctggaacatgctcaaccccccagcggaggtcaccaccaagtcccagatacctctcagtaagataaagacactgttcccactgatcgaggcaaaaaaaaaagatcaggtcaccgcccaggagatcttccaggacaaccacgaggacggtccaacagcaaagaaattgaaaactgagcaggggggagctcacttttccgtctccagcttagctgaagggtccgttacctctgtggggagtgtcaacccggcagagaattttagagtgctggtgaaacagaagaaggccagcttcgaggaagccagcaatcagttgatcaaccatattgagcagtttctcgacacaaatgagacaccgtattttatgaagtctatcgattgcattagggccttcagggaggaagccatcaaatttagtgaagaacagaggtttaataactttctgaaggccctgcaggaaaaggtggaaatcaagcagctgaatcatttctgggagattgtggtgcaggacggtataacgcttattactaaggaggaagcctccggatcaagtgtgactgctgaggaagccaaaaagttcctcgcacccaaggacaagcctagcggtgacacagcggctgtcttcgaggaggggggtgacgttgacgacctgttggatatgatctag

SEQ ID NO: 207856 - DNA, 3428 bp, Artificial Sequence
  derived and/or modified sequence
acggtttccccgcccctttcaggcctagcaggaaacgaagcggctctttccgctatctgccgcttgtccaccggaagcgagttgcgacacggcaggttcccgcccggaagaagcgaccaaagcgcctgaggaccggcaacatggtgcggtcggggaataaggcagctgttgtgctgtgtatggacgtgggctttaccatgagtaactccattcctggtatagaatccccatttgaacaagcaaagaaggtgataaccatgtttgtacagcgacaggtgtttgctgagaacaaggatgagattgctttagtcctgtttggtacagatggcactgacaatcccctttctggtggggatcagtatcagaacatcacagtgcacagacatctgatgctaccagattttgatttgctggaggacattgaaagcaaaatccaaccaggttctcaacaggctgacttcctggatgcactaatcgtgagcatggatgtgattcaacatgaaacaataggaaagaagtttgagaagaggcatattgaaatattcactgacctcagcagccgattcagcaaaagtcagctggatattataattcatagcttgaagaaatgtgacatctccctgcaattcttcttgcctttctcacttggcaaggaagatggaagtggggacagaggagatggcccctttcgcttaggtggccatgggccttcctttccactaaaaggaattaccgaacagcaaaaagaaggtcttgagatagtgaaaatggtgatgatatctttagaaggtgaagatgggttggatgaaatttattcattcagtgagagtctgagaaaactgtgcgtcttcaagaaaattgagaggcattccattcactggccctgccgactgaccattggctccaatttgtctataaggattgcagcctataaatcgattctacaggagagagttaaaaagacttggacagttgtggatgcaaaaaccctaaaaaaagaagatatacaaaaagaaacagtttattgcttaaatgatgatgatgaaactgaagttttaaaagaggatattattcaagggttccgctatggaagtgatatagttcctttctctaaagtggatgaggaacaaatgaaatataaatcggaggggaagtgcttctctgttttgggattttgtaaatcttctcaggttcagagaagattcttcatgggaaatcaagttctaaaggtctttgcagcaagagatgatgaggcagctgcagttgcactttcctccctgattcatgctttggatgacttagacatggtggccatagttcgatatgcttatgacaaaagagctaatcctcaagtcggcgtggcttttcctcatatcaagcataactatgagtgtttagtgtatgtgcagctgcctttcatggaagacttgcggcaatacatgttttcatccttgaaaaacagtaagaaatatgctcccaccgaggcacagttgaatgctgttgatgctttgattgactccatgagcttggcaaagaaagatgagaagacagacacccttgaagacttgtttccaaccaccaaaatcccaaatcctcgatttcagagattatttcagtgtctgctgcacagagctttacatccccgggagcctctacccccaattcagcagcatatttggaatatgctgaatcctcccgctgaggtgacaacaaaaagtcagattcctctctctaaaataaagaccctttttcctctgattgaagccaagaaaaaggatcaagtgactgctcaggaaattttccaagacaaccatgaagatggacctacagctaaaaaattaaagactgagcaagggggagcccacttcagcgtctccagtctggctgaaggcagtgtcacctctgttggaagtgtgaatcctgctgaaaacttccgtgttctagtgaaacagaagaaggccagctttgaggaagcgagtaaccagctcataaatcacatcgaacagtttttggatactaatgaaacaccgtattttatgaagagcatagactgcatccgagccttccgggaagaagccattaagttttcagaagagcagcgctttaacaacttcctgaaagcccttcaagagaaagtggaaattaaacaattaaatcatttctgggaaattgttgtccaggatggaattactctgatcaccaaagaggaagcctctggaagttctgtcacagctgaggaagccaaaaagtttctggcccccaaagacaaaccaagtggagacacagcagctgtatttgaagaaggtggtgatgtggacgatttattggacatgatataggtcgtggatgtatggggaatctaagagagctgccatcgctgtgatgctgggagttctaacaaaacaagttggatgcggccattcaaggggagccaaaatctcaagaaattcccagcaggttacctggaggcggatcatctaattctctgtggaatgaatacacacatatatattacaagggataatttagaccccatacaagtttataaagagtcattgttattttctggttggtgtattattttttctgtggtcttactgatctttgtatattacatacatgctttgaagtttctggaaagtagatcttttcttgacctagtatatcagtgacagttgcagcccttgtgatgtgattagtgtctcatgtggaaccatggcatggttattgatgagtttcttaaccctttccagagtcctcctttgcctgatcctccaacagctgtcacaacttgtgttgagcaagcagtagcatttgcttcctcccaacaagcagctgggttaggaaaaccatgggtaaggacggactcacttctctttttagttgaggccttctagttaccacattactctgcctctgtatataggtggttttctttaagtggggtgggaaggggagcacaatttcccttcatactccttttaagcagtgagttatggtggtggtctcatgaagaaaagaccttttggcccaatctctgccatatcagtgaacctttagaaactcaaaaactgagaaatttactacagtagttagaattatatcacttcactgttctctacttgcaagcctcaaagagagaaagtttcgttatattaaaacacttaggtaacttttcggtctttcccatttctacctaagtcagctttcatctttgtggatggtgtctcctttactaaataagaaaataacaaagcccttattctctttttttcttgtcctcattcttgccttgagttccagttcctctttggtgtacagacttcttggtacccagtcacctctgtcttcagcaccctcataagtcgtcactaatacacagttttgtacatgtaacattaaaggcataaatgactcatctctctgtg

SEQ ID NO: 207857 - DNA, 3761 bp, Artificial Sequence
  derived and/or modified sequence
agaaaccccacaaaaattagctgggcttggtggcacacacctgtggtcccagctacctgggaggctgagctctggatcgtacaagaagggagacaaggaccactgacaagatatgcgtttcaggcggctcaaacaccacacgctcccgactacggcggaatggagagaatgtgcgcatgctcggcgggaatctgcgcatgctcggcgggaatctgcgcatgctcggagagaatctgcgcatgctcggccggaatctgcgcgagctcggcgggaatctgcgcaagctcggcgggaatctgcgcatgctcagagttccggggcacggtttccccgcccctttcaggcctagcaggaaacgaagcggctctttccgctatctgccgcttgtccaccggaagcgagttgcgacacggcaggttcccgcccggaagaagcgaccaaagcgcctgaggaccggcaacatggtgcggtcggggaataaggcagctgttgtgctgtgtatggacgtgggctttaccatgagtaactccattcctggtatagaatccccatttgaacaagcaaagaaggtgataaccatgtttgtacagcgacaggtgtttgctgagaacaaggatgagattgctttagtcctgtttggtacagatggcactgacaatcccctttctggtggggatcagtatcagaacatcacagtgcacagacatctgatgctaccagattttgatttgctggaggacattgaaagcaaaatccaaccaggttctcaacaggctgacttcctggatgcactaatcgtgagcatggatgtgattcaacatgaaacaataggaaagaagtttgagaagaggcatattgaaatattcactgacctcagcagccgattcagcaaaagtcagctggatattataattcatagcttgaagaaatgtgacatctccctgcaattcttcttgcctttctcacttggcaaggaagatggaagtggggacagaggagatggcccctttcgcttaggtggccatgggccttcctttccactaaaaggaattaccgaacagcaaaaagaaggtcttgagatagtgaaaatggtgatgatatctttagaaggtgaagatgggttggatgaaatttattcattcagtgagagtctgagaaaactgtgcgtcttcaagaaaattgagaggcattccattcactggccctgccgactgaccattggctccaatttgtctataaggattgcagcctataaatcgattctacaggagagagttaaaaagacttggacagttgtggatgcaaaaaccctaaaaaaagaagatatacaaaaagaaacagtttattgcttaaatgatgatgatgaaactgaagttttaaaagaggatattattcaagggttccgctatggaagtgatatagttcctttctctaaagtggatgaggaacaaatgaaatataaatcggaggggaagtgcttctctgttttgggattttgtaaatcttctcaggttcagagaagattcttcatgggaaatcaagttctaaaggtctttgcagcaagagatgatgaggcagctgcagttgcactttcctccctgattcatgctttggatgacttagacatggtggccatagttcgatatgcttatgacaaaagagctaatcctcaagtcggcgtggcttttcctcatatcaagcataactatgagtgtttagtgtatgtgcagctgcctttcatggaagacttgcggcaatacatgttttcatccttgaaaaacagtaagaaatatgctcccaccgaggcacagttgaatgctgttgatgctttgattgactccatgagcttggcaaagaaagatgagaagacagacacccttgaagacttgtttccaaccaccaaaatcccaaatcctcgatttcagagattatttcagtgtctgctgcacagagctttacatccccgggagcctctacccccaattcagcagcatatttggaatatgctgaatcctcccgctgaggtgacaacaaaaagtcagattcctctctctaaaataaagaccctttttcctctgattgaagccaagaaaaaggatcaagtgactgctcaggaaattttccaagacaaccatgaagatggacctacagctaaaaaattaaagactgagcaagggggagcccacttcagcgtctccagtctggctgaaggcagtgtcacctctgttggaagtgtgaatcctgctgaaaacttccgtgttctagtgaaacagaagaaggccagctttgaggaagcgagtaaccagctcataaatcacatcgaacagtttttggatactaatgaaacaccgtattttatgaagagcatagactgcatccgagccttccgggaagaagccattaagttttcagaagagcagcgctttaacaacttcctgaaagcccttcaagagaaagtggaaattaaacaattaaatcatttctgggaaattgttgtccaggatggaattactctgatcaccaaagaggaagcctctggaagttctgtcacagctgaggaagccaaaaagtttctggcccccaaagacaaaccaagtggagacacagcagctgtatttgaagaaggtggtgatgtggacgatttattggacatgatataggtcgtggatgtatggggaatctaagagagctgccatcgctgtgatgctgggagttctaacaaaacaagttggatgcggccattcaaggggagccaaaatctcaagaaattcccagcaggttacctggaggcggatcatctaattctctgtggaatgaatacacacatatatattacaagggataatttagaccccatacaagtttataaagagtcattgttattttctggttggtgtattattttttctgtggtcttactgatctttgtatattacatacatgctttgaagtttctggaaagtagatcttttcttgacctagtatatcagtgacagttgcagcccttgtgatgtgattagtgtctcatgtggaaccatggcatggttattgatgagtttcttaaccctttccagagtcctcctttgcctgatcctccaacagctgtcacaacttgtgttgagcaagcagtagcatttgcttcctcccaacaagcagctgggttaggaaaaccatgggtaaggacggactcacttctctttttagttgaggccttctagttaccacattactctgcctctgtatataggtggttttctttaagtggggtgggaaggggagcacaatttcccttcatactccttttaagcagtgagttatggtggtggtctcatgaagaaaagaccttttggcccaatctctgccatatcagtgaacctttagaaactcaaaaactgagaaatttactacagtagttagaattatatcacttcactgttctctacttgcaagcctcaaagagagaaagtttcgttatattaaaacacttaggtaacttttcggtctttcccatttctacctaagtcagctttcatctttgtggatggtgtctcctttactaaataagaaaataacaaagcccttattctctttttttcttgtcctcattcttgccttgagttccagttcctctttggtgtacagacttcttggtacccagtcacctctgtcttcagcaccctcataagtcgtcactaatacacagttttgtacatgtaacattaaaggcataaatgactcatctctctgtgaattgctgctaa

SEQ ID NO: 207858 - protein, 536 aa, Artificial Sequence
  derived and/or modified sequence
MMFQDSVAFEDVAVSFTQEEWALLDPSQKNLYRDVMQETFKNLTSVGKTWKVQNIEDEYKNPRRNLSLMREKLCESKESHHCGESFNQIADDMLNRKTLPGITPCESSVCGEVGTGHSSLNTHIRADTGHKSSEYQEYGENPYRNKECKKAFSYLDSFQSHDKACTKEKPYDGKECTETFISHSCIQRHRVMHSGDGPYKCKFCGKAFYFLNLCLIHERIHTGVKPYKCKQCGKAFTRSTTLPVHERTHTGVNADECKECGNAFSFPSEIRRHKRSHTGEKPYECKQCGKVFISFSSIQYHKMTHTGEKPYECKQCGKAFRCGSHLQKHGRTHTGEKPYECRQCGKAFRCTSDLQRHEKTHTEDKPYGCKQCGKGFRCASQLQIHERTHSGEKPHECKECGKVFKYFSSLRIHERTHTGEKPHECKQCGKAFRYFSSLHIHERTHTGDKPYECKVCGKAFTCSSSIRYHERTHTGEKPYECKHCGKAFISNYIRYHERTHTGEKPYQCKQCGKAFIVPVHVENMKELIPLIDEKSF

SEQ ID NO: 207859 - protein, 532 aa, Artificial Sequence
  derived and/or modified sequence
MMFQDSVAFEDVAVSFTQEEWALLDPSQKNLYRDVMQETFKNLTSVGKTWKVQNIEDEYKNPRRNLSLMREKLCESKESHHCGESFNQIADDMLNRKTLPGITPCESSVCGEVGTGHSSLNTHIRADTGHKSSEYQEYGENPYRNKECKKAFSYLDSFQSHDKACTKEKPYDGKECTETFISHSCIQRHRVMHSGDGPYKCKFCGKAFYFLNLCLIHERIHTGVKPYKCKQCGKAFTRSTTLPVHERTHTGVNADECKECGNAFSFPSEIRRHKRSHTGEKPYECKQCGKVFISFSSIQYHKMTHTGEKPYECKQCGKAFRCGSHLQKHGRTHTGEKPYECRQCGKAFRCTSDLQRHEKTHTEDKPYGCKQCGKGFRCASQLQIHERTHSGEKPHECKECGKVFKYFSSLRIHERTHTGEKPHECKQCGKAFRYFSSLHIHERTHTGDKPYECKVCGKAFTCSSSIRYHERTHTGEKPYECKHCGKAFISNYIRYHERTHTGEKPYQCKQCGKAFIRASSCREHERTHTINR

SEQ ID NO: 207860 - DNA, 2188 bp, Artificial Sequence
  derived and/or modified sequence
gctctgccacaacttctgtcgctctgccgcctgcaccgtgacccgcactattcacgggagccctagagaggacaccgggacacccagaagccgggaaatgatgtttcaggattcagtggcctttgaggatgtggctgtcagcttcacccaggaggagtgggctttgctggatccttcccagaagaatctctacagggatgtgatgcaggaaaccttcaagaacctgacctctgtaggaaaaacatggaaagttcagaacattgaagatgagtacaaaaatcccaggagaaatctaagtcttatgagagagaaactctgtgaaagtaaagaaagtcatcactgtggagaaagcttcaaccagattgcagatgacatgctgaacaggaaaactcttcctggaataacaccatgtgaaagcagtgtgtgtggagaagttggcacgggtcattcatctcttaatacgcatatcagagctgacactggacacaagtcatctgagtatcaggaatatggagagaatccatatagaaataaggaatgtaagaaagccttcagttatcttgactcctttcaatcacatgataaagcttgcactaaagagaaaccctatgatggtaaagaatgtacagaaaccttcatttcccattcatgcattcaaagacacagggtaatgcacagtggagatggaccttataaatgtaagttttgtgggaaagccttctattttctcaatttatgtcttatccatgaacgaattcacactggtgtgaaaccatataagtgtaaacaatgtggtaaggcctttactcgttccactacccttccagtacatgaaagaactcacacaggagtgaatgccgatgaatgtaaagaatgtgggaatgcattcagttttcctagtgaaattcgtagacataaaaggtctcacactggagaaaaaccctatgagtgtaagcaatgtgggaaagtcttcatttctttcagttccattcagtatcataagatgactcacactggagagaaaccctatgaatgtaagcagtgtgggaaagcctttagatgtggctcacaccttcaaaagcatggaaggactcacactggagagaaaccctatgaatgtaggcaatgtggtaaagccttcagatgtacctcggaccttcaaaggcatgaaaagacacacactgaggataaaccctatggatgtaagcagtgtgggaaaggctttagatgtgcttcacaacttcaaattcatgaaaggacgcacagtggagagaaaccccatgaatgtaaggaatgtggaaaagtattcaagtatttttcttccttgcgtatacatgaaaggacgcacactggagagaagccccatgaatgtaagcaatgtggaaaagcattcaggtatttctcttccttgcatatacatgaaaggacacacactggagataagccatatgagtgtaaggtatgtggcaaagccttcacttgttccagttccattcgatatcatgaaaggactcacactggagagaaaccctatgaatgtaagcactgtggtaaggcctttatttccaattacattcgatatcatgaaaggactcacactggagagaaaccctatcaatgcaagcaatgtggcaaagcctttattcgtgccagttcatgtcgagaacatgaaagaactcataccattaatagatgagaaatccttttagtggaagcaacgggagaagctttctgttgtcccacttcctttgaaacacaagaaaagagagtggtgaaagaacctctggataactgctttttgaattgagaagagagacttgcgataggacaataaaatctagaagaacttggatggtttcgtaatacaattcacctatagccaatcttgcatgagatttcaaaggcacagaaaaggaaggcatcagtcacatattagaggccccacacagggagagaggtgtgtggctacccgcttccagcccattttcctgattctttggcttgttaatcgagaatatcccccaaatcacttgtctctgttcctcagagttgtaggtctccagatatgtccccagtgctccacattaaagataacatgcccactttgctgtttcttcagaaatgttaaaatgtttaccagagaactaataaatgttgttatggctggaaataaaaaaaaaaaaaaaaa

SEQ ID NO: 207861 - DNA, 1611 bp, Artificial Sequence
  derived and/or modified sequence
atgatgttccaggacagcgtggccttcgaggacgtggccgtgagcttcacccaggaggagtgggccctgctggaccccagccagaagaacctgtacagagacgtgatgcaggagaccttcaagaacctgaccagcgtgggcaagacctggaaggtgcagaacatcgaggacgagtacaagaaccccagaagaaacctgagcctgatgagagagaagctgtgcgagagcaaggagagccaccactgcggcgagagcttcaaccagatcgccgacgacatgctgaacagaaagaccctgcccggcatcaccccctgcgagagcagcgtgtgcggcgaggtgggcaccggccacagcagcctgaacacccacatcagagccgacaccggccacaagagcagcgagtaccaggagtacggcgagaacccctacagaaacaaggagtgcaagaaggccttcagctacctggacagcttccagagccacgacaaggcctgcaccaaggagaagccctacgacggcaaggagtgcaccgagaccttcatcagccacagctgcatccagagacacagagtgatgcacagcggcgacggcccctacaagtgcaagttctgcggcaaggccttctacttcctgaacctgtgcctgatccacgagagaatccacaccggcgtgaagccctacaagtgcaagcagtgcggcaaggccttcaccagaagcaccaccctgcccgtgcacgagagaacccacaccggcgtgaacgccgacgagtgcaaggagtgcggcaacgccttcagcttccccagcgagatcagaagacacaagagaagccacaccggcgagaagccctacgagtgcaagcagtgcggcaaggtgttcatcagcttcagcagcatccagtaccacaagatgacccacaccggcgagaagccctacgagtgcaagcagtgcggcaaggccttcagatgcggcagccacctgcagaagcacggcagaacccacaccggcgagaagccctacgagtgcagacagtgcggcaaggccttcagatgcaccagcgacctgcagagacacgagaagacccacaccgaggacaagccctacggctgcaagcagtgcggcaagggcttcagatgcgccagccagctgcagatccacgagagaacccacagcggcgagaagccccacgagtgcaaggagtgcggcaaggtgttcaagtacttcagcagcctgagaatccacgagagaacccacaccggcgagaagccccacgagtgcaagcagtgcggcaaggccttcagatacttcagcagcctgcacatccacgagagaacccacaccggcgacaagccctacgagtgcaaggtgtgcggcaaggccttcacctgcagcagcagcatcagataccacgagagaacccacaccggcgagaagccctacgagtgcaagcactgcggcaaggccttcatcagcaactacatcagataccacgagagaacccacaccggcgagaagccctaccagtgcaagcagtgcggcaaggccttcatcgtgcccgtgcacgtggagaacatgaaggagctgatccccctgatcgacgagaagagcttctag

SEQ ID NO: 207862 - DNA, 1599 bp, Artificial Sequence
  derived and/or modified sequence
atgatgttccaggacagcgtggccttcgaggacgtggccgtgagcttcacccaggaggagtgggccctgctggaccccagccagaagaacctgtacagagacgtgatgcaggagaccttcaagaacctgaccagcgtgggcaagacctggaaggtgcagaacatcgaggacgagtacaagaaccccagaagaaacctgagcctgatgagagagaagctgtgcgagagcaaggagagccaccactgcggcgagagcttcaaccagatcgccgacgacatgctgaacagaaagaccctgcccggcatcaccccctgcgagagcagcgtgtgcggcgaggtgggcaccggccacagcagcctgaacacccacatcagagccgacaccggccacaagagcagcgagtaccaggagtacggcgagaacccctacagaaacaaggagtgcaagaaggccttcagctacctggacagcttccagagccacgacaaggcctgcaccaaggagaagccctacgacggcaaggagtgcaccgagaccttcatcagccacagctgcatccagagacacagagtgatgcacagcggcgacggcccctacaagtgcaagttctgcggcaaggccttctacttcctgaacctgtgcctgatccacgagagaatccacaccggcgtgaagccctacaagtgcaagcagtgcggcaaggccttcaccagaagcaccaccctgcccgtgcacgagagaacccacaccggcgtgaacgccgacgagtgcaaggagtgcggcaacgccttcagcttccccagcgagatcagaagacacaagagaagccacaccggcgagaagccctacgagtgcaagcagtgcggcaaggtgttcatcagcttcagcagcatccagtaccacaagatgacccacaccggcgagaagccctacgagtgcaagcagtgcggcaaggccttcagatgcggcagccacctgcagaagcacggcagaacccacaccggcgagaagccctacgagtgcagacagtgcggcaaggccttcagatgcaccagcgacctgcagagacacgagaagacccacaccgaggacaagccctacggctgcaagcagtgcggcaagggcttcagatgcgccagccagctgcagatccacgagagaacccacagcggcgagaagccccacgagtgcaaggagtgcggcaaggtgttcaagtacttcagcagcctgagaatccacgagagaacccacaccggcgagaagccccacgagtgcaagcagtgcggcaaggccttcagatacttcagcagcctgcacatccacgagagaacccacaccggcgacaagccctacgagtgcaaggtgtgcggcaaggccttcacctgcagcagcagcatcagataccacgagagaacccacaccggcgagaagccctacgagtgcaagcactgcggcaaggccttcatcagcaactacatcagataccacgagagaacccacaccggcgagaagccctaccagtgcaagcagtgcggcaaggccttcatcagagccagcagctgcagagagcacgagagaacccacaccatcaacagatag

SEQ ID NO: 207863 - DNA, 1611 bp, Artificial Sequence
  derived and/or modified sequence
atgatgtttcaagattccgtcgcttttgaggatgtggccgtgagcttcacgcaggaggagtgggcgctcctcgacccatcccaaaaaaacctgtaccgggacgtgatgcaggagaccttcaaaaatttaactagcgtgggaaagacctggaaggttcaaaatatagaagacgagtataagaatcctaggcggaaccttagcctgatgcgggaaaaactgtgtgagagcaaggaatctcatcactgtggcgagtctttcaaccagatcgcagatgatatgctcaatcgcaagacacttcctggcataactccatgcgagtcctcagtatgtggcgaggttggtaccggccactccagtctcaatacccatattagggctgacactggccataaatcctcagagtatcaggaatacggagaaaacccatacagaaataaggagtgcaagaaagccttctcttacctggatagttttcaatcccatgataaagcttgtacaaaagaaaagccttatgacggcaaggaatgcaccgaaacatttatttctcactcttgtattcagcggcatcgggtcatgcacagcggcgacggaccctacaagtgcaagttttgcggtaaagctttctatttcctcaatttgtgccttattcacgaaagaatccacaccggcgtgaagccttacaaatgtaagcagtgtgggaaggcattcacccggagcaccacgctcccggttcatgaacgtacacacactggtgttaacgcagacgagtgcaaggaatgcggaaacgcattctccttcccctccgaaatcagacgacataaacgctctcacaccggggagaagccatacgaatgtaagcagtgcggcaaagtattcatttccttttcctctattcagtaccataagatgacacacacaggggaaaaaccatacgaatgtaagcagtgcggcaaggccttcagatgcgggagccacttacagaagcatgggcgaactcacacaggagagaaaccctacgaatgccgccaatgcggcaaggcctttcgatgtacatccgatcttcaacgtcatgagaagacccacactgaagacaagccgtacggttgcaagcagtgcgggaagggcttcagatgcgcgagccagctgcaaatccacgagagaactcacagtggcgaaaagcctcatgagtgcaaggaatgcggcaaggtgttcaaatacttttcatctttgcgcattcatgaacgtactcacaccggcgagaagccccatgagtgcaaacaatgtgggaaagcgttcagatacttcagctccctgcatatacatgaacgcactcacactggagataaaccatatgaatgcaaagtttgcggaaaagcctttacttgctccagcagcatacgctatcacgagcgcacacacaccggggagaaaccatacgaatgcaagcactgtggcaaggccttcattagcaactatatacgctatcacgaacgcacacacacaggtgaaaaaccatatcagtgtaagcagtgcggcaaggcgttcatcgtgcccgtgcatgtcgagaacatgaaagagttgattcctttaatcgatgaaaagtccttctag

SEQ ID NO: 207864 - DNA, 1599 bp, Artificial Sequence
  derived and/or modified sequence
atgatgttccaggactctgtggccttcgaggacgtagccgtgagcttcactcaggaggaatgggccctgctggacccgtcccagaagaatctgtatcgggatgtcatgcaagagacattcaagaacctgacctctgtcgggaagacgtggaaggtgcaaaatatagaagacgaatacaaaaatcctcgaagaaatctgtcgcttatgcgcgagaagttgtgcgaatctaaggagtctcaccattgcggagagtctttcaatcaaatcgcagacgatatgctaaatagaaaaactttaccaggaatcacaccgtgcgaatcctctgtgtgcggagaggtaggaacaggacactccagtttgaacacccacattcgggctgacaccgggcataagtcttccgagtatcaagaatacggcgagaacccataccgcaataaggaatgcaagaaggccttctcatatcttgattccttccagtcacacgataaagcctgtactaaggagaagccctatgacggcaaggaatgtacggagacctttatttcgcacagctgtatccagcggcatagagtgatgcactctggtgatggtccatataagtgtaagttttgtgggaaggctttctattttttaaatctgtgcctcatacacgagcggatccatacaggcgtgaagccttacaaatgtaaacaatgcggcaaggccttcacacggtctacaacgttacctgtgcacgagcgcactcacacaggcgttaatgctgatgaatgcaaggagtgcggaaatgcgttttcctttccaagtgagataaggaggcataaacgaagccacacgggtgaaaaaccatatgaatgcaaacagtgtggtaaagtttttatcagtttttcctccatccagtatcacaaaatgacacacacaggcgagaagccttacgagtgcaagcagtgcgggaaggcctttagatgtgggtctcacctgcagaaacatggacgtacccataccggtgagaagccctatgagtgtcggcagtgcggtaaggcgttccggtgtactagcgacctgcagaggcacgaaaagacacatacagaggataagccttacggttgtaaacagtgcgggaagggctttcgatgcgcctctcaattacagatacacgagaggacccactcgggcgagaagccacatgagtgcaaggaatgcggcaaagtcttcaaatactttagttcgctgcgtattcacgagcgaactcacacaggcgaaaagccgcacgagtgcaagcaatgcggaaaagccttccggtatttctcttcgctgcacatccacgagcgaactcataccggagataagccatatgaatgcaaggtgtgcggcaaggcctttacatgttccagctctatcaggtaccacgaacggacacataccggagagaagccctacgaatgtaaacactgtggaaaagcattcatcagcaactatattagataccacgaaagaacacataccggcgaaaaaccctaccagtgcaagcagtgcggtaaagcctttataagagcctccagctgtagggagcacgagcgaacacataccatcaaccgttag

SEQ ID NO: 207865 - DNA, 1611 bp, Artificial Sequence
  derived and/or modified sequence
atgatgttccaggacagcgtggcctttgaagatgtggccgtgtccttcacccaggaggagtgggccctgctggaccccagccagaagaacctgtacagagatgtgatgcaggagaccttcaagaacctgacctctgtgggcaagacctggaaggtgcagaacattgaagatgagtacaagaaccccaggaggaacctgagcctgatgagggagaagctgtgtgagagcaaggagagccaccactgtggggagagcttcaaccagattgctgatgacatgctgaacaggaagaccctgcccggcatcaccccctgtgagagctctgtgtgtggggaggtgggcaccggccacagcagcctgaacacccacatccgggctgacaccggccacaagagcagcgagtaccaggagtatggagagaacccctacagaaacaaggagtgcaagaaggccttctcctacctggacagcttccagagccatgacaaggcctgcaccaaggagaagccctatgatggcaaggaatgtacagagaccttcatcagccacagctgcatccagaggcaccgggtgatgcacagcggagatggcccctacaagtgcaagttctgtgggaaggccttctacttcctgaacctgtgcctgattcatgagcgcatccacactggagtgaagccctacaagtgcaagcagtgtgggaaggccttcaccaggagcaccaccctgcctgtgcatgagaggacccacactggagtgaatgctgatgagtgcaaggaatgtggaaatgccttctccttccccagcgagatcagaagacacaagaggagccacactggagagaagccctatgagtgcaagcagtgtgggaaggtgttcatctccttcagcagcatccagtaccacaagatgacccacactggagagaagccctatgagtgcaagcagtgtgggaaggccttccgctgtggcagccacctgcagaagcacggccgcacccacactggagagaagccctatgagtgccggcagtgtgggaaggccttccgctgcaccagtgacctgcagagacatgagaagacccacacagaggacaagccctacggctgcaagcagtgtgggaagggcttccgctgtgccagccagctgcagatccacgagaggacccacagcggggagaagccccatgagtgcaaggaatgtgggaaggtgttcaagtacttcagcagcctgcgcatccacgagaggacccacactggagagaagccccatgagtgcaagcagtgtgggaaggccttccgctacttcagcagcctgcacatccacgagaggacccacactggagacaagccctatgagtgcaaggtgtgtgggaaggccttcacctgcagcagcagcatccgctaccacgagaggacccacactggagagaagccctatgagtgcaagcactgtgggaaggccttcatcagcaactacatccgctaccacgagaggacccacactggagagaagccctaccagtgcaagcagtgtgggaaggccttcatcgtgcctgtgcacgtggagaacatgaaggagctgatccccctgattgatgagaagagcttctag

SEQ ID NO: 207866 - DNA, 1599 bp, Artificial Sequence
  derived and/or modified sequence
atgatgttccaggacagcgtggcctttgaagatgtggccgtgtccttcacccaggaggagtgggccctgctggaccccagccagaagaacctgtacagagatgtgatgcaggagaccttcaagaacctgacctctgtgggcaagacctggaaggtgcagaacattgaagatgagtacaagaaccccaggaggaacctgagcctgatgagggagaagctgtgtgagagcaaggagagccaccactgtggggagagcttcaaccagattgctgatgacatgctgaacaggaagaccctgcccggcatcaccccctgtgagagctctgtgtgtggggaggtgggcaccggccacagcagcctgaacacccacatccgggctgacaccggccacaagagcagcgagtaccaggagtatggagagaacccctacagaaacaaggagtgcaagaaggccttctcctacctggacagcttccagagccatgacaaggcctgcaccaaggagaagccctatgatggcaaggaatgtacagagaccttcatcagccacagctgcatccagaggcaccgggtgatgcacagcggagatggcccctacaagtgcaagttctgtgggaaggccttctacttcctgaacctgtgcctgattcatgagcgcatccacactggagtgaagccctacaagtgcaagcagtgtgggaaggccttcaccaggagcaccaccctgcctgtgcatgagaggacccacactggagtgaatgctgatgagtgcaaggaatgtggaaatgccttctccttccccagcgagatcagaagacacaagaggagccacactggagagaagccctatgagtgcaagcagtgtgggaaggtgttcatctccttcagcagcatccagtaccacaagatgacccacactggagagaagccctatgagtgcaagcagtgtgggaaggccttccgctgtggcagccacctgcagaagcacggccgcacccacactggagagaagccctatgagtgccggcagtgtgggaaggccttccgctgcaccagtgacctgcagagacatgagaagacccacacagaggacaagccctacggctgcaagcagtgtgggaagggcttccgctgtgccagccagctgcagatccacgagaggacccacagcggggagaagccccatgagtgcaaggaatgtgggaaggtgttcaagtacttcagcagcctgcgcatccacgagaggacccacactggagagaagccccatgagtgcaagcagtgtgggaaggccttccgctacttcagcagcctgcacatccacgagaggacccacactggagacaagccctatgagtgcaaggtgtgtgggaaggccttcacctgcagcagcagcatccgctaccacgagaggacccacactggagagaagccctatgagtgcaagcactgtgggaaggccttcatcagcaactacatccgctaccacgagaggacccacactggagagaagccctaccagtgcaagcagtgtgggaaggccttcatccgggccagcagctgccgggagcacgagaggacccacaccatcaacagatag

SEQ ID NO: 207867 - DNA, 1611 bp, Artificial Sequence
  derived and/or modified sequence
atgatgttccaggacagcgtggccttcgaggacgtggccgtgagctttacacaggaggagtgggcattgctggacccgtcccagaagaacttgtatcgcgatgtcatgcaggaaacctttaaaaaccttacctctgtcggcaagacatggaaggttcagaatatcgaggacgagtataagaaccccaggaggaacctgtccctgatgcgagagaagttgtgtgaatcaaaggagagtcatcactgcggcgagtcctttaaccagattgcagacgacatgctaaaccgcaagacactcccagggataaccccctgtgagtctagcgtgtgcggggaagtgggtacggggcattctagccttaatacacacatcagagccgataccgggcataagtcttcagaataccaagagtatggggagaatccctaccgcaataaggagtgcaagaaagctttttcctacctcgacagctttcagtcacacgacaaagcttgtactaaggaaaagccttacgatgggaaagaatgcacagaaacctttatatcccactcgtgcatccagcgacaccgggtcatgcattctggtgacggaccctataaatgcaagttctgcggcaaggccttttacttccttaatctgtgtttaatccatgagagaatacacaccggcgtgaaaccatacaaatgtaagcagtgcggtaaagccttcacccgatctacaactctccccgtgcacgaaaggactcacacaggcgtaaatgccgatgagtgtaaggagtgcggtaatgcattcagtttcccctccgagatccggcggcacaagagaagccacacaggcgagaaaccgtacgaatgtaagcagtgtggcaaagtttttatctctttctcatcaattcagtaccataaaatgacacacaccggcgaaaaaccctatgagtgcaaacagtgcggcaaagcctttcgttgtggatcccatctccagaagcatgggagaacccacactggagagaagccgtacgagtgccggcagtgtggtaaggcctttcgatgtacctctgaccttcagagacatgagaaaacacatacagaagataaaccctacggctgtaaacagtgcggaaaaggctttcgatgcgcgtcacagctccaaatccacgagcggactcactctggagagaagccacatgagtgcaaagaatgcggtaaagtgtttaaatattttagcagccttaggattcatgagcgtacccacacaggggaaaagccccatgagtgtaagcagtgtgggaaggccttcagatacttctcatcattacacattcatgagcgcacacataccggggataaaccttacgagtgcaaagtgtgtgggaaagcttttacttgcagttcctccatccggtaccacgaaagaacacataccggggagaaaccctatgaatgcaaacactgcggaaaggcattcattagcaattatatccgctaccatgagaggacgcatacgggagagaagccgtatcagtgcaaacagtgtggcaaggcttttatcgtgcccgtgcacgtggaaaacatgaaggagcttattcccctcattgacgagaagtcattctag

SEQ ID NO: 207868 - DNA, 1599 bp, Artificial Sequence
  derived and/or modified sequence
atgatgttccaggacagcgtggccttcgaggacgtggccgtgagcttcacacaagaagagtgggcattgttggatccaagccaaaagaacctgtaccgggatgtcatgcaagagacatttaaaaacttaacctcagtcggcaagacgtggaaagtccagaacattgaggatgaatacaaaaacccccgcagaaacctgagtttaatgagggagaagttatgtgaatctaaggagagccaccattgtggcgagagcttcaatcagatcgccgacgacatgctcaatcgcaagaccctgcctggcataactccctgcgaatctagtgtatgcggcgaggtgggaacgggccattcaagtcttaacacacatattcgggccgacaccgggcataaatccagtgagtatcaagagtacggtgaaaacccatatcgcaacaaggaatgcaaaaaggccttcagctatctggacagctttcagtcccatgacaaggcctgcaccaaggagaaaccatacgatggcaaggaatgtaccgagacttttatatctcactcttgcatacagcgtcatcgtgtcatgcactccggggacggcccgtataagtgtaagttttgtggtaaggctttctattttctcaatctgtgcctaatccacgagcgcatccacaccggagtgaaaccgtataaatgcaaacagtgtggcaaagctttcactaggtccacaactcttcctgttcatgagcggacgcatactggcgttaatgcagacgaatgtaaggagtgtggaaatgccttttcatttccctctgaaataagacgacacaagcgttcacataccggagagaaaccttacgagtgcaagcagtgtggtaaagtatttatcagcttctcctcaatccagtatcataagatgactcacacgggggagaaaccatacgagtgcaagcagtgtggcaaggcctttagatgtggcagccacctgcaaaagcatgggagaacccatactggagaaaaaccctacgaatgtagacagtgtggcaaagcatttaggtgcacaagcgatttgcagcgacacgagaagacgcatactgaagacaagccctacgggtgtaagcaatgcggtaagggatttcgttgcgccagccagttacagatccacgagcgcacgcactccggcgagaagccacacgagtgcaaagagtgcggcaaagtgttcaagtacttctcttccctgcgcatccacgagagaactcacacaggggaaaaaccccacgagtgtaaacagtgcggaaaagctttccgatactttagcagcctgcatatccatgaacggacacacacaggagataaaccctacgagtgtaaagtgtgcggaaaagccttcacttgcagctcttcaatcaggtaccatgaacgcacacataccggtgagaagccctacgaatgtaagcattgcggaaaggcatttataagcaactacatccgataccatgaaaggactcataccggcgagaaaccctaccagtgtaagcagtgtgggaaagcctttatcagagcctcatcctgccgcgagcatgaaaggacccatacgatcaataggtag

SEQ ID NO: 207869 - DNA, 1611 bp, Artificial Sequence
  derived and/or modified sequence
atgatgttccaagatagcgtggccttcgaggacgttgcagtgtccttcacccaggaggaatgggccctgctggacccgagtcagaagaatctgtatcgagatgtcatgcaggagacctttaagaatttaactagcgtcggtaaaacatggaaagtacagaatattgaggacgagtacaagaacccacggagaaacctgtcattgatgagggaaaaactgtgtgaatctaaggaatctcaccactgcggcgaatcttttaatcagattgccgatgatatgctgaatcgcaaaaccctgccaggcattaccccatgcgagtcaagcgtgtgcggtgaggtggggacaggtcactccagcttgaatactcacataagagcagacacaggccacaagagctcagaataccaagaatacggagaaaatccctaccgtaataaggaatgcaagaaggcctttagctatctcgacagtttccaaagtcatgataaggcttgcacaaaagaaaagccgtacgatgggaaagagtgtacggagacatttattagccactcctgtattcaacggcacagggtgatgcacagtggagatggtccctacaagtgtaagttctgtggcaaggcattttactttctgaatttatgtctgatccatgagagaattcacactggcgtgaagccctacaagtgtaaacagtgtggaaaagccttcactcgatcgacaacactgccggtccatgaacgaacccatacaggagtgaatgccgacgaatgcaaagagtgtgggaacgccttctcttttccgagcgaaattcgacggcacaagcgcagtcacaccggcgaaaagccatatgagtgcaagcagtgtgggaaggtgtttatatctttctcatccattcagtaccataagatgacacataccggcgagaagccttacgagtgcaaacagtgtggcaaagccttccgctgtgggtcccacctgcaaaagcatggtaggacccacactggggagaagccttatgaatgtcggcagtgtggcaaggccttcagatgcacatcggatctacaaaggcatgagaaaacccatacagaggataaaccttacggctgcaagcaatgcgggaaggggtttcggtgcgcttcacagctgcagattcacgagaggacccatagcggcgaaaagcctcacgagtgtaaagagtgcggaaaagtgttcaaatactttagtagcctgcggatccacgagagaacacatactggagagaaacctcatgagtgcaaacagtgtggcaaagcattccggtacttttcatcactgcatatccatgagcggactcacaccggagacaagccttacgagtgtaaggtgtgcgggaaagcttttacctgcagcagctctattcgctaccatgagcggacgcacactggggaaaagccttatgagtgtaaacactgtggcaaggccttcatttcgaactatattcggtatcacgagcgaacccatacgggagaaaagccgtaccaatgtaagcagtgtggaaaagcttttatcgttccagttcatgtggagaatatgaaggaactgataccccttatagatgagaaatccttctag

SEQ ID NO: 207870 - DNA, 1599 bp, Artificial Sequence
  derived and/or modified sequence
atgatgttccaggactctgtggcctttgaagatgtggccgtgtcctttactcaggaggagtgggcattgctggacccatcacagaagaacctctatcgcgatgtgatgcaggagaccttcaaaaacctcaccagcgtggggaagacatggaaagtccagaatatcgaggacgagtataagaaccccagacggaacctctcgcttatgcgagaaaagctttgcgagtccaaggaatcacatcattgtggcgagagcttcaaccaaattgccgacgatatgctgaatcgaaagaccctccccggtatcacaccctgtgagagcagcgtctgcggagaagtaggtacaggacacagttcgctcaacactcacattagagcagacacaggacataagtcatctgagtatcaggagtacggagaaaatccctacaggaacaaggagtgcaagaaggctttcagttacctggattcttttcaaagtcacgataaagcctgcactaaagaaaaaccctacgatggcaaagagtgcacagagacttttattagccacagctgcattcagaggcatcgcgtcatgcacagcggcgatggtccctacaaatgtaagttttgcgggaaggctttttacttcctcaacctgtgtctgatccacgaacgaatccacacaggtgtgaaaccatacaaatgcaagcagtgcggaaaagcctttacacggagcactacgttaccggtacatgagagaacccatacgggagtcaatgccgatgagtgcaaggagtgtgggaacgctttcagctttcctagtgagataaggcggcataaacgctctcacaccggcgaaaaaccctacgagtgcaagcaatgcgggaaagtgttcatatcctttagcagcatccagtatcacaaaatgacacacacaggcgagaaaccctacgaatgtaaacaatgtggcaaagcatttagatgtggttcacatttacaaaagcatggacgcacccacactggagagaaaccctacgaatgtcgccagtgcggaaaggcatttcgatgcacctccgatctgcagcgacatgagaagactcatacagaagacaagccttatgggtgtaagcaatgtgggaagggatttcgatgtgcctctcagctgcagattcacgagaggacccatagcggcgagaaaccacacgaatgtaaggaatgcggaaaagtgttcaagtacttctcctcgctccgcatacacgaaagaactcatactggggagaagccgcacgagtgcaaacagtgcgggaaggcattccgatatttttccagtctgcatatccacgagagaactcatacaggcgataagccttacgagtgcaaagtctgtggcaaggcctttacctgttccagctcaatcagataccacgagcgaactcacaccggcgaaaagccatacgaatgtaagcactgcgggaaagcctttattagcaactacatcagataccacgagcgaacgcacaccggcgagaagccatatcaatgtaagcagtgtggaaaagcatttattcgagctagttcctgtcgcgaacacgaacgcactcacactattaaccgatag

SEQ ID NO: 207871 - DNA, 2316 bp, Artificial Sequence
  derived and/or modified sequence
ctactccgagaggccccgggtccctctgccacaacttctgtcgctctgccgcctgcaccgtgacccgcactattcacgggagccctagagaggacaccgggacacccagaagccgggaaatgatgtttcaggattcagtggcctttgaggatgtggctgtcagcttcacccaggaggagtgggctttgctggatccttcccagaagaatctctacagggatgtgatgcaggaaaccttcaagaacctgacctctgtaggaaaaacatggaaagttcagaacattgaagatgagtacaaaaatcccaggagaaatctaagtcttatgagagagaaactctgtgaaagtaaagaaagtcatcactgtggagaaagcttcaaccagattgcagatgacatgctgaacaggaaaactcttcctggaataacaccatgtgaaagcagtgtgtgtggagaagttggcacgggtcattcatctcttaatacgcatatcagagctgacactggacacaagtcatctgagtatcaggaatatggagagaatccatatagaaataaggaatgtaagaaagccttcagttatcttgactcctttcaatcacatgataaagcttgcactaaagagaaaccctatgatggtaaagaatgtacagaaaccttcatttcccattcatgcattcaaagacacagggtaatgcacagtggagatggaccttataaatgtaagttttgtgggaaagccttctattttctcaatttatgtcttatccatgaacgaattcacactggtgtgaaaccatataagtgtaaacaatgtggtaaggcctttactcgttccactacccttccagtacatgaaagaactcacacaggagtgaatgccgatgaatgtaaagaatgtgggaatgcattcagttttcctagtgaaattcgtagacataaaaggtctcacactggagaaaaaccctatgagtgtaagcaatgtgggaaagtcttcatttctttcagttccattcagtatcataagatgactcacactggagagaaaccctatgaatgtaagcagtgtgggaaagcctttagatgtggctcacaccttcaaaagcatggaaggactcacactggagagaaaccctatgaatgtaggcaatgtggtaaagccttcagatgtacctcggaccttcaaaggcatgaaaagacacacactgaggataaaccctatggatgtaagcagtgtgggaaaggctttagatgtgcttcacaacttcaaattcatgaaaggacgcacagtggagagaaaccccatgaatgtaaggaatgtggaaaagtattcaagtatttttcttccttgcgtatacatgaaaggacgcacactggagagaagccccatgaatgtaagcaatgtggaaaagcattcaggtatttctcttccttgcatatacatgaaaggacacacactggagataagccatatgagtgtaaggtatgtggcaaagccttcacttgttccagttccattcgatatcatgaaaggactcacactggagagaaaccctatgaatgtaagcactgtggtaaggcctttatttccaattacattcgatatcatgaaaggactcacactggagagaaaccctatcaatgcaagcaatgtggcaaagcctttattgtgccagttcatgtcgagaacatgaaagaactcataccattaatagatgagaaatccttttagtggaagcaacgggagaagctttctgttgtcccacttcctttgaaacacaagaaaagagagtggtgaaagaacctctggataactgctttttgaattgagaagagagacttgcgataggacaataaaatctagaagaacttggatggtttcgtaatacaattcacctatagccaatcttgcatgagatttcaaaggcacagaaaaggaaggcatcagtcacatattagaggccccacacagggagagaggtgtgtggctacccgcttccagcccattttcctgattctttggcttgttaatcgagaatatcccccaaatcacttgtctctgttcctcagagttgtaggtctccagatatgtccccagtgctccacattaaagatacatgcccactttgctgtttcttcagaaatgttaaaatgtttaccagagaactaataaatgttgttatggctggaaatactcactgatgcccaactcttctatagattgagttggtttaagaggtctactttgtattgcaagcattgttgtttctacggattagcgagcctgttcttgattaaaccaactagatgggagcttg

SEQ ID NO: 207872 - DNA, 3061 bp, Artificial Sequence
  derived and/or modified sequence
agaagcgccggggcggagcccggccaacggtccgtccggaaggaggaggcccattccagcttctacttttgttgctatgcaggttgttgtcgggataccagatttcctactccgagaggccccgggtccctctgccacaacttctgtcgctctgccgcctgcaccgtgacccgcactattcacgggagccctagagaggacaccgggacacccagaagccgggaaatgatgtttcaggattcagtggcctttgaggatgtggctgtcagcttcacccaggaggagtgggctttgctggatccttcccagaagaatctctacagggatgtgatgcaggaaaccttcaagaacctgacctctgtaggaaaaacatggaaagttcagaacattgaagatgagtacaaaaatcccaggagaaatctaagtcttatgagagagaaactctgtgaaagtaaagaaagtcatcactgtggagaaagcttcaaccagattgcagatgacatgctgaacaggaaaactcttcctggaataacaccatgtgaaagcagtgtgtgtggagaagttggcacgggtcattcatctcttaatacgcatatcagagctgacactggacacaagtcatctgagtatcaggaatatggagagaatccatatagaaataaggaatgtaagaaagccttcagttatcttgactcctttcaatcacatgataaagcttgcactaaagagaaaccctatgatggtaaagaatgtacagaaaccttcatttcccattcatgcattcaaagacacagggtaatgcacagtggagatggaccttataaatgtaagttttgtgggaaagccttctattttctcaatttatgtcttatccatgaacgaattcacactggtgtgaaaccatataagtgtaaacaatgtggtaaggcctttactcgttccactacccttccagtacatgaaagaactcacacaggagtgaatgccgatgaatgtaaagaatgtgggaatgcattcagttttcctagtgaaattcgtagacataaaaggtctcacactggagaaaaaccctatgagtgtaagcaatgtgggaaagtcttcatttctttcagttccattcagtatcataagatgactcacactggagagaaaccctatgaatgtaagcagtgtgggaaagcctttagatgtggctcacaccttcaaaagcatggaaggactcacactggagagaaaccctatgaatgtaggcaatgtggtaaagccttcagatgtacctcggaccttcaaaggcatgaaaagacacacactgaggataaaccctatggatgtaagcagtgtgggaaaggctttagatgtgcttcacaacttcaaattcatgaaaggacgcacagtggagagaaaccccatgaatgtaaggaatgtggaaaagtattcaagtatttttcttccttgcgtatacatgaaaggacgcacactggagagaagccccatgaatgtaagcaatgtggaaaagcattcaggtatttctcttccttgcatatacatgaaaggacacacactggagataagccatatgagtgtaaggtatgtggcaaagccttcacttgttccagttccattcgatatcatgaaaggactcacactggagagaaaccctatgaatgtaagcactgtggtaaggcctttatttccaattacattcgatatcatgaaaggactcacactggagagaaaccctatcaatgcaagcaatgtggcaaagcctttattcgtgccagttcatgtcgagaacatgaaagaactcataccattaatagatgagaaatccttttagtggaagcaacgggagaagctttctgttgtcccacttcctttgaaacacaagaaaagagagtggtgaaagaacctctggataactgctttttgaattgagaagagagacttgcgataggacaataaaatctagaagaacttggatggtttcgtaatacaattcacctatagccaatcttgcatgagatttcaaaggcacagaaaaggaaggcatcagtcacatattagaggccccacacagggagagaggtgtgtggctacccgcttccagcccattttcctgattctttggcttgttaatcgagaatatcccccaaatcacttgtctctgttcctcagagttgtaggtctccagatatgtccccagtgctccacattaaagatacatgcccactttgctgtttcttcagaaatgttaaaatgtttaccagagaactaataaatgttgttatggctggaaatactcactgatgcccaactcttctatagattgagttggtttaagaggtctactttgtattgcaagcattgttgtttctacggattagcgagcctgttcttgattaaaccaactagatgggagcttgttcctctgctgcattgtgcagtgattggtctcaccaagggcttttatgtgagaagagccaccttgctcttatcaggaaatttcaagcatttgctgttattcacaactgaatgtaatgtctcacttcgtttttaactttgtatgagtatacctgactaaaaacactaatgcggtttcttggcaacaaatacttctgttcatgtattttagaaataagcttattaactgtttataacaactgcatactaacaattattattttttaatgaagaagctacattacaacctcccattaacatcatgtattagatcaagttgataatgttaccatgttatccggtggtcactgtgagtcagtgttgccatgtggatgtcaggcatatttttcctcatgtagattttacttttcatgcttatattcttagtttttatctggatcatgaattttcatctattctaaataccaaaggtgatctcatgttcttatgagtgacttctgaccaaagaccaccagtggcataagtgtcgtcaaagagggtgtaataatatactgtggtaatgaatatgaccaaaagccatagatgactgtgagatgtgtgagatattaaaagatagtcacatttcgtgagaagagaaaaa

SEQ ID NO: 207873 - protein, 333 aa, Artificial Sequence
  derived and/or modified sequence
MTRDFKPGDLIFAKMKGYPHWPARVDEVPDGAVKPPTNKLPIFFFGTHETAFLGPKDIFPYSENKEKYGKPNKRKGFNEGLWEIDNNPKVKFSSQQAATKQSNASSDVEVEEKETSVSKEDTDHEEKASNEDVTKAVDITTPKAARRGRKRKAEKQVETEEAGVVTTATASVNLKVSPKRGRPAATEVKIPKPRGRPKMVKQPCPSESDIITEEDKSKKKGQEEKQPKKQPKKDEEGQKEEDKPRKEPDKKEGKKEVESKRKNLAKTGVTSTSDSEEEGDDQEGEKKRKGGRNFQTAHRRNMLKGQHEKEAADRKRKQEEQMETEHQTTCNLQ

SEQ ID NO: 207874 - DNA, 1690 bp, Artificial Sequence
  derived and/or modified sequence
cgggcccggtagctgggcccgcgtccgccgcccgcatccccgcgccgccgcatctcctcgccgcctcccgggcttcggacccccggtctcgcccccgaaacatgactcgcgatttcaaacctggagacctcatcttcgccaagatgaaaggttatccccattggccagctcgagtagacgaagttcctgatggagctgtaaagccacccacaaacaaactacccattttcttttttggaactcatgagactgcttttttaggaccaaaggatatatttccttactcagaaaataaggaaaagtatggcaaaccaaataaaagaaaaggttttaatgaaggtttatgggagatagataacaatccaaaagtgaaattttcaagtcaacaggcagcaactaaacaatcaaatgcatcatctgatgttgaagttgaagaaaaggaaactagtgtttcaaaggaagataccgaccatgaagaaaaagccagcaatgaggatgtgactaaagcagttgacataactactccaaaagctgccagaagggggagaaagagaaaggcagaaaaacaagtagaaactgaggaggcaggagtagtgacaacagcaacagcatctgttaatctaaaagtgagtcctaaaagaggacgacctgcagctacagaagtcaagattccaaaaccaagaggcagacccaaaatggtaaaacagccctgtccttcagagagtgacatcattactgaagaggacaaaagtaagaaaaaggggcaagaggaaaaacaacctaaaaagcagcctaagaaggatgaagagggccagaaggaagaagataagccaagaaaagagccggataaaaaagaggggaagaaagaagttgaatcaaaaaggaaaaatttagctaaaacaggggttacttcaacctccgattctgaagaagaaggagatgatcaagaaggtgaaaagaagagaaaaggtgggaggaactttcagactgctcacagaaggaatatgctgaaaggccaacatgagaaagaagcagcagatcgaaaacgcaagcaagaggaacaaatggaaactgagcaccaaacaacatgtaatctacagtaataaaaaatatatctcattttgggctcaaagcattaatccagttactgaaaagagaatacaagtggagcaaacaagagatgaagatcttgatacagactcattggactgaatttcccccttccccccattgatggaagaatgttccagattctaaattgaggacttcattattaatggcattactgtgttatgattaacaaatttcctgtaaggtacacactacatactaaggtcggccatcattcctgttttttttttttttttttttttttaaccaagcttaaaatgaagctttgtgtttgaaagtaataacaagctcagacgaagatggtggttgtacattattcatctagaaaatataaaaattcattttgttttgaagctagttattaaactggaatagcagttatatccctgagaatggggcccttctcttgacattcctttgttgtttaattctttagaatcttaataaatgtttttttaatcctgagagattaaacagtagtagacttgttaagaatgaaactgtaaccaaaattttaaaataaagttttttttaaaaaaaaaaaaaaaaaaaaaaaaaa

SEQ ID NO: 207875 - DNA, 1002 bp, Artificial Sequence
  derived and/or modified sequence
atgacgcgggacttcaaaccaggggatcttattttcgcaaaaatgaaaggatatccccattggcctgcccgagtcgacgaagtacctgatggggctgtaaagccaccgactaacaagctgcctatttttttcttcggtacccatgaaaccgcctttctgggacccaaagacatttttccctatagcgagaataaggagaaatatgggaagcctaataaacggaagggtttcaatgaggggctatgggagattgataataatcccaaggtaaagttctcttcccagcaggccgccacgaagcagtcaaatgcaagcagcgacgttgaagtggaggagaaggaaacttctgtaagtaaggaggatacagaccacgaggaaaaggcttcaaatgaagacgttactaaagctgtcgacatcaccactcccaaggccgcacggagagggagaaagcgtaaggccgagaaacaagtggagactgaggaagcaggcgtcgtcaccaccgcgacggccagcgtcaatctgaaggtgagccccaagcgcggaagacctgccgcgacagaagttaagattcctaagccccggggccggcccaagatggtgaagcagccttgcccatcggagtctgatattattaccgaagaagataagtctaaaaagaagggccaggaagagaaacagcctaagaagcagcccaagaaggatgaggagggacagaaagaggaagacaagccccgtaaagagcctgataagaaggagggcaagaaagaggttgaaagcaaacgaaagaatcttgctaagacaggagtcacttcaacatcggatagtgaagaagagggcgacgaccaggagggcgagaaaaagcgaaagggcggaaggaactttcagacagcccacagaaggaacatgctcaaaggtcagcacgaaaaggaggctgcagaccgcaaaaggaagcaggaggagcagatggagacggaacaccaaacaacttgtaatctgcagtag

SEQ ID NO: 207876 - DNA, 1002 bp, Artificial Sequence
  derived and/or modified sequence
atgaccagagacttcaagccaggcgacctgatttttgccaagatgaaaggctatccacattggcctgcacgcgtggatgaggtaccggatggagcagtgaagccacctacaaacaaattgcctatcttctttttcggcacgcacgagacagctttcctcggccccaaggacatctttccttactccgaaaacaaggagaaatacggaaagcccaataaacggaaaggctttaacgaaggactctgggaaattgataataaccccaaggtgaaattttcctctcaacaggcagccactaaacagagcaatgcctcctccgacgttgaagtcgaggaaaaggagacttccgtttccaaagaggatacagatcacgaagagaaggcaagtaatgaagacgtgaccaaggccgtcgatataaccactcctaaagccgctcgtagaggacggaagcggaaagccgaaaaacaggtggaaactgaagaagccggggtcgtgacaactgctacggctagcgttaatttgaaggtttccccaaaaaggggcaggccggctgctacggaagttaagataccaaagccccgaggcaggcccaaaatggtcaaacagccttgtcccagcgaaagcgacattataaccgaggaggataagagcaagaaaaaaggacaagaggaaaaacaacctaagaaacagccaaagaaggacgaagagggccagaaagaagaggataaacctaggaaagagcccgataagaaagaggggaagaaggaagttgagtcaaaacggaaaaatctcgctaaaacaggcgtgacatccactagcgattcggaggaggagggtgacgatcaggagggcgagaaaaaaaggaaaggtggaagaaatttccaaacagcccaccggagaaacatgctaaaaggccaacacgagaaggaagctgccgatcgcaagcgcaaacaggaagaacagatggagacagagcaccagactacatgcaacctacagtag

SEQ ID NO: 207877 - DNA, 1002 bp, Artificial Sequence
  derived and/or modified sequence
atgacccgggacttcaagccaggggacctgatctttgccaagatgaagggctacccccactggccagcccgggtggatgaggtgcctgatggagctgtgaagccacccaccaacaagctgcccatcttcttcttcggcacccatgaaacagccttcctgggccccaaggacatcttcccctacagcgagaacaaggagaagtatggcaagcccaacaagaggaagggcttcaatgaaggcctgtgggagattgacaacaaccccaaggtgaagttcagcagccagcaggccgccaccaagcagagcaatgccagcagtgatgtggaggtggaggagaaggagacctctgtgtccaaggaggacacagaccacgaggagaaggccagcaatgaagatgtgaccaaggctgtggacatcaccacccccaaggccgcccggcggggcaggaagaggaaggccgagaagcaggtggagacagaggaggccggcgtggtgaccacagccacagcctctgtgaacctgaaggtgagccccaagaggggccggcctgctgccacagaggtgaagatccccaagccccggggccggcccaagatggtgaagcagccctgccccagcgagagtgacatcatcacagaggaggacaagagcaagaagaagggccaggaggagaagcagcccaagaagcagcccaagaaggatgaggagggccagaaggaggaggacaagcccaggaaggagccagacaagaaggagggcaagaaggaggtggagagcaagaggaagaacctggccaagacaggagtgaccagcaccagtgacagcgaggaggagggagatgaccaggagggggagaagaagaggaaaggaggcaggaacttccagacagcccacagaagaaacatgctgaagggccagcacgagaaggaggccgctgacaggaagaggaagcaggaggagcagatggagacagagcaccagaccacctgcaacctgcagtag

SEQ ID NO: 207878 - DNA, 1002 bp, Artificial Sequence
  derived and/or modified sequence
atgacccgggacttcaagcccggcgacctgatcttcgccaagatgaaaggctatccccattggcctgctcgggtggacgaggtgccggacggggccgttaagccccctaccaataagttgcctattttctttttcggtactcatgaaacagccttcctggggcccaaagatatcttcccgtacagcgagaataaagaaaagtacggaaaaccaaataagcgcaaaggattcaatgaaggcctgtgggagattgataacaaccctaaggtcaaattttcaagccagcaggccgccaccaagcagtctaatgcatccagtgatgtggaggtcgaagagaaagagacttccgtctccaaagaagacaccgatcacgaggaaaaggccagcaacgaggatgtgaccaaggccgtggacattacgaccccaaaagcagccagacgagggagaaagagaaaggccgagaagcaggtggagacagaggaggctggcgtcgtgaccacggccacggccagcgtaaacctgaaagtgtccccaaaacgcggccggccagcagcaactgaggtgaaaattcctaagcctcggggacgacctaaaatggtcaaacagccttgccccagcgaatccgacatcatcaccgaggaggacaagtccaagaaaaaaggacaggaagagaagcagcctaagaaacagccgaaaaaggacgaggagggccagaaggaagaagacaagccgagaaaggagccggacaagaaagaaggcaagaaggaagtggaatcgaagaggaagaacttagccaaaactggagtgacatcaacatccgacagcgaggaggagggagatgaccaggagggtgaaaagaagcggaagggcggccgaaactttcagaccgcccatagacgcaatatgctgaaagggcagcacgaaaaggaggcagcggaccgtaaacgcaaacaggaggaacagatggagactgagcaccaaaccacatgcaatctgcagtag

SEQ ID NO: 207879 - DNA, 1002 bp, Artificial Sequence
  derived and/or modified sequence
atgacccgggacttcaagcccggcgacctgatcttcgccaagatgaaaggctaccctcactggccagcgagagtcgacgaggtgcctgatggagccgtaaaaccaccaacaaacaagctccccatctttttttttggcacacacgagacagccttcctggggcccaaagatatctttccgtatagcgagaataaggaaaagtatgggaaaccaaacaaaaggaaaggatttaacgaaggtctctgggagattgacaataacccaaaggtcaagtttagcagccagcaagcagccaccaaacagagcaacgcttcaagcgacgttgaggttgaagagaaggaaacttcagtttccaaagaggatacagaccatgaagaaaaggctagcaatgaagacgtcaccaaggccgtggatatcaccactcccaaagccgccaggaggggccgaaaaaggaaagccgagaagcaggttgagactgaagaggccggagtggtcaccaccgcgaccgcgtcggttaacctcaaagtgtcaccaaaaaggggaagacctgccgccactgaggtcaaaatccctaaaccccgaggtaggcccaagatggtgaagcagccatgccccagtgaatctgacattatcaccgaggaggacaaatcgaagaaaaaaggacaggaagagaagcagccaaaaaagcagccaaaaaaagatgaagaggggcaaaaagaggaggacaagccaagaaaggagcccgataaaaaagaggggaaaaaggaagtcgagtccaaacgtaaaaatctcgccaaaacaggggtgacttctactagcgacagtgaggaagaaggggatgaccaggaaggtgagaagaagagaaaaggtgggcggaacttccagactgcccaccgccggaacatgcttaaggggcaacatgaaaaagaggccgccgaccggaagagaaagcaggaggagcagatggagactgaacaccagacaacatgcaacctacagtag

SEQ ID NO: 207880 - DNA, 1889 bp, Artificial Sequence
  derived and/or modified sequence
ggcgccgagcgggagccgcgcgggagcagcgcagctacggcggcggcagcggcggcgcggttgcgattccgagccgttgagacgcctctgcggcagctggtggcgcaggtggcttgcgtggacgcgggtagaggcgaccggccagcaaccgcagcgtcggcgcccgcggccccggcaggcgcgtcgggacgccccgaggcatcctcccccgcccgcgggcccggtagctgggcccgcgtccgccgcccgcatccccgcgccgccgcatctcctcgccgcctcccgggcttcggacccccggtctcgcccccgaaacatgactcgcgatttcaaacctggagacctcatcttcgccaagatgaaaggttatccccattggccagctcgagtagacgaagttcctgatggagctgtaaagccacccacaaacaaactacccattttcttttttggaactcatgagactgcttttttaggaccaaaggatatatttccttactcagaaaataaggaaaagtatggcaaaccaaataaaagaaaaggttttaatgaaggtttatgggagatagataacaatccaaaagtgaaattttcaagtcaacaggcagcaactaaacaatcaaatgcatcatctgatgttgaagttgaagaaaaggaaactagtgtttcaaaggaagataccgaccatgaagaaaaagccagcaatgaggatgtgactaaagcagttgacataactactccaaaagctgccagaagggggagaaagagaaaggcagaaaaacaagtagaaactgaggaggcaggagtagtgacaacagcaacagcatctgttaatctaaaagtgagtcctaaaagaggacgacctgcagctacagaagtcaagattccaaaaccaagaggcagacccaaaatggtaaaacagccctgtccttcagagagtgacatcattactgaagaggacaaaagtaagaaaaaggggcaagaggaaaaacaacctaaaaagcagcctaagaaggatgaagagggccagaaggaagaagataagccaagaaaagagccggataaaaaagaggggaagaaagaagttgaatcaaaaaggaaaaatttagctaaaacaggggttacttcaacctccgattctgaagaagaaggagatgatcaagaaggtgaaaagaagagaaaaggtgggaggaactttcagactgctcacagaaggaatatgctgaaaggccaacatgagaaagaagcagcagatcgaaaacgcaagcaagaggaacaaatggaaactgagcaccaaacaacatgtaatctacagtaataaaaaatatatctcattttgggctcaaagcattaatccagttactgaaaagagaatacaagtggagcaaacaagagatgaagatcttgatacagactcattggactgaatttcccccttccccccattgatggaagaatgttccagattctaaattgaggacttcattattaatggcattactgtgttatgattaacaaatttcctgtaaggtacacactacatactaaggtcggccatcattcctgttttttttttttttttttttttttaaccaagcttaaaatgaagctttgtgtttgaaagtaataacaagctcagacgaagatggtggttgtacattattcatctagaaaatataaaaattcattttgttttgaagctagttattaaactggaatagcagttatatccctgagaatggggcccttctcttgacattcctttgttgtttaattctttagaatcttaataaatgtttttttaatcctgagagattaaacagtagtagacttgttaagaatgaaactgtaaccaaaattttaaaataaagttttttttaaaaaaaaaa

SEQ ID NO: 207881 - DNA, 1664 bp, Artificial Sequence
  derived and/or modified sequence
cgggcccggtagctgggcccgcgtccgccgcccgcatccccgcgccgccgcatctcctcgccgcctcccgggcttcggacccccggtctcgcccccgaaacatgactcgcgatttcaaacctggagacctcatcttcgccaagatgaaaggttatccccattggccagctcgagtagacgaagttcctgatggagctgtaaagccacccacaaacaaactacccattttcttttttggaactcatgagactgcttttttaggaccaaaggatatatttccttactcagaaaataaggaaaagtatggcaaaccaaataaaagaaaaggttttaatgaaggtttatgggagatagataacaatccaaaagtgaaattttcaagtcaacaggcagcaactaaacaatcaaatgcatcatctgatgttgaagttgaagaaaaggaaactagtgtttcaaaggaagataccgaccatgaagaaaaagccagcaatgaggatgtgactaaagcagttgacataactactccaaaagctgccagaagggggagaaagagaaaggcagaaaaacaagtagaaactgaggaggcaggagtagtgacaacagcaacagcatctgttaatctaaaagtgagtcctaaaagaggacgacctgcagctacagaagtcaagattccaaaaccaagaggcagacccaaaatggtaaaacagccctgtccttcagagagtgacatcattactgaagaggacaaaagtaagaaaaaggggcaagaggaaaaacaacctaaaaagcagcctaagaaggatgaagagggccagaaggaagaagataagccaagaaaagagccggataaaaaagaggggaagaaagaagttgaatcaaaaaggaaaaatttagctaaaacaggggttacttcaacctccgattctgaagaagaaggagatgatcaagaaggtgaaaagaagagaaaaggtgggaggaactttcagactgctcacagaaggaatatgctgaaaggccaacatgagaaagaagcagcagatcgaaaacgcaagcaagaggaacaaatggaaactgagcaccaaacaacatgtaatctacagtaataaaaaatatatctcattttgggctcaaagcattaatccagttactgaaaagagaatacaagtggagcaaacaagagatgaagatcttgatacagactcattggactgaatttcccccttccccccattgatggaagaatgttccagattctaaattgaggacttcattattaatggcattactgtgttatgattaacaaatttcctgtaaggtacacactacatactaaggtcggccatcattcctgttttttttttttttttttttttttaaccaagcttaaaatgaagctttgtgtttgaaagtaataacaagctcagacgaagatggtggttgtacattattcatctagaaaatataaaaattcattttgttttgaagctagttattaaactggaatagcagttatatccctgagaatggggcccttctcttgacattcctttgttgtttaattctttagaatcttaataaatgtttttttaatcctgagagattaaacagtagtagacttgttaagaatgaaactgtaaccaaaattttaaaataaagtttttttt

SEQ ID NO: 207882 - DNA, 1002 bp, Artificial Sequence
  derived and/or modified sequence
atgaccagggacttcaagcccggagatcttatcttcgctaagatgaaaggatacccccattggccagcaagggtagacgaagttccggacggcgctgtgaagccaccaactaacaaattgccaatcttcttctttggcactcacgaaacagcgtttctggggcctaaagacatttttccctactccgagaacaaagagaaatacgggaaaccaaacaagcgcaagggctttaatgaaggactgtgggagatcgacaacaatcccaaagtgaaattcagcagtcaacaagccgctacgaaacagtcaaacgcttcttcagacgtggaggtcgaggagaaggagacatcagtctcaaaggaggacaccgaccatgaggagaaggccagtaacgaggatgttaccaaggccgtagatatcaccacccctaaagctgctcgccgtggccgaaaacggaaggcagagaagcaggtggagactgaagaagcaggcgtcgtgacaacagcgactgcctcagtgaatctaaaggttagccccaaaagaggaaggccggcagccacggaggtgaaaatcccaaagcctagaggtcgacccaagatggtgaagcagccttgtccttctgagagcgacattatcaccgaagaagataagtccaagaagaaaggacaggaggagaaacagccgaagaagcagcccaaaaaggacgaagagggacagaaggaggaggacaaacccaggaaagagccagacaaaaaggaaggcaaaaaggaggtagaaagcaaaagaaagaatctggccaaaaccggggtgacctccacaagcgactctgaggaggagggggacgatcaggaaggagaaaagaagcgaaaagggggacgcaacttccagacggctcatcggaggaatatgctgaagggccagcatgagaaagaagccgctgaccgtaaaaggaaacaagaggaacagatggaaacagaacaccagaccacatgcaatctgcaatag

SEQ ID NO: 207883 - DNA, 1002 bp, Artificial Sequence
  derived and/or modified sequence
atgactcgagactttaagcctggtgacctcatatttgccaagatgaaaggttacccgcattggcccgcacgtgtcgatgaggtccctgatggagcagttaaaccccctaccaacaagctccctattttctttttcggtacccacgagaccgcattcctgggaccaaaggacatctttccctactcggaaaacaaagaaaagtatggtaaacctaacaagaggaaagggttcaatgaaggcctttgggagatcgataataatccaaaggtgaaattcagctcacagcaggccgcaaccaagcagtctaacgcgtcttccgacgtcgaggtcgaggaaaaagagacctcagtcagtaaggaagataccgaccatgaagaaaaagcttcaaatgaggacgtgacgaaagccgtggacattaccacaccgaaagccgcaagacgtggcagaaaacgaaaagccgagaaacaggtggaaacagaggaagccggtgtcgtcactacggccactgccagtgtcaatctgaaggttagcccaaagagaggacgtcctgccgctaccgaagtcaagataccaaaacccagaggcaggccaaaaatggtcaagcaaccttgtccctccgaatctgatattattacggaggaggacaaatccaagaaaaaaggccaggaagaaaagcagcctaagaaacagccaaagaaagatgaggagggtcagaaagaggaggacaagccaagaaaggagcccgataagaaagagggcaagaaggaggttgaaagtaaaaggaaaaacctggccaagacaggggtgacttctactagcgacagtgaagaagaaggcgatgaccaggaaggcgagaagaagcggaaaggcggtcgaaactttcagacagcacaccgcaggaacatgttgaagggacagcatgaaaaagaagccgctgaccgaaagagaaaacaggaggagcagatggaaaccgagcatcagactacctgtaacctccaatag

SEQ ID NO: 207884 - DNA, 1002 bp, Artificial Sequence
  derived and/or modified sequence
atgaccagagacttcaagcccggcgacctgatcttcgccaagatgaagggctacccccactggcccgccagagtggacgaggtgcccgacggcgccgtgaagccccccaccaacaagctgcccatcttcttcttcggcacccacgagaccgccttcctgggccccaaggacatcttcccctacagcgagaacaaggagaagtacggcaagcccaacaagagaaagggcttcaacgagggcctgtgggagatcgacaacaaccccaaggtgaagttcagcagccagcaggccgccaccaagcagagcaacgccagcagcgacgtggaggtggaggagaaggagaccagcgtgagcaaggaggacaccgaccacgaggagaaggccagcaacgaggacgtgaccaaggccgtggacatcaccacccccaaggccgccagaagaggcagaaagagaaaggccgagaagcaggtggagaccgaggaggccggcgtggtgaccaccgccaccgccagcgtgaacctgaaggtgagccccaagagaggcagacccgccgccaccgaggtgaagatccccaagcccagaggcagacccaagatggtgaagcagccctgccccagcgagagcgacatcatcaccgaggaggacaagagcaagaagaagggccaggaggagaagcagcccaagaagcagcccaagaaggacgaggagggccagaaggaggaggacaagcccagaaaggagcccgacaagaaggagggcaagaaggaggtggagagcaagagaaagaacctggccaagaccggcgtgaccagcaccagcgacagcgaggaggagggcgacgaccaggagggcgagaagaagagaaagggcggcagaaacttccagaccgcccacagaagaaacatgctgaagggccagcacgagaaggaggccgccgacagaaagagaaagcaggaggagcagatggagaccgagcaccagaccacctgcaacctgcagtag

SEQ ID NO: 207885 - protein, 350 aa, Artificial Sequence
  derived and/or modified sequence
MVTPCPTSPSSPAARAGRRDNDQNLRAPVKKSRRPRLRRKQPLHPLNPCPLPGDSGICDLFESPSSGSDGAESPSAARGGSPLPGPAQPVAQLDLQTFRDYGQSCYAFRKAQESHFHPREALARQPQVTAESRCKLLSWLIPVHRQFGLSFESLCLTVNTLDRFLTTTPVAADCFQLLGVTSLLIACKQVEVHPPRVKQLLALCCGAFSRQQLCNLECIVLHKLHFTLGAPTISFFLEHFTHARVEAGQAEASEALEAQALARGVAELSLADYAFTSYSPSLLAICCLALADRMLRVSRPVDLRLGDHPEAALEDCMGKLQLLVAINSTSLTHMLPVQICEKCSLPPSSK

SEQ ID NO: 207886 - DNA, 1053 bp, Artificial Sequence
  derived and/or modified sequence
atggtgaccccctgccccaccagccccagcagccccgccgccagagccggcagaagagacaacgaccagaacctgagagcccccgtgaagaagagcagaagacccagactgagaagaaagcagcccctgcaccccctgaacccctgccccctgcccggcgacagcggcatctgcgacctgttcgagagccccagcagcggcagcgacggcgccgagagccccagcgccgccagaggcggcagccccctgcccggccccgcccagcccgtggcccagctggacctgcagaccttcagagactacggccagagctgctacgccttcagaaaggcccaggagagccacttccaccccagagaggccctggccagacagccccaggtgaccgccgagagcagatgcaagctgctgagctggctgatccccgtgcacagacagttcggcctgagcttcgagagcctgtgcctgaccgtgaacaccctggacagattcctgaccaccacccccgtggccgccgactgcttccagctgctgggcgtgaccagcctgctgatcgcctgcaagcaggtggaggtgcacccccccagagtgaagcagctgctggccctgtgctgcggcgccttcagcagacagcagctgtgcaacctggagtgcatcgtgctgcacaagctgcacttcaccctgggcgcccccaccatcagcttcttcctggagcacttcacccacgccagagtggaggccggccaggccgaggccagcgaggccctggaggcccaggccctggccagaggcgtggccgagctgagcctggccgactacgccttcaccagctacagccccagcctgctggccatctgctgcctggccctggccgacagaatgctgagagtgagcagacccgtggacctgagactgggcgaccaccccgaggccgccctggaggactgcatgggcaagctgcagctgctggtggccatcaacagcaccagcctgacccacatgctgcccgtgcagatctgcgagaagtgcagcctgccccccagcagcaagtag

SEQ ID NO: 207887 - DNA, 1433 bp, Artificial Sequence
  derived and/or modified sequence
agtgagaggccgggggtgtggtagagagaaggagccggccgggtacttaggaccgcgccagcctctgagcccggcctccttcgcactttcgagtgcgcgtttgctgcccgccgcagcccgggcgttgaaggtagtaaagcggccacccggccgcatcatggtgaccccctgtcccaccagcccctcgagccccgccgcccgagcggggaggcgggacaacgaccagaaccttcgcgccccggtgaagaagagcaggcgtccgcgcctccggaggaagcagccgctgcatcccctgaacccgtgcccgctcccgggagactccggcatttgcgacctgttcgagtcccccagctccggctcagacggcgcagagagcccctctgcggcgcggggtggtagccccctgcccggcccggcccagcccgtggcgcagctagatctacagaccttccgcgactacggccagagctgctacgccttccgcaaggcgcaggagagccacttccacccgcgggaggcgctggcacggcagccacaagtgacggcggaatcccgctgtaagctgctcagctggctgatcccggtgcaccgccaattcggcctctccttcgagtcgctgtgcctgacggtgaacactctggaccgcttcctcaccaccacgccggtggctgcagactgcttccagctgcttggggtcacctccttgctcatcgcttgcaaacaggtggaggtgcacccgccgcgcgtgaagcagcttctggccctctgctgcggcgccttctcccggcagcagctctgcaacctcgagtgcatcgtgctgcacaagctgcacttcaccctgggtgcgcccaccattagcttcttcctggagcatttcacgcacgctcgcgtggaggcggggcaggctgaggcctccgaagctctggaagcgcaagccctggcgcggggggtggcagagctgagtctggccgactatgccttcaccagctactccccttccctcctggcgatctgctgcctggcgctggcggaccgcatgctgcgggtctcgcggcccgtggacttgcgactgggagaccacccggaggcggcgctggaggactgtatgggcaagttgcagctgctggtggccataaacagtacttccttgactcacatgctgcccgttcagatctgcgagaagtgcagcctgcccccgagctcgaaataaaacagatccttcgtttccttttagtccctggcccggctgctggacctctcccgtagcctcagaagagtgcagtactggtccacagagaaggcttcaggacctgcttggtcagctgcaggttgtaaatagtgtacgatactagcatctggtattttatttattttgcagcgagcacatgaggaagctgagtctttcaccaataaacagttgtggtttgtctaaa

SEQ ID NO: 207888 - DNA, 1053 bp, Artificial Sequence
  derived and/or modified sequence
atggtgaccccatgtcccacatctccaagctcacccgccgcccgtgcgggccgccgagataacgaccaaaatttacgggctccagtgaaaaagtctcgccggccacggctgaggaggaagcagccgctgcacccattgaacccctgtccgctccccggcgactcaggcatttgcgatctgttcgagagtccttcgtccggctccgacggcgccgagagcccttcagccgccagagggggatctcctctccctggcccggcacagcctgtggctcagttggatctgcagacgtttagggactatgggcagtcctgttatgccttcagaaaggcccaggaaagccatttccatcctagagaggccttagcccgtcaacctcaagtcaccgctgagtcacgctgtaagctactgtcttggctgattcccgtgcatagacaatttggtcttagcttcgagtcgctgtgtctcactgtaaacacattggaccggtttctcacaacaacccccgtcgccgctgattgctttcagcttctcggagttacatctttattgattgcgtgcaaacaagtcgaagtacacccccctcgggtgaagcagctgctggcactttgctgcggcgcctttagtcgccaacaactgtgtaacctcgagtgcatcgtgttgcacaagctccatttcaccctgggtgcacccaccatatcgttcttcctcgagcactttactcatgctagagtggaagcaggccaagcagaagccagcgaggccttggaggcgcaggcactcgcacggggtgtcgccgagttaagtctggcagattatgctttcaccagctactccccatctctgttggccatctgctgtctggctctggcagatcgtatgttgcgggtctcaagacctgtggacttaagattgggtgatcatcctgaagcagcactggaggactgcatggggaagctacaactgcttgtagctattaatagcacaagcttgacccatatgttgccagtgcagatctgtgagaagtgctccctgcccccgtcgagtaagtag

SEQ ID NO: 207889 - DNA, 1053 bp, Artificial Sequence
  derived and/or modified sequence
atggtgaccccctgccccaccagccccagcagccctgctgcccgggccggccggcgggacaatgaccagaacctgcgggcccctgtgaagaagagcagaagaccccggctgcggaggaagcagcccctgcaccccctgaacccctgccccctgcccggggacagcggcatctgtgacctgtttgagagccccagcagcggcagtgatggagctgagagccccagcgctgcccggggcggcagccccctgcccggccctgcccagcctgtggcccagctggacctgcagaccttccgggactatggccagagctgctacgccttcaggaaggcccaggagagccacttccacccccgggaggccctggcccggcagccccaggtgacagctgagagccgctgcaagctgctgtcctggctgatccctgtgcaccggcagtttggcctgagctttgagagcctgtgcctgactgtgaacaccctggaccgcttcctgaccaccacccctgtggccgctgactgcttccagctgctgggcgtgaccagcctgctgattgcctgcaagcaggtggaggtgcaccccccccgggtgaagcagctgctggccctgtgctgcggggccttcagccggcagcagctgtgcaacctggagtgcatcgtgctgcacaagctgcacttcaccctgggcgcccccaccatctccttcttcctggagcacttcacccacgcccgggtggaggccggccaggccgaggccagcgaggccctggaggcccaggccctggcccggggcgtggccgagctgagcctggccgactatgccttcaccagctacagccccagcctgctggccatctgctgcctggccctggccgacaggatgctgcgggtgtccaggcctgtggacctgcggctgggggaccaccctgaggccgccctggaggactgcatgggcaagctgcagctgctggtggccatcaacagcaccagcctgacccacatgctgcctgtgcagatctgtgagaagtgcagcctgccccccagcagcaagtag

SEQ ID NO: 207890 - DNA, 1053 bp, Artificial Sequence
  derived and/or modified sequence
atggtgaccccctgccccaccagccccagcagccccgccgcccgggctggaaggagagataacgatcagaacctacgggctccagtgaaaaaatcaaggcgaccccgcttgcggcgaaaacagccactgcacccacttaatccttgtcccctgccaggagatagcggcatctgcgacctgtttgagagcccttccagcggttcagacggcgcagaatcaccctctgctgccagaggcggcagccccctgcctggcccggcacaacccgtcgctcagttagacctccaaacgtttcgagactatgggcagagctgctatgcgttcagaaaggcccaagaatctcactttcacccacgagaggcattggcccggcagccccaggtgaccgcagagtccaggtgcaagctcttgagttggttaattccagtccaccggcagttcgggctgtccttcgagtctctttgcctcacagttaacaccttggatcggtttctgaccacgacaccagtcgccgcagattgtttccagctgctgggagtgacaagtctgttgatcgcttgcaaacaggtggaggtccaccctcctcgtgtgaaacagcttctggcactgtgctgtggagccttttcacgccaacagctgtgcaatcttgagtgtatcgtgctgcacaaacttcacttcacgttgggcgcccctaccatctccttctttttggagcattttactcacgcaagagtggaggcaggccaggcagaggcatctgaagctctggaggcccaggccctggccagaggagtcgcggagttgtcactggcagactatgcttttacttcatactccccttcactgctcgcgatctgctgcctggcccttgcagacagaatgcttcgtgtttcaaggcctgtggatctacgcctcggcgaccatcctgaagccgcattggaggattgtatgggtaagcttcagctgctggtggcgatcaattcgacctcattgacccacatgttacctgttcagatttgtgagaaatgctccttacccccctcatcgaaatag

SEQ ID NO: 207891 - DNA, 1053 bp, Artificial Sequence
  derived and/or modified sequence
atggttaccccatgtcctaccagtccaagttccccagctgcaagagcaggcaggcgggacaatgaccagaacttgagagctccagtcaagaagtctcgcagacctagactccgcagaaaacagcctctccatccactgaatccgtgtcccctcccgggagacagcggcatttgcgatctatttgagtcccctagctctggctctgatggagccgagagcccctccgcagctagggggggttcccccctgcctggaccagctcaaccagtagcccagctggatttacagacatttagggattacggacagtcctgctacgcttttagaaaggcccaggagtcccactttcaccctcgggaagccctggcgagacagccacaggtcaccgctgaaagcaggtgtaagctgctaagctggctcatcccagtgcaccggcagttcgggttgagcttcgaaagcctttgcctgacagttaatacgctcgatcggtttttgacaacgacccctgtggccgcagactgctttcagctcctcggcgtcacttctctgttgattgcctgcaaacaagtggaggtgcatccgcctcgggtgaagcagctgctcgctctgtgttgcggggctttctcaaggcaacagctgtgcaatcttgagtgcattgtcttacacaagctgcatttcacccttggggctccaaccatatcgttttttcttgagcactttacccacgcacgcgtcgaggcgggacaggcagaagcctccgaagctctcgaagctcaggccctcgccagaggggtcgccgaattgtctctcgctgactatgcctttacatcatactcaccaagcctgcttgccatctgttgcttggctcttgcggacagaatgctgagggtttcaaggccagtggacttaagactgggcgaccacccggaagctgccctcgaggattgtatgggaaaactccaactgctggttgccattaattccaccagtctcacccacatgctgcccgtgcagatttgcgaaaaatgcagtctccccccatcctctaaatag

SEQ ID NO: 207892 - protein, 504 aa, Artificial Sequence
  derived and/or modified sequence
MLDNYRNLVFLGIAVSKPDLITCLEQGKEPCNMKRHAMVAKPPVVCSHFAQDLWPKQGLKDSFQKVILRRYGKYGHENLQLRKGCKSADEHKVHKRGYNGLNQCLTTTQSKIFQCDKYVKVLHKFSNSNIHKKRQTGKKPFKCKECGKSCCILSQLTQHKKTATRVNFYKCKTCGKAFNQFSNLTKHKIIHPEVNPYKCEECGKAFNQSLTLTKHKKIHTEEKPYKCEDCGKVFSVFSVLTKHKIIHTGTKPYNCEECGKGFSIFSTLTKHKIIHTGEKPYKCNECGKAFNWSSTLTKHKRIHTGEKPYKCEECGKAFNQSSTLTRHKIVHTGEKPYKCEECGKAFKRSTTLTKHKRIYTKEKPYKCEECGKAFSVFSTLTKHKIIHTGAKPYKCEECGSAFRAFSTLTEHKRVHTGEKPYKCNECGKAFNWSSTLTKHKRIHTGEKPYKCEECGKAFNRSSNLTRHKKIHTGEKPYKPKRCDSAFDNTPNFSRHKRNHMGEKS

SEQ ID NO: 207893 - protein, 569 aa, Artificial Sequence
  derived and/or modified sequence
MSSAPRGPPSVAPLPAGIGRSTAKTPGLPGSLEMGPLTFRDVAIEFSLEEWQCLDTSQQNLYRNVMLDNYRNLVFLGIAVSKPDLITCLEQGKEPCNMKRHAMVAKPPVVCSHFAQDLWPKQGLKDSFQKVILRRYGKYGHENLQLRKGCKSADEHKVHKRGYNGLNQCLTTTQSKIFQCDKYVKVLHKFSNSNIHKKRQTGKKPFKCKECGKSCCILSQLTQHKKTATRVNFYKCKTCGKAFNQFSNLTKHKIIHPEVNPYKCEECGKAFNQSLTLTKHKKIHTEEKPYKCEDCGKVFSVFSVLTKHKIIHTGTKPYNCEECGKGFSIFSTLTKHKIIHTGEKPYKCNECGKAFNWSSTLTKHKRIHTGEKPYKCEECGKAFNQSSTLTRHKIVHTGEKPYKCEECGKAFKRSTTLTKHKRIYTKEKPYKCEECGKAFSVFSTLTKHKIIHTGAKPYKCEECGSAFRAFSTLTEHKRVHTGEKPYKCNECGKAFNWSSTLTKHKRIHTGEKPYKCEECGKAFNRSSNLTRHKKIHTGEKPYKPKRCDSAFDNTPNFSRHKRNHMGEKS

SEQ ID NO: 207894 - protein, 81 aa, Artificial Sequence
  derived and/or modified sequence
MGPLTFRDVAIEFSLEEWQCLDTSQQNLYRNVMLDNYRNLVFLGIAVSKPDLITCLEQGKEPCNMKRHAMVAKPPGWSAVA

SEQ ID NO: 207895 - protein, 238 aa, Artificial Sequence
  derived and/or modified sequence
MKNVANTVTISHILPHIKIIHTEEKPDKCEECNKVFNWSSTHTKYKRIHTEDKFYKYEECDKSFKNISTLITHKIIYVVEKFYKCEECGKVFFFFLKWSLTLSPKLECNGAISVHCNLRLLGSSDSLASTSQAAGIAGACHHAQLIFVFLVETGFHHFDQAGFELLTSSDPPALASQSAPKCWDYKHEPLSPVECGKVFNKLSNHTGEKLYKPKRHDSALENTLNFSKHKRNHSVKKP

SEQ ID NO: 207896 - DNA, 1515 bp, Artificial Sequence
  derived and/or modified sequence
atgctggacaactacagaaacctggtgttcctgggcatcgccgtgagcaagcccgacctgatcacctgcctggagcagggcaaggagccctgcaacatgaagagacacgccatggtggccaagccccccgtggtgtgcagccacttcgcccaggacctgtggcccaagcagggcctgaaggacagcttccagaaggtgatcctgagaagatacggcaagtacggccacgagaacctgcagctgagaaagggctgcaagagcgccgacgagcacaaggtgcacaagagaggctacaacggcctgaaccagtgcctgaccaccacccagagcaagatcttccagtgcgacaagtacgtgaaggtgctgcacaagttcagcaacagcaacatccacaagaagagacagaccggcaagaagcccttcaagtgcaaggagtgcggcaagagctgctgcatcctgagccagctgacccagcacaagaagaccgccaccagagtgaacttctacaagtgcaagacctgcggcaaggccttcaaccagttcagcaacctgaccaagcacaagatcatccaccccgaggtgaacccctacaagtgcgaggagtgcggcaaggccttcaaccagagcctgaccctgaccaagcacaagaagatccacaccgaggagaagccctacaagtgcgaggactgcggcaaggtgttcagcgtgttcagcgtgctgaccaagcacaagatcatccacaccggcaccaagccctacaactgcgaggagtgcggcaagggcttcagcatcttcagcaccctgaccaagcacaagatcatccacaccggcgagaagccctacaagtgcaacgagtgcggcaaggccttcaactggagcagcaccctgaccaagcacaagagaatccacaccggcgagaagccctacaagtgcgaggagtgcggcaaggccttcaaccagagcagcaccctgaccagacacaagatcgtgcacaccggcgagaagccctacaagtgcgaggagtgcggcaaggccttcaagagaagcaccaccctgaccaagcacaagagaatctacaccaaggagaagccctacaagtgcgaggagtgcggcaaggccttcagcgtgttcagcaccctgaccaagcacaagatcatccacaccggcgccaagccctacaagtgcgaggagtgcggcagcgccttcagagccttcagcaccctgaccgagcacaagagagtgcacaccggcgagaagccctacaagtgcaacgagtgcggcaaggccttcaactggagcagcaccctgaccaagcacaagagaatccacaccggcgagaagccctacaagtgcgaggagtgcggcaaggccttcaacagaagcagcaacctgaccagacacaagaagatccacaccggcgagaagccctacaagcccaagagatgcgacagcgccttcgacaacacccccaacttcagcagacacaagagaaaccacatgggcgagaagagctag

SEQ ID NO: 207897 - DNA, 1710 bp, Artificial Sequence
  derived and/or modified sequence
atgagcagcgcccccagaggcccccccagcgtggcccccctgcccgccggcatcggcagaagcaccgccaagacccccggcctgcccggcagcctggagatgggccccctgaccttcagagacgtggccatcgagttcagcctggaggagtggcagtgcctggacaccagccagcagaacctgtacagaaacgtgatgctggacaactacagaaacctggtgttcctgggcatcgccgtgagcaagcccgacctgatcacctgcctggagcagggcaaggagccctgcaacatgaagagacacgccatggtggccaagccccccgtggtgtgcagccacttcgcccaggacctgtggcccaagcagggcctgaaggacagcttccagaaggtgatcctgagaagatacggcaagtacggccacgagaacctgcagctgagaaagggctgcaagagcgccgacgagcacaaggtgcacaagagaggctacaacggcctgaaccagtgcctgaccaccacccagagcaagatcttccagtgcgacaagtacgtgaaggtgctgcacaagttcagcaacagcaacatccacaagaagagacagaccggcaagaagcccttcaagtgcaaggagtgcggcaagagctgctgcatcctgagccagctgacccagcacaagaagaccgccaccagagtgaacttctacaagtgcaagacctgcggcaaggccttcaaccagttcagcaacctgaccaagcacaagatcatccaccccgaggtgaacccctacaagtgcgaggagtgcggcaaggccttcaaccagagcctgaccctgaccaagcacaagaagatccacaccgaggagaagccctacaagtgcgaggactgcggcaaggtgttcagcgtgttcagcgtgctgaccaagcacaagatcatccacaccggcaccaagccctacaactgcgaggagtgcggcaagggcttcagcatcttcagcaccctgaccaagcacaagatcatccacaccggcgagaagccctacaagtgcaacgagtgcggcaaggccttcaactggagcagcaccctgaccaagcacaagagaatccacaccggcgagaagccctacaagtgcgaggagtgcggcaaggccttcaaccagagcagcaccctgaccagacacaagatcgtgcacaccggcgagaagccctacaagtgcgaggagtgcggcaaggccttcaagagaagcaccaccctgaccaagcacaagagaatctacaccaaggagaagccctacaagtgcgaggagtgcggcaaggccttcagcgtgttcagcaccctgaccaagcacaagatcatccacaccggcgccaagccctacaagtgcgaggagtgcggcagcgccttcagagccttcagcaccctgaccgagcacaagagagtgcacaccggcgagaagccctacaagtgcaacgagtgcggcaaggccttcaactggagcagcaccctgaccaagcacaagagaatccacaccggcgagaagccctacaagtgcgaggagtgcggcaaggccttcaacagaagcagcaacctgaccagacacaagaagatccacaccggcgagaagccctacaagcccaagagatgcgacagcgccttcgacaacacccccaacttcagcagacacaagagaaaccacatgggcgagaagagctag

SEQ ID NO: 207898 - DNA, 246 bp, Artificial Sequence
  derived and/or modified sequence
atgggccccctgaccttcagagacgtggccatcgagttcagcctggaggagtggcagtgcctggacaccagccagcagaacctgtacagaaacgtgatgctggacaactacagaaacctggtgttcctgggcatcgccgtgagcaagcccgacctgatcacctgcctggagcagggcaaggagccctgcaacatgaagagacacgccatggtggccaagccccccggctggagcgccgtggcctag

SEQ ID NO: 207899 - DNA, 1515 bp, Artificial Sequence
  derived and/or modified sequence
atgttggacaactaccgcaacctggtcttcctggggatcgccgtaagcaagccagacctgataacctgtctagaacaggggaaagagccttgcaacatgaagagacatgccatggtggccaagccacccgtcgtgtgttcccattttgcacaagacctatggccaaagcagggattgaaagatagttttcagaaagtgattctgcgaagatatggaaaatatggccacgagaacctgcaactgaggaaagggtgcaagagcgccgatgaacacaaggtgcacaagcgggggtataatggcttaaaccaatgcctcactactacacagagcaagatattccagtgcgataaatatgtcaaggttctgcacaaattcagcaattcaaacatccataaaaaacgccagacaggaaaaaagccttttaaatgtaaagagtgtggcaaaagctgctgcatcctctcacagttgactcaacataagaagactgctaccagggtgaacttctacaaatgcaagacctgcgggaaagccttcaaccagttctccaacctcacgaagcacaagatcattcatcctgaggtcaacccctacaagtgtgaggaatgcggcaaggcgttcaaccagagtctgacattaacgaaacataagaagattcatacagaggagaagccttacaagtgtgaagactgtggcaaggtgttttccgttttttcagtgctgaccaagcataaaatcatccatacagggaccaaaccttataattgcgaggagtgcggaaaaggtttttcgatttttagcactctgacaaaacataaaatcatccatacaggtgagaagccctataagtgtaacgagtgcggcaaggccttcaattggagtagcacgctgaccaaacacaagagaatccatactggggaaaaaccctacaaatgcgaagagtgtggaaaagccttcaaccagagcagtacactaacgcggcataaaattgtccacaccggagagaaaccatacaagtgtgaagagtgtgggaaggctttcaagcgctccaccacactgaccaagcataagcggatctatactaaggagaagccctataagtgtgaggaatgtggcaaagctttttctgtgttcagcacgttgaccaagcataagatcattcataccggagcaaagccctacaagtgcgaggaatgcggctccgcttttagggccttctctaccctcactgaacacaagagagtccatacaggcgagaaaccctataagtgtaacgaatgtggaaaggcattcaattggtccagtacattgaccaaacacaagcgaattcatacaggcgagaagccttacaagtgtgaggagtgcggaaaagcatttaaccggtcttcgaacctcacgcgccataagaaaatccatactggtgagaagccatataagcccaagagatgcgactcagcattcgacaacacccctaatttcagccgccataaacgaaaccatatgggtgagaagtcatag

SEQ ID NO: 207900 - DNA, 1710 bp, Artificial Sequence
  derived and/or modified sequence
atgtcctcagccccgcgtggccctcccagtgtcgcccctctgccagctgggatagggaggtccacagctaaaactcccggcctgcccgggagcctagagatggggcctctgacattcagagatgtggccatagagttctctttggaggaatggcagtgccttgataccagccagcagaacctgtaccgcaatgttatgctcgataattatcggaaccttgtcttcttgggcatcgctgtaagcaagcctgacctgatcacgtgtctggagcaggggaaggagccctgtaatatgaaacgccacgctatggttgcgaaaccgcctgtggtatgttcccattttgcacaagacctatggcccaagcagggcctgaaggattcattccagaaagtgattctgaggcgatatgggaagtatggccatgagaatctgcaactcagaaagggctgtaagtcagccgatgagcacaaagttcacaagcgcgggtataatggtttaaatcaatgcttgacaactacacagtcaaagatctttcagtgcgacaaatatgtgaaagtcctgcataaattcagtaattccaacatccataagaagaggcagactgggaagaagccttttaaatgcaaggaatgcggcaagagctgctgcattcttagtcagctgacccagcacaaaaaaaccgcgacaagggtgaatttctataagtgtaagacctgcggtaaagcatttaaccagttttcgaacctaaccaagcacaaaattattcaccctgaggtcaacccatacaagtgtgaagagtgcggcaaagcatttaaccagagcctcacccttaccaaacataaaaagatccacaccgaagaaaaaccttacaaatgtgaggactgcggtaaagtgttttcggttttttcggtgctgaccaagcataaaataattcacaccggcacgaagccatacaactgcgaagagtgtggtaagggtttttccatcttttccaccctcaccaaacataaaataattcacaccggtgagaagccttataagtgtaatgaatgtggcaaagcctttaactggtcttcaactctcaccaaacacaaacgtatacacactggcgagaaaccatataaatgcgaggaatgcggtaaagcatttaaccaatcctcaactctgactagacacaagatcgtgcacacaggcgaaaagccatataagtgtgaagagtgcgggaaagccttcaaaagatcgacgacgctcactaagcacaaaagaatatacaccaaggaaaagccctacaaatgcgaagagtgcggaaaagcctttagtgtgttcagcacccttacaaagcataaaataatccatactggcgcaaaaccttacaaatgtgaggagtgcggatcagcatttcgagcttttagcaccctgactgaacataaaagggtccatacaggtgagaagccatataagtgtaacgagtgcgggaaggcctttaattggtctagcaccctgaccaagcacaaaaggattcacaccggcgagaagccctataagtgcgaggaatgcgggaaggcttttaatcgaagtagcaacttgactcgtcataaaaaaattcacaccggggaaaaaccatacaaacctaaaaggtgtgactctgcctttgataatactcccaatttcagtcgccacaagcgaaaccatatgggcgagaaaagctag

SEQ ID NO: 207901 - DNA, 246 bp, Artificial Sequence
  derived and/or modified sequence
atgggccccctcactttccgtgatgtcgcaatcgagtttagcctggaggagtggcaatgtctggatacctctcagcagaacctgtatagaaacgtgatgctggacaactatcggaacctggtatttcttggtatcgctgtgtctaaaccagacctgatcacctgcttggagcaggggaaagaaccgtgcaacatgaaaaggcacgcaatggtggccaagccacctgggtggtcagctgttgcttag

SEQ ID NO: 207902 - DNA, 1515 bp, Artificial Sequence
  derived and/or modified sequence
atgctggacaactacagaaacctggtgttcctgggcattgctgtgtccaagccagacctgatcacctgcctggagcagggcaaggagccctgcaacatgaagagacatgccatggtggccaagccccctgtggtgtgcagccactttgcccaggacctgtggcccaagcagggcctgaaggacagcttccagaaggtgatcctgcggcgctatggcaagtatggccacgagaacctgcagctgaggaagggctgcaagtctgcagatgagcacaaggtgcacaagaggggctacaacggcctgaaccagtgcctgaccaccacccagagcaagatcttccagtgtgacaagtatgtgaaggtgctgcacaagttcagcaacagcaacatccacaagaagaggcagacaggcaagaagcccttcaagtgcaaggaatgtgggaagagctgctgcatcctgagccagctgacccagcacaagaagacagccaccagggtgaacttctacaagtgcaagacctgtgggaaggccttcaaccagttcagcaacctgaccaagcacaagatcatccaccctgaggtgaacccctacaagtgtgaagaatgtgggaaggccttcaaccagagcctgaccctgaccaagcacaagaagatccacacagaggagaagccctacaagtgtgaggactgtgggaaggtgttttctgtgttttctgtgctgaccaagcacaagatcatccacacaggcaccaagccctacaactgtgaagaatgtgggaagggcttcagcatcttcagcaccctgaccaagcacaagatcatccacactggagagaagccctacaagtgcaatgaatgtgggaaggccttcaactggagcagcaccctgaccaagcacaagaggatccacactggagagaagccctacaagtgtgaagaatgtgggaaggccttcaaccagagcagcaccctgaccaggcacaagatcgtgcacactggagagaagccctacaagtgtgaagaatgtgggaaggccttcaagaggagcaccaccctgaccaagcacaagaggatctacaccaaggagaagccctacaagtgtgaagaatgtgggaaggccttctctgtgttcagcaccctgaccaagcacaagatcatccacactggagccaagccctacaagtgtgaagaatgtggcagcgccttccgggccttcagcaccctgacagagcacaagagggtgcacactggagagaagccctacaagtgcaatgaatgtgggaaggccttcaactggagcagcaccctgaccaagcacaagaggatccacactggagagaagccctacaagtgtgaagaatgtgggaaggccttcaacagaagcagcaacctgaccaggcacaagaagatccacactggagagaagccctacaagcccaagagatgtgacagcgcctttgacaacacccccaacttcagccgccacaagaggaaccacatgggagagaagagctag

SEQ ID NO: 207903 - DNA, 1710 bp, Artificial Sequence
  derived and/or modified sequence
atgagcagcgccccccggggcccccccagcgtggcccccctgcctgctggcatcggccgcagcacagccaagaccccaggcctgcccggcagcctggagatgggccccctgaccttcagagatgtggccatcgagttcagcctggaggagtggcagtgcctggacaccagccagcagaacctgtacagaaatgtgatgctggacaactacagaaacctggtgttcctgggcattgctgtgtccaagccagacctgatcacctgcctggagcagggcaaggagccctgcaacatgaagagacatgccatggtggccaagccccctgtggtgtgcagccactttgcccaggacctgtggcccaagcagggcctgaaggacagcttccagaaggtgatcctgcggcgctatggcaagtatggccacgagaacctgcagctgaggaagggctgcaagtctgcagatgagcacaaggtgcacaagaggggctacaacggcctgaaccagtgcctgaccaccacccagagcaagatcttccagtgtgacaagtatgtgaaggtgctgcacaagttcagcaacagcaacatccacaagaagaggcagacaggcaagaagcccttcaagtgcaaggaatgtgggaagagctgctgcatcctgagccagctgacccagcacaagaagacagccaccagggtgaacttctacaagtgcaagacctgtgggaaggccttcaaccagttcagcaacctgaccaagcacaagatcatccaccctgaggtgaacccctacaagtgtgaggagtgtgggaaggccttcaaccagagcctgaccctgaccaagcacaagaagatccacacagaggagaagccctacaagtgtgaggactgtgggaaggtgttcagcgtcttctctgtgctgaccaagcacaagatcatccacacaggcaccaagccctacaactgtgaggagtgtgggaagggcttcagcatcttcagcaccctgaccaagcacaagatcatccacactggagagaagccctacaagtgcaatgaatgtgggaaggccttcaactggagcagcaccctgaccaagcacaagaggatccacactggagagaagccctacaagtgtgaggagtgtgggaaggccttcaaccagagcagcaccctgaccaggcacaagatcgtgcacactggagagaagccctacaagtgtgaggagtgtgggaaggccttcaagaggagcaccaccctgaccaagcacaagaggatctacaccaaggagaagccctacaagtgtgaggagtgtgggaaggccttcagcgtcttcagcaccctgaccaagcacaagatcatccacactggagccaagccctacaagtgtgaggagtgtggcagcgccttccgggccttcagcaccctgacagagcacaagagggtgcacactggagagaagccctacaagtgcaatgaatgtgggaaggccttcaactggagcagcaccctgaccaagcacaagaggatccacactggagagaagccctacaagtgtgaggagtgtgggaaggccttcaacagaagcagcaacctgaccaggcacaagaagatccacactggagagaagccctacaagcccaagagatgtgacagcgcctttgacaacacccccaacttcagccgccacaagaggaaccacatgggagagaagagctag

SEQ ID NO: 207904 - DNA, 246 bp, Artificial Sequence
  derived and/or modified sequence
atgggccccctgaccttcagagatgtggccatcgagttcagcctggaggagtggcagtgcctggacaccagccagcagaacctgtacagaaatgtgatgctggacaactacagaaacctggtgttcctgggcattgctgtgtccaagccagacctgatcacctgcctggagcagggcaaggagccctgcaacatgaagagacatgccatggtggccaagcccccaggctggagcgctgtggcctag

SEQ ID NO: 207905 - DNA, 1515 bp, Artificial Sequence
  derived and/or modified sequence
atgctggacaactaccggaacctggtgttcctgggcatcgccgtgagcaaacctgacctcatcacatgcctggagcaggggaaagaaccctgcaatatgaaacgacacgctatggtcgccaaaccacccgtagtctgctcacactttgcgcaagatctgtggccgaaacaaggcttgaaggattccttccagaaagtgatactgcggaggtatggtaagtacggacacgagaacctgcagttgcgaaaggggtgcaagtccgctgatgagcataaagtgcacaagcggggatacaacggactgaatcagtgcctcacaacaacacagagcaagatctttcagtgtgataaatacgtgaaagtgctccacaagtttagcaatagtaatattcataaaaaacgccaaacaggaaagaagcctttcaaatgcaaggaatgcgggaaatcttgttgcattttgagccagctaactcaacacaagaagactgcaactcgtgttaatttttacaagtgcaaaacttgtggaaaagcttttaaccagtttagcaacctcaccaaacacaaaatcatccacccagaagttaatccatacaagtgtgaagaatgcgggaaggccttcaatcagagcttaactctcactaagcataagaaaatccataccgaggaaaagccctataaatgcgaagattgtggaaaagtcttctccgtcttttcagttctgactaagcacaagattatccacactggcactaagccctacaactgcgaagagtgcggaaagggttttagcatcttctctacccttacaaaacataagatcattcacaccggcgagaaaccgtacaaatgtaatgagtgtgggaaggcgtttaattggtcgagtaccttgacaaaacacaagagaatacatacaggcgagaagccctataagtgtgaagagtgcggcaaagcctttaatcagagcagtaccctgacgaggcataagatagtccacactggggaaaagccatataaatgtgaggaatgtggaaaggcatttaaacgctctaccactcttaccaagcacaagcgaatttataccaaagagaagccctataagtgtgaagagtgcggtaaggccttttccgtgttctcaacactgacaaagcacaaaatcatccacacaggagctaagccctacaagtgcgaagagtgtgggtcagccttcagggcgttctccaccctgacagagcataaacgggtacatacgggcgagaagccttataagtgtaatgaatgtggtaaggcgtttaattggtccagtacactgacaaaacataagcgcattcataccggggagaagccctataaatgtgaagaatgtggcaaagcatttaatagatcatccaatttgactcgacacaaaaaaattcataccggagagaaaccctataagcctaaacgctgcgatagtgcgtttgacaatacacccaacttctcccgtcacaaaaggaatcatatgggagagaagtcttag

SEQ ID NO: 207906 - DNA, 1710 bp, Artificial Sequence
  derived and/or modified sequence
atgagcagcgccccccggggcccccccagcgtggcccccctgcccgcaggaatagggaggtctacggcgaaaaccccgggcctgcctgggtcattggagatggggcctttaacttttcgagacgtggccatagaattcagcctggaagagtggcaatgcctggatacttcccagcaaaatctgtaccggaacgtgatgctagacaactatagaaatctagtattcctgggaatagctgtctcgaagccagacctcattacttgcttggaacagggcaaagaaccatgtaacatgaagcggcacgcaatggtggctaagccacccgtagtttgctcacacttcgcccaggatttgtggccaaagcaggggctgaaagattcctttcagaaggtgatcctacgccgctacgggaaatatggtcatgagaatttgcagctgcgaaagggatgcaagtctgctgacgaacataaagtccacaagagggggtataatgggttaaatcagtgcctaaccacaactcagagtaagatcttccaatgtgataagtacgtgaaagtgcttcataagttctctaacagcaatatccacaagaaacgacagacgggtaagaagccctttaagtgcaaggagtgcggaaagagttgctgtatcctgagccaactgacacaacataagaaaactgcaactagggtgaacttctataagtgtaaaacctgtggcaaagcattcaatcaattctcaaacttgaccaagcataaaataatccatccggaggtgaatccctacaaatgcgaagagtgtgggaaggcctttaatcagtccctcaccctgacaaaacacaaaaaaattcatacagaggagaagccttacaagtgcgaggactgcggcaaggtgtttagcgtcttcagtgtgttgacaaaacacaaaatcatccacactggaactaaaccatataattgcgaagagtgtggaaagggtttctcaatcttctcaacattaaccaaacataaaataattcacacaggtgaaaaaccgtacaaatgcaatgagtgcggcaaggctttcaattggagctcaacactgacaaaacacaagcggatccacactggggagaagccttataaatgtgaggagtgcgggaaagcatttaaccagtctagcactttgacccggcacaagattgttcacactggcgagaagccttataagtgcgaagagtgcggtaaagcctttaagcgaagtacaactcttaccaagcacaaaaggatttacaccaaggaaaagccttataagtgcgaggaatgtgggaaggccttctccgtcttcagtactttgacaaagcataaaattatccacaccggtgcaaaaccctacaaatgcgaggagtgcggaagtgctttccgtgccttctctactctgacagaacacaagcgcgtacataccggggagaaaccgtacaagtgcaacgaatgcggaaaagcatttaactggagttccaccctaacaaagcacaaaagaatccatacgggcgaaaagccgtataagtgcgaggagtgcggtaaggcatttaatcggtcttcgaaccttacgaggcacaaaaaaatccataccggagagaaaccatacaagccaaaacggtgcgattcagcgtttgataacacgcccaatttctcccggcacaaacgtaaccatatgggggaaaagtcatag

SEQ ID NO: 207907 - DNA, 246 bp, Artificial Sequence
  derived and/or modified sequence
atgggccccctgaccttccgggacgtggccatcgagttcagcctggaggagtggcagtgtctcgacacatcacagcagaatctgtatcggaatgtcatgctggataactatagaaatctggttttcttgggcatagccgtgtccaaacctgacctgatcacatgtctggagcagggcaaagagccctgcaacatgaaaagacatgccatggttgccaagcctcctggctggtcggctgttgcctag

SEQ ID NO: 207908 - DNA, 1515 bp, Artificial Sequence
  derived and/or modified sequence
atgctggataactatagaaacctggtgttcctcggcatcgcggtctcaaagcccgacctgatcacctgtctcgagcagggtaaggaaccatgtaacatgaaaagacatgccatggtggcaaaaccacccgtggtttgtagccactttgctcaggatctttggcctaagcaggggttaaaggacagtttccaaaaggttatcctccgtcgatatggcaaatacggccatgagaacttgcagcttagaaaaggatgcaaatccgccgacgagcacaaagtgcataagcgcggttacaatggactaaatcagtgtcttacaacaacccaaagcaaaatcttccagtgtgataaatatgttaaagtgctgcacaagttcagtaactcaaacatccataaaaagcggcagacagggaagaagccatttaagtgcaaagagtgcgggaagagttgttgtatcctgagtcagctgacgcagcacaagaaaacagccacaagggtgaacttctacaagtgtaaaacatgcggaaaggcttttaaccagtttagtaatctgaccaagcataaaatcattcaccctgaagttaacccgtataagtgcgaggaatgcggaaaagctttcaatcagagcctgactctgaccaagcacaaaaaaattcatactgaggaaaagccttacaagtgcgaggactgtggaaaggttttctccgtattctccgtgctcacaaagcataaaattatacacaccggcactaaaccgtataactgtgaagaatgcggtaaaggcttctctatcttctccactcttaccaaacacaagatcattcatacaggggaaaagccatacaaatgtaatgagtgcggtaaagcctttaactggtcttctactctgaccaaacacaagcgcatccatacaggcgaaaagccctacaagtgcgaagagtgtggcaaggcatttaatcagtctagtaccctgacaagacacaaaatcgtgcacaccggcgagaagccctacaagtgtgaagagtgtggcaaagctttcaaaagatccaccacactgacaaagcacaagaggatttacacgaaggagaagccttacaagtgtgaagagtgcggcaaagcatttagcgtgttttctaccctgacgaaacacaagattatccatactggggctaaaccttataaatgtgaagagtgcgggtccgcattccgcgcatttagcacgctcacggagcacaaacgagtccatactggtgagaaaccatacaagtgcaatgaatgtggcaaggcattcaattggtctagcaccctgacaaagcataaaaggatacacacgggtgagaaaccttacaagtgtgaggagtgcggcaaggcctttaacaggtcaagcaacttaacaagacataagaaaattcacactggtgaaaagccatataagcccaaaagatgtgattctgcttttgacaatacacctaattttagtaggcataaacgaaaccatatgggggagaagtcttag

SEQ ID NO: 207909 - DNA, 1710 bp, Artificial Sequence
  derived and/or modified sequence
atgtcttctgctcccagagggccaccttccgtcgcaccactcccagcgggaatcggcagatctaccgcgaagaccccaggcctcccgggttccctggaaatggggcctctgaccttccgcgacgtggctatagaattcagtctggaggaatggcaatgtctcgatacatctcagcagaatctgtaccggaatgtaatgctggataactataggaaccttgtgtttctgggaattgcagtgtccaaaccggatctcatcacctgcctggagcaaggaaaggagccatgtaacatgaagagacacgccatggtggcaaaacctccagtcgtctgctcccacttcgcccaggacctttggccgaaacaagggttaaaagattctttccagaaagtcattctgaggcgctacggaaaatacggtcatgagaacttacagctgagaaaggggtgcaagtccgccgatgagcacaaagtgcacaagagagggtacaatggcctgaaccagtgcctgacaacaactcaatcaaaaatctttcagtgtgacaagtatgtgaaggttctgcacaaattttcgaattccaatattcacaagaaaagacaaaccggcaaaaagccattcaaatgtaaagagtgcggaaagagctgttgcattctgtcccagctgacccagcataaaaagactgcaaccagggtcaacttctacaagtgtaagacatgcggcaaggcttttaatcagttttccaacctgacaaagcacaaaatcatccatccagaggtcaacccctacaagtgtgaagaatgtggaaaagcgtttaatcagtctcttaccctgaccaagcacaagaagattcataccgaagagaagccctacaagtgtgaggactgcggcaaagtgtttagcgtgttcagcgtcctcacaaagcacaagatcattcatactggcacaaagccctacaattgtgaggaatgcggtaaaggatttagtatttttagtactctaacaaagcacaagataatccacaccggtgagaagccttataagtgtaacgagtgcggcaaggcctttaattggagctctactttaaccaagcataaacggatacacaccggcgagaagccttacaaatgcgaagagtgcggaaaagcatttaaccagtcctcgacactgacaagacataagatagttcataccggcgaaaagccctacaagtgtgaggaatgtggtaaggcattcaaacgaagcacaacgctcaccaaacacaagagaatctacaccaaagagaaaccctacaagtgcgaggaatgcggtaaggctttcagtgtgttctccaccctgaccaaacacaaaattatccatacgggtgctaagccttataaatgtgaggagtgcggatcagccttcagggctttcagtaccctgacagaacataaaagggtgcacacaggggaaaaaccctacaagtgcaatgagtgcgggaaggcattcaactggagcagcacactgaccaagcataagcgcatccacacaggtgagaagccatacaaatgtgaggagtgtggaaaagcttttaacagatcttccaatctcaccagacacaagaagatacataccggggagaaaccatacaaaccaaagaggtgcgattcggcgttcgataatactcccaattttagcaggcacaagaggaaccatatgggagaaaagtcttag

SEQ ID NO: 207910 - DNA, 246 bp, Artificial Sequence
  derived and/or modified sequence
atgggacctctgacatttagagatgtggcgattgaattttcactagaagagtggcagtgcttagatacatctcagcagaacctctatcggaacgtgatgctggataactatcgaaacctcgtcttcctgggaatcgccgtgtctaaaccagacctcatcacctgtctggagcagggcaaggagccttgtaacatgaaaaggcacgctatggttgccaaaccacccggttggtcagccgtggcctag

SEQ ID NO: 207911 - DNA, 1811 bp, Artificial Sequence
  derived and/or modified sequence
cgggatttggcggggcctttgtctctcgctgcagtcgcagctccaggtctcgtcttcactgctctatgtcctctgctcctagaggtccaccttctgtggccccgttacctgcaggccagaaaaactgggaaaatcacaggctcttccacttactggatgtttgacaaaatattcttcttgggccaaaaacattggcattactgggaccactgacatttagggatgtggccatagaattctctctggaggagtggcaatgcctggacacttcacagcagaatttgtataggaatgtgatgttagataactacagaaacctggtcttcctgggtattgctgtctctaagccagacctgatcacttgtctggagcaaggaaaagagccctgcaatatgaagagacatgcgatggtagccaaacccccagttgtgtgttctcattttgcccaagacctttggccaaagcagggcttaaaagattcttttcaaaaagtgatactgagaagatatggaaaatatggacatgagaatttacaattaagaaaaggctgtaaaagtgcggatgagcataaggtgcacaaaagaggttataatggacttaaccaatgtttgacaactacccagagcaaaatatttcaatgtgataaatatgttaaagtccttcataaattctcaaattcaaatatacataagaaaagacaaactggaaagaaacctttcaaatgtaaagaatgtggcaaatcatgttgcatactttcacaactaactcagcataagaaaactgctactagagtgaatttctacaaatgtaagacatgtggaaaagcctttaaccagttctcaaatcttactaaacataagataattcatcctgaagtgaatccctacaaatgtgaagaatgtggcaaagcctttaaccagtccttaactcttactaaacataaaaaaattcatactgaagagaaaccttacaaatgtgaagattgtggcaaagtctttagtgtattttcagtccttactaaacataagataattcatacaggaacaaaaccctacaattgtgaagaatgtggcaaaggctttagtatattctcaacccttactaaacataagataattcatactggagagaaaccctacaaatgcaatgaatgtggtaaagcctttaactggtcctcaactcttactaaacataagagaattcatactggagagaaaccctacaaatgtgaagaatgtggcaaagcttttaaccagtcctcaacccttactagacataagatagttcatactggagagaaaccctacaaatgtgaagaatgtggtaaagcctttaaacggtccacaactcttactaaacataagagaatttatactaaagagaaaccatacaaatgtgaagaatgtggaaaagcctttagtgtattctcaacccttactaaacataagataattcatactggagcaaaaccttacaaatgtgaagaatgtggcagtgcctttagggcattctcaacccttactgaacataagagagttcatactggagagaaaccttacaaatgcaatgaatgtggtaaagcctttaactggtcctcaactcttactaaacataagagaattcatactggagagaagccctacaaatgtgaagaatgtggcaaagcttttaaccggtcctcaaaccttactcgacataagaaaattcatactggagagaaaccatacaaacctaaaagatgtgacagtgcttttgacaacaccccaaacttttctagacataaaagaaatcatatgggtgagaaatcctag

SEQ ID NO: 207912 - DNA, 2000 bp, Artificial Sequence
  derived and/or modified sequence
ggcttccgggatttggcggggcctttgtctctcgctgcagtcgcagctccaggtctcgtcttcactgctctatgtcctctgctcctagaggtccaccttctgtggccccgttacctgcaggtattgggagatccacagctaagacgccaggactccctggaagcctagaaatgggaccactgacatttagggatgtggccatagaattctctctggaggagtggcaatgcctggacacttcacagcagaatttgtataggaatgtgatgttagataactacagaaacctggtcttcctgggtattgctgtctctaagccagacctgatcacttgtctggagcaaggaaaagagccctgcaatatgaagagacatgcgatggtagccaaacccccagttgtgtgttctcattttgcccaagacctttggccaaagcagggcttaaaagattcttttcaaaaagtgatactgagaagatatggaaaatatggacatgagaatttacaattaagaaaaggctgtaaaagtgcggatgagcataaggtgcacaaaagaggttataatggacttaaccaatgtttgacaactacccagagcaaaatatttcaatgtgataaatatgttaaagtccttcataaattctcaaattcaaatatacataagaaaagacaaactggaaagaaacctttcaaatgtaaagaatgtggcaaatcatgttgcatactttcacaactaactcagcataagaaaactgctactagagtgaatttctacaaatgtaagacatgtggaaaagcctttaaccagttctcaaatcttactaaacataagataattcatcctgaagtgaatccctacaaatgtgaagaatgtggcaaagcctttaaccagtccttaactcttactaaacataaaaaaattcatactgaagagaaaccttacaaatgtgaagattgtggcaaagtctttagtgtattttcagtccttactaaacataagataattcatacaggaacaaaaccctacaattgtgaagaatgtggcaaaggctttagtatattctcaacccttactaaacataagataattcatactggagagaaaccctacaaatgcaatgaatgtggtaaagcctttaactggtcctcaactcttactaaacataagagaattcatactggagagaaaccctacaaatgtgaagaatgtggcaaagcttttaaccagtcctcaacccttactagacataagatagttcatactggagagaaaccctacaaatgtgaagaatgtggtaaagcctttaaacggtccacaactcttactaaacataagagaatttatactaaagagaaaccatacaaatgtgaagaatgtggaaaagcctttagtgtattctcaacccttactaaacataagataattcatactggagcaaaaccttacaaatgtgaagaatgtggcagtgcctttagggcattctcaacccttactgaacataagagagttcatactggagagaaaccttacaaatgcaatgaatgtggtaaagcctttaactggtcctcaactcttactaaacataagagaattcatactggagagaagccctacaaatgtgaagaatgtggcaaagcttttaaccggtcctcaaaccttactcgacataagaaaattcatactggagagaaaccatacaaacctaaaagatgtgacagtgcttttgacaacaccccaaacttttctagacataaaagaaatcatatgggtgagaaatcctagaaatgtgaagaatgtgacaaagcctttaagcggttgtcacacttgattgtatataagataattcatactggagaaaactcccagaagtggagttttccttattgcacaggaaagcatttatacttgagaaaaattgtataaagaatggaaaagtcattaatatctgctcatatcttaacatcagcgagttggtatttaataaaagcattatcaatgaaa

SEQ ID NO: 207913 - DNA, 1219 bp, Artificial Sequence
  derived and/or modified sequence
gatttggcggggcctttgtctctcgctgcagtcgcagctccaggtctcgtcttcactgctctatgtcctctgctcctagaggtccaccttctgtggccccgttacctgcaggtattgggagatccacagctaagacgccaggactccctggaagcctagaaatgggaccactgacatttagggatgtggccatagaattctctctggaggagtggcaatgcctggacacttcacagcagaatttgtataggaatgtgatgttagataactacagaaacctggtcttcctgggtattgctgtctctaagccagacctgatcacttgtctggagcaaggaaaagagccctgcaatatgaagagacatgcgatggtagccaaacccccaggttggagtgcagtggcgtgatcttgggttactgcaacctctgcccctcgggattcaagtgattctactgcctcagcctcccgagtagctgggattataggcgagtgccatcatgcccggctaatttttgtatttttagtagagtgagggtttcaccatgttggccaggctggtctcgaacgcctgacctcgtgtgatccgccctcctcagcctcccaaagtgctgggattacaggcatgagccacagtgcccggccaagtatttttatatttcagatcatatctactgaatgatttggtgacagaaatttgcattgcttttacctattggctttcagtaacaatggtataataattatgggtatgaaaatgactcttcatatgaccacatatgtgaaagtatatatatgtgctgcattctattttactagtctcctttttttttttacctttatacttgtagcaaattgttttaattctgtagctttgtaatatgttttaaaatcagaaactataatgcttccaacattgttcctttttttgaagattgttaggtactttattgtctcttgagattccatatactttaggggttgctgtttttatgtcttcaaaaatgcaatgagaaattgagaaaacattgcattaaatcttgtagattacattgagcagtatagacatcttcccaatatttcaacttttgaacaaaagcatgctaaagaatgtggtttaatttactatatatttgtaaacttgttagcttttaatattgttttatattgtcattccatttttgttatagaaagtaatccataaaatttcagttctaaaat

SEQ ID NO: 207914 - DNA, 1007 bp, Artificial Sequence
  derived and/or modified sequence
gctatcgtcttcactgctctgtgccgtcagctcctagaggcccagcctctgtggccctgtgacctgcaggtattaggagggtcacagctaggacgccgggaccccctggaagcctagaaatgggaccattgcaatttagagatgtggccatagaattctctctggaggagtggcattgcctggacgctgcacagcggaatctatatagggatgtgatgttagagaactacagaaacctgatcttccttggtattgttgtctctaaaccaaacctgatcacctgtctggagcaaggaaaaaaacctttaactatgaagaggcatgagatgattgccaaacccccaggtggtctataaagaggaatgttttatgagctattgagaaggctatgtatcctgatgatgttgaggagtgttctctataccttcattagaaataattgttttttactgccttctagtcctctgttcccttactaatatactgtcttgttttattattattacagaaagtggggtattgaaatatcctactataattatattgctctattcaactttgttagtatttgctttatatatttgaaaccccaatttgagacacacacacgcacaaatacacacatggataaacaaatttgtcataggtttccatgaattaatctatatattgtttaatgtccttcttttttgaagttttaacttaaagtacattttataaaatatgacagcttttgactttaacaatgtagcttgtgtaatattattttgacctcttctgctctcattttgttagtatttacatgaaatttctacttggtcttgccactttcagtcttttcttatcattagatctcagctgactcttgtaaaaaggcaagttgagtcttgatttttaaaattttttaatgagcctttttagaagtatgtctcttgattggaaagataattatatttaaatagttttctgaaagagaaaaacttactgttaataaaataattgttttg

SEQ ID NO: 207915 - protein, 142 aa, Artificial Sequence
  derived and/or modified sequence
MATKIDKEACRAAYNLVRDDGSAVIWVTFKYDGSTIVPGEQGAEYQHFIQQCTDDVRLFAFVRFTTGDAMSKRSKFALITWIGENVSGLQRAKTGTDKTLVKEVVQNFAKEFVISDRKELEEDFIKSELKKAGGANYDAQTE

SEQ ID NO: 207916 - DNA, 429 bp, Artificial Sequence
  derived and/or modified sequence
atggctactaagattgacaaggaagcatgtcgagccgcgtacaatctggtaagggacgacggaagcgccgttatctgggtcaccttcaaatacgacggctcaactattgtccctggggagcagggcgctgagtaccaacactttatccagcagtgcacggatgacgtgcggctgttcgcttttgtgaggttcacgacaggggacgccatgtccaaacgttctaagttcgctttgatcacgtggattggtgagaatgtatctggactccagcgagccaaaaccggcacagataagactttagtcaaggaggtagtgcaaaactttgccaaggaatttgtgatctccgacaggaaggagttggaggaggatttcatcaaatctgagctgaagaaggctggcggggccaactacgatgcgcagaccgagtag

SEQ ID NO: 207917 - DNA, 429 bp, Artificial Sequence
  derived and/or modified sequence
atggccaccaagattgacaaggaggcctgccgggccgcctacaacctggtgagagatgatggcagcgctgtgatctgggtgaccttcaagtatgatggcagcaccatcgtgcctggagagcagggcgctgagtaccagcacttcatccagcagtgcacagatgatgtgcggctgtttgcctttgtgcgcttcaccactggagatgccatgagcaagaggagcaagtttgccctgatcacctggattggagaaaatgtgtctggcctgcagagggccaagacaggaacagacaagaccctggtgaaggaggtggtgcagaactttgccaaggagtttgtgatcagtgacaggaaggagctggaggaggacttcatcaagtctgagctgaagaaggccggcggggccaactatgatgcccagacagaatag

SEQ ID NO: 207918 - DNA, 429 bp, Artificial Sequence
  derived and/or modified sequence
atggccaccaagatcgacaaggaggcctgccgggccgcctacaacctcgtgcgagacgatggcagtgcagtaatatgggttactttcaaatatgacggtagcacaatagttccgggcgagcaaggtgcagagtatcaacattttatccagcagtgtaccgatgatgtaagactgtttgcattcgtcagattcactacgggggatgcaatgagcaagagaagcaaatttgcattgattacttggatcggggaaaatgtgtcggggctgcagagagccaaaaccggcaccgataaaaccttagttaaagaggtagtgcagaatttcgctaaggaatttgttatcagtgataggaaagaattggaagaagatttcattaagagcgagcttaagaaagctggaggtgcaaactatgacgcccagactgagtag

SEQ ID NO: 207919 - DNA, 429 bp, Artificial Sequence
  derived and/or modified sequence
atggccacaaagatcgacaaggaggcctgtagagcagcatacaaccttgtgagagatgatggaagtgccgtgatttgggtgacttttaagtatgacggaagtaccattgttccgggagaacagggcgcagaataccagcactttattcagcagtgcactgatgatgtccggctgtttgctttcgtgaggttcacaacaggagatgctatgagtaagaggtcgaagttcgcccttatcacctggataggtgaaaatgtctctggcttgcagcgcgctaagacaggaactgataaaaccctggtgaaagaagtcgtccaaaactttgcaaaagagtttgttatttctgacagaaaggagctcgaggaagacttcattaagtccgaattgaaaaaagccggaggggctaactacgacgctcaaaccgagtag

SEQ ID NO: 207920 - DNA, 1843 bp, Artificial Sequence
  derived and/or modified sequence
gtggaagccgccgccgcgctcgcagcttgcaggcgccgcgtagccgtcgccaccgccgccagcccgtgcgccctcggcgcgtacccgccgcgctcccatccccgccgccggccaggggcgcgctcggccgccccggacagtgtcccgctgcggctccgcggcgatggccaccaagatcgacaaagaggcttgccgggcggcgtacaacctggtgcgcgacgacggctcggccgtcatctgggtgacttttaaatatgacggctccaccatcgtccccggcgagcagggagcggagtaccagcacttcatccagcagtgcacagatgacgtccggttgtttgccttcgtgcgcttcaccaccggggatgccatgagcaagaggtccaagtttgccctcatcacgtggatcggtgagaacgtcagcgggctgcagcgcgccaaaaccgggacggacaagaccctggtgaaggaggtcgtacagaatttcgctaaggagtttgtgatcagtgatcggaaggagctggaggaagatttcatcaagagcgagctgaagaaggcggggggagccaattacgacgcccagacggagtaaccccagcccccgccacaccaccccttgccaaagtcatctgcctgctccccgggggagaggaccgccggcctcagctactagcccaccagcccaccagggagaaaagaagccatgagaggcagcgcccgccaccctgtgtccacagcccccaccttcccgcttcccttagaaccctgccgtgtcctatctcatgacgctcatggaacctctttctttgatcttctttttcttttctccccctcttttttgttctaaagaaaagtcattttgatgcaaggtcctgcctgccatcagatccgaggtgcctcctgcagtgaccccttttcctggcatttctcttccacgcgacgaggtctgcctagtgagatctgcatgacctcacgttgctttccagagcccgggcctattttgccatctcagttttcctggaccctgcttcctgtgtaccactgaggggcagctgggccaggagctgtgcccggtgcctgcagccttcataagcacacacgtccattccctactaaggcccagacctcctggtatctgccccgggctccctcatcccacctccatccggagttgcctaagatgcatgtccagcataggcaggattgctcggtggtgagaaggttaggtccggctcagactgaataagaagagataaaatttgccttaaaacttacctggcagtggctttgctgcacggtctgaaaccacctgttcccaccctcttgaccgaaatttccttgtgacacagagaagggcaaaggtctgagcccagagttgacggagggagtatttcagggttcacttcaggggctcccaaagcgacaagatcgttagggagagaggcccagggtggggactgggaatttaaggagagctgggaacggatcccttaggttcaggaagcttctgtgtaagctgcgaggatggcttgggccgaagggttgctctgcccgccgcgctagctgtgagctgagcaaagccctgggctcacagcaccccaaaagcctgtggcttcagtcctgcgtctgcaccacacattcaaaaggatcgttttgttttgtttttaaagaaaggtgagattggcttggttcttcatgagcacatttgatatagctctttttctgtttttccttgctcatttcgttttggggaagaaatctgtactgtattgggattgtaaagaacatctctgcactcagacagtttacagaaataaatgttttttttgtttttcagaaaaca

SEQ ID NO: 207921 - DNA, 429 bp, Artificial Sequence
  derived and/or modified sequence
atggccaccaagatcgacaaggaggcctgcagagccgcctacaacctggtgagagacgacggcagcgccgtgatctgggtgaccttcaagtacgacggcagcaccatcgtgcccggcgagcagggcgccgagtaccagcacttcatccagcagtgcaccgacgacgtgagactgttcgccttcgtgagattcaccaccggcgacgccatgagcaagagaagcaagttcgccctgatcacctggatcggcgagaacgtgagcggcctgcagagagccaagaccggcaccgacaagaccctggtgaaggaggtggtgcagaacttcgccaaggagttcgtgatcagcgacagaaaggagctggaggaggacttcatcaagagcgagctgaagaaggccggcggcgccaactacgacgcccagaccgagtag

SEQ ID NO: 207922 - protein, 1076 aa, Artificial Sequence
  derived and/or modified sequence
MIAVSFKCRCQILRRLTKDESPYTKSASQTKPPDGALAVRRQSIPEEFKGSTVVELMKKEGTTLGLTVSGGIDKDGKPRVSNLRQGGIAARSDQLDVGDYIKAVNGINLAKFRHDEIISLLKNVGERVVLEVEYELPPVSVQGSSVIFRTVEVTLHKEGNTFGFVIRGGAHDDRNKSRPVVITCVRPGGPADREGTIKPGDRLLSVDGIRLLGTTHAEAMSILKQCGQEAALLIEYDVSVMDSVATASGPLLVEVAKTPGASLGVALTTSMCCNKQVIVIDKIKSASIADRCGALHVGDHILSIDGTSMEYCTLAEATQFLANTTDQVKLEILPHHQTRLALKGPDHAALVSSSFSPTSMSAYSLSSLNMGTLPRSLYSTSPRGTMMRRRLKKKDFKSSLSLASSTVGLAGQVVHTETTEVVLTADPVTGFGIQLQGSVFATETLSSPPLISYIEADSPAERCGVLQIGDRVMAINGIPTEDSTFEEASQLLRDSSITSKVTLEIEFDVAESVIPSSGTFHVKLPKKHNVELGITISSPSSRKPGDPLVISDIKKGSVAHRTGTLELGDKLLAIDNIRLDNCSMEDAVQILQQCEDLVKLKIRKDEDNSDEQESSGAIIYTVELKRYGGPLGITISGTEEPFDPIIISSLTKGGLAERTGAIHIGDRILAINSSSLKGKPLSEAIHLLQMAGETVTLKIKKQTDAQSASSPKKFPISSHLSDLGDVEEDSSPAQKPGKLSDMYPSTVPSVDSAVDSWDGSAIDTSYGTQGTSFQASGYNFNTYDWRSPKQRGSLSPVTKPRSQTYPDVGLSYEDWDRSTASGFAGAADSAETEQEENFWSQALEDLETCGQSGILRELEEKADRRVSLRNMTLLATIMSGSTMSLNHEAPTPRSQLGRQASFQERSSSRPHYSQTTRSNTLPSDVGRKSVTLRKMKQEIKEIMSPTPVELHKVTLYKDSDMEDFGFSVADGLLEKGVYVKNIRPAGPGDLGGLKPYDRLLQVNHVRTRDFDCCLVVPLIAESGNKLDLVISRNPLASQKSIDQQSLPGDWSEQNSAFFQQPSHGGNLETREPTNTL

SEQ ID NO: 207923 - DNA, 3231 bp, Artificial Sequence
  derived and/or modified sequence
atgatcgccgttagtttcaagtgtaggtgtcagatactcaggagactgacaaaggacgaatctccctatacgaagtccgcatctcagacgaagcctcctgatggcgccctagcagtcagacgacaatcaatacccgaagagttcaaggggtcaaccgtggtggaactaatgaaaaaagagggcaccacactcggtcttacggtgtccggaggaattgacaaagatggtaagcctcgtgtctcaaatctgagacagggcggcatcgcagcgaggtccgaccagttagacgtgggagactatatcaaagcggtcaatggtataaacttggctaagttccgtcacgacgaaatcatctctcttctgaagaacgtcggtgagagggtggtgcttgaggtcgaatatgagctgccaccagtgtctgtgcaaggaagcagcgtgatctttagaacagtggaggtgacgctgcataaagagggcaacacttttgggttcgtgattagagggggggctcatgacgaccggaataaaagtcggccagtcgtaattacatgtgtaagacccgggggcccagccgaccgggagggcactattaagcctggcgatcgcctgctatcagtggacggcatacggctgctgggaacgactcatgctgaggcaatgtctatattgaagcagtgtgggcaggaggctgccctgctgatagagtatgacgtgtcagtgatggactcagttgctaccgcctcgggacccctgctcgtagaagtggcaaagacccctggcgcctcgctcggcgtcgctttgaccacatccatgtgttgcaataaacaagtaatcgtcattgataaaatcaaatcagcatctatcgcggacagatgcggggctctgcatgtgggtgatcatatccttagtattgatggcacctcaatggagtactgtacattggccgaggcgacacagttccttgctaacacaacagatcaagtaaaacttgaaattctgcctcaccatcaaacaagacttgcactcaaaggtcctgaccatgccgcgttggtttccagcagtttttccccaacgagtatgagcgcatattcactgagctctcttaacatggggacgttgcctcgcagcctttattccacatccccaagagggaccatgatgagaagacgcctgaaaaaaaaggacttcaagtcatctctgtccctggcttccagcaccgttggcctggccggacaagtcgtccacactgaaaccaccgaagtggtactcacggctgaccccgtgaccgggttcggcatccagttgcaggggagcgtgtttgccaccgagacactgtccagccctccgctaattagttatattgaagcagactcacctgcagagagatgtggagtgttgcagattggagatcgcgtgatggcaattaacggaatccctacagaagatagtacttttgaagaagccagccagctgttgcgcgattcttccatcacttcaaaagtcactttggaaattgaatttgatgtggcggaatctgtcatcccctccagcggtacctttcatgttaagctgccaaaaaagcataatgtagagttgggtattacaatttccagtcccagtagtcggaagcccggcgatccccttgtgatctcagatattaaaaaggggagcgtggcacatcggaccgggactctcgagctgggagacaagctgcttgctatcgataacatccgtttagacaactgtagcatggaagacgcagtgcagatactgcaacagtgcgaggatctcgtcaagctcaaaatacgcaaggacgaggataactcagatgagcaggaatcttccggcgccattatctacacagtggaactgaaacgatatggcggacctttgggaataaccatttctggaacagaggaaccttttgaccccattatcatttcctcccttacgaagggaggtctggccgagcgaactggcgctatccatataggggatagaatcctcgcaattaactctagttcattgaagggtaaaccactgtccgaggccattcatctccttcagatggcgggggaaaccgtgacccttaagataaaaaagcaaacagacgcccaatccgcctcatcacccaagaagttcccaataagctctcatctgtctgatttgggagacgtggaggaggactcttcccctgcacagaagcctggtaaactgagtgacatgtatccatccactgtgccatccgtggatagcgctgtggatagctgggacggctctgccattgatacatcctatggcacgcagggaacaagtttccaagccagcgggtacaatttcaacacttacgactggcgctctccaaagcagcggggctctttaagtcctgtgacgaagccccgcagccagacttatcccgatgttgggctcagttatgaggattgggatcggagtaccgcctctgggttcgcaggggccgctgacagcgccgagaccgaacaggaagaaaacttttggagccaagccctggaagacctggagacttgtggccagagtggcattctacgagaacttgaagagaaggccgatcgtcgggttagcctgcgcaatatgaccctgctggcaaccattatgagtgggtctacgatgtctctgaaccacgaggcaccaacaccccgatctcagctgggcagacaggcgtcctttcaggagcggagcagctcaaggccacactacagccagactacacggtccaacaccctgccctcagacgtgggcaggaaaagcgtgactctgagaaaaatgaaacaggagattaaagaaatcatgagtcccaccccagtggagctccacaaagttactttgtacaaagacagcgatatggaagattttggttttagtgtagccgacggcctcctggagaagggagtgtatgtgaaaaacatccgcccagctggtcccggagatttgggcggcctgaagccctatgaccgattactgcaggtgaaccatgtgcggacccgtgattttgattgttgcttggtagttcccctgattgccgagagtggaaataaattagacctggtaatttcacgcaatcctcttgcctcgcagaaatccattgaccagcagtccctccccggggattggagcgaacagaacagcgcttttttccaacaaccctctcacggcggcaatctggaaacacgagaacccacaaatacactgtag

SEQ ID NO: 207924 - DNA, 4888 bp, Artificial Sequence
  derived and/or modified sequence
ctgctgctgctgcagccaccagagcagagagccttgagtacactttgccacagaaagcagtgagcaagaatgatagctgtctcttttaaatgccgttgtcaaattctgaggcgacttactaaagatgagagtccctacactaaatccgccagccagacaaagccgcctgatggagcgttggctgtgaggagacagagcatcccagaggaattcaagggctccacagtcgtcgagctgatgaagaaggaaggcactaccctgggtctgacggtatcgggaggaattgataaggatggcaagccaagagtatctaatctgcggcaaggaggaattgctgctagaagtgaccagctggatgtgggtgactacatcaaagcagtgaatggaatcaacctggccaaattccgccatgacgagatcatcagcttgctgaagaatgtgggagaaagagtggttcttgaagtagagtacgagcttccaccggtctctgtgcaaggatcaagtgttattttccgaacagtggaggtcacattacataaagaaggcaatacctttggttttgtaattcgagggggagcacatgatgatagaaataaatctcgtccagttgtgataacatgtgttcgtcctggagggcctgctgacagagagggcacgatcaaacccggtgacaggttgctcagtgtggatggaattcggcttcttggaactacgcatgctgaagccatgagtattcttaaacaatgtggacaagaagcagcactgctgatagaatatgatgtctcagtaatggactctgtggcaacagcatccgggccactactagtcgaagttgccaaaactcctggtgccagccttggggttgccctaactacctcgatgtgctgtaacaaacaagtcattgtcatagacaaaatcaaatctgcaagtattgcagacagatgtggcgcattgcatgtgggagatcacatcctctccatcgatggaaccagcatggagtactgtacacttgcagaagcaacccagttcctggccaacaccactgaccaggtcaagcttgagatccttccccatcatcagacccggctggccctaaaggggcccgaccatgcagctttggtgtcttcatccttctctcctacctccatgagtgcatacagcctgagttccctgaacatggggactctacctcgaagcctctactccaccagcccacgtggaaccatgatgaggaggagactgaaaaagaaagacttcaaaagctcattgtccttagcctccagcacagtaggattggctgggcaggttgttcacacagaaaccacagaggttgtgctgacggcagatcctgtcacaggatttgggatccaactgcagggcagtgtgtttgccacagaaactctctcttctccacctctgatttcctatatcgaagctgacagcccagcagagagatgtggggtgctacagattggagacagagtgatggccatcaatggaattccaacagaagacagcaccttcgaagaagccagtcagctcctccgagactcttcaatcacgagcaaggtcacactggaaatcgagtttgatgttgcagagtctgtcatcccaagtagtggaacatttcatgtaaagctgcctaagaagcacaatgtggaacttggaataaccataagttcaccatccagtagaaaaccaggagaccccctcgtcatttcagatatcaagaaagggagtgtggcacacagaactgggaccctggaacttggggataaattgctcgcaatagataatatccggctggacaactgttccatggaagatgcagttcagatcctccagcaatgtgaagacctggtgaagctcaaaatccgcaaagatgaagataattcagatgagcaagaaagttccggagcaattatttacaccgtggagcttaaacgctacggggggccccttggcatcacaatttcaggaactgaagagccgtttgatcctataatcatttcaagcctcactaaagggggattagctgaaagaactggcgcaatccacataggagaccgaatcctagccatcaatagcagcagcttgaaagggaagcctctgagtgaagccatccatttgttacagatggcaggagagactgtcaccttgaaaattaagaaacagacagatgcccagtcagcatcgagccccaagaagttccctatttctagccatttgagtgacctgggggatgtggaggaggactcctcaccagcacagaagccaggcaagctctccgacatgtacccctccacggtgcccagtgtggacagtgctgtggattcatgggatgggtctgcaatagacaccagctatggaactcaaggcactagttttcaggcctcaggatacaatttcaacacctatgactggaggagtccaaaacagagaggcagcttgtccccagtcactaagcctcgaagccagacttacccagatgtggggctgagttatgaagactgggaccggtccacagccagtggttttgcaggggctgccgatagtgcagagacagaacaagaggagaacttctggtctcaagcgctggaggatttggaaacctgcggacagtcaggaattctgagagaactggaggagaaagctgacaggcgtgtgtctttgagaaacatgactctcttggcaacaatcatgtcggggagcacgatgagtttgaatcatgaggctccaacacctcgcagtcagctggggcgacaggccagcttccaggagcgcagcagctcgcggccgcactacagccaaacaactcggagcaacaccctgccttcagatgtgggtaggaagtcagtaaccctgagaaaaatgaaacaagaaataaaggagatcatgtctccaactcctgtggagctgcacaaggtgaccttgtacaaggactctgacatggaggactttgggttcagtgtagcagatggcttactggagaaaggagtgtatgtcaaaaatattcgcccagctgggccaggagatcttggtggcttaaagccctatgacaggctcttacaggtgaatcatgtccgaaccagagactttgactgctgccttgttgtgcccctcatagcagaatccgggaataagctggacctggttattagtagaaacccactggcttcacagaagtctatagaccaacagagtctaccaggagattggagtgaacagaacagtgcttttttccagcagcctagccacggtggtaatttggagacacgagaacccactaatacattatagcaacgctttttataaagcaggacaaaagacaatatctacatggtgctaaaaatcctttaagatttctgtgacctttgaagcacagataatcaatcaacgtggcattaactgcaagcacaggggtcttttaaatctctctcatggctcatgttcacttcccttttcaagttgaagaggtttcttttttggtgaccactatggtatatggtgggcaatgccctgccagtcccaacggtagagaaaaataggccgtcccccacaactctacaattaacatcagaggaaattttttacaagttcatcttactatcactttttaaaaagagaaacatctgtttgaaaatattctctgtgatgatttccttaattcactttgaaatcagtttcttactatgaagtcattaatgtaagaacttggccaacaaagcttttcttctcataggctggctctactaggggaactagtgtttggtaaactgctgggactaccacaatgggaggggtacaggtataaaattaagttatcttaaaatgtttcagcaatgatgcacgtaggagaccataataggtggtggtaaatgttttgcccacgtataggaatgattttaactaagatgtatgctattccctatgcaacaaattatcaaacaggatatgtcttgtgacctgttttttttttaaggacacatttttaatagctgaaaatctctgataatgaattagagtgtgtagtaaacatgagaattagttatattatcttatttttaaaattcaagactaagaacttcagagaatgaagagtctattaaaatgaggttcatcttaatgataggcaaaccaaactcatactgcttgacatgttttgaaaactggtaatattgagggtgtacagcacatgtacttaaaaatgacactggactatcttttgctctgagccatgccacttaccgaaattgtaaatacatttttcacaaatgcattgccaattattaccatccctcaaagcaataaattgtgacagttgctttaaatgtttgtcagcaactgttttcatttgttcagatattttgaatagctacactaataactgttattatttggtgaacataaaaaaataaatagatctgtatattgatggtagactctccatattgaaatgattattttccaaacattttcattttggtcaataattcaaactaccacttaggcaaagtattcgaacactgtgtcctttgtttaaggaaatataaaaaaaaaatcacctttctttttgtgcaaaaaaaatattatttcaatcacatttcagaaccgccagggcaagaaagtataaagcaggatcatgttaagaaaaaagaaaaaaagatcatgagtcacttaaatatgtatttttatttgtaacaaacaagtattaaactgtaaagtatttttgtacaaatttaatactttaatagcatggtatttatcgtctatgtatggttttggggaattcaaaattgttcaaatatttgtatggaaaaaaataaaaccctctaccaaatggaataaacagtgattttaaaaagccaaataaagaggatatgcatta

SEQ ID NO: 207925 - DNA, 3231 bp, Artificial Sequence
  derived and/or modified sequence
atgattgctgtgtccttcaagtgccgctgccagatcctgcggcggctgaccaaggatgagagcccctacaccaagagcgccagccagaccaagcccccagatggagccctggccgtgcggcggcagagcatccctgaggagttcaagggcagcacagtggtggagctgatgaagaaggagggcaccaccctgggcctgactgtgtctgggggcatcgacaaggatggcaagccccgggtgagcaacctgcggcagggcggcattgctgcccggagtgaccagctggatgtgggggactacatcaaggctgtgaatggcatcaacctggccaagttcagacatgatgagatcatcagcctgctgaagaatgtgggggagcgggtggtgctggaggtggagtatgagctgccccctgtgtctgtgcagggcagcagcgtcatcttcagaacagtggaggtgaccctgcacaaggagggcaacaccttcggcttcgtcatccggggcggggcccatgatgacaggaacaagagcaggcctgtggtgatcacctgtgtgcggcctgggggccctgctgaccgggagggcaccatcaagccaggggaccggctgctgtctgtggatggcatccggctgctgggcaccacccatgctgaggccatgagcatcctgaagcagtgtggccaggaggccgccctgctgattgaatatgatgtgtctgtgatggattctgtggccacagccagcggccccctgctggtggaggtggccaagacccctggggccagcctgggcgtggccctgaccacctccatgtgctgcaacaagcaggtgattgtcatcgacaagatcaagagcgccagcattgctgacagatgtggggccctgcacgtgggggaccacatcctgagcattgatggcacctccatggagtactgcaccctggccgaggccacccagttcctggccaacaccacagaccaggtgaagctggagatcctgccccaccaccagacccggctggccctgaagggccctgaccacgccgccctggtgagcagcagcttcagccccacctccatgtctgcctacagcctgagcagcctgaacatgggcaccctgcccaggagcctgtacagcaccagcccccggggcaccatgatgagaagaaggctgaagaagaaggacttcaagagcagcctgagcctggccagcagcacagtgggcctggccggccaggtggtgcacacagagaccacagaggtggtgctgacagctgaccctgtgactggatttggcatccagctgcagggctctgtgtttgccacagagaccctgagcagccccccactcatctcctacatcgaggccgacagccctgctgagcgctgtggggtgctgcagatcggggacagagtgatggccatcaatggcatccccacagaggacagcacctttgaggaggccagccagctgctgcgggacagcagcatcaccagcaaggtgaccctggagattgaatttgatgtggccgagagcgtcatccccagcagcggcaccttccacgtgaagctgcccaagaagcacaacgtggagctgggcatcaccatcagcagccccagcagcaggaagccaggggaccccctggtgatcagtgacatcaagaagggctctgtggcccacaggacaggcaccctggagctgggggacaagctgctggccatcgacaacatccggctggacaactgcagcatggaggatgctgtgcagatcctgcagcagtgtgaggacctggtgaagctgaagatcaggaaggatgaggacaacagtgatgagcaggagagcagcggggccatcatctacacagtggagctgaagagatatggaggccccctgggcatcaccatcagcggcacagaggagccctttgaccccatcatcatcagcagcctgaccaagggcggcctggccgagaggactggagccatccacatcggggaccgcatcctggccatcaacagcagcagcctgaagggcaagcccctgtctgaggccatccacctgctgcagatggccggggagaccgtgaccctgaagatcaagaagcagacagatgcccagagcgccagcagccccaagaagttccccatcagcagccacctgagtgacctgggagatgtggaggaggacagcagccctgcccagaagccaggcaagctgagtgacatgtaccccagcacagtgcccagcgtggacagcgctgtggacagctgggatggcagcgccatcgacaccagctatggcacccagggcaccagcttccaggccagcggctacaacttcaacacctatgactggaggagccccaagcagaggggcagcctgagccctgtgaccaagcccaggagccagacctacccagatgtgggcctgtcctatgaggactgggacaggagcacagccagcggctttgctggagctgctgacagcgctgagacagagcaggaggagaacttctggagccaggccctggaggacctggagacctgtggccagagcggcatcctgcgggagctggaggagaaggctgaccggcgggtgtccctgaggaacatgaccctgctggccaccatcatgagcggcagcaccatgagcctgaaccacgaggcccccacccccaggagccagctgggccggcaggccagcttccaggagaggagcagcagccggccccactacagccagaccaccaggagcaacaccctgcccagtgatgtgggcaggaagtctgtgaccctgaggaagatgaagcaggagatcaaggagatcatgagccccacccctgtggagctgcacaaggtgaccctgtacaaggacagcgacatggaggactttggcttctctgtggctgatggcctgctggagaagggcgtgtatgtgaagaacatccggcctgctggccctggggacctgggcggcctgaagccctatgaccggctgctgcaggtgaaccacgtgaggacccgggactttgactgctgcctggtggtgcccctgattgctgagagcggcaacaagctggacctggtgatcagcaggaaccccctggccagccagaagagcattgaccagcagagcctgcccggggactggagcgagcagaacagcgccttcttccagcagcccagccatggaggcaacctggagacccgggagcccaccaacaccctgtag

SEQ ID NO: 207926 - DNA, 3231 bp, Artificial Sequence
  derived and/or modified sequence
atgatcgccgtgagcttcaagtgccggtgccagatcctgcggcggcttactaaagatgaatccccgtacaccaagtccgcgtctcaaaccaaaccccctgatggtgctctggcggtccgtcggcagagcatccctgaggagtttaagggaagcactgtggttgagctgatgaaaaaggagggaacgactctcggactgactgtctctggtggcatcgataaggatggcaagcctcgtgtgtccaatctgcgccagggaggcatcgcggctcgtagtgatcagctggacgtgggagactacataaaggcagttaatgggatcaacctcgcaaagttccgccatgacgagataattagcttactcaagaacgttggcgaacgggtcgtgctggaggtggaatacgagttgcctccagtgtccgtgcaagggtcaagcgtaatatttcggaccgtggaagtgactctgcataaggagggcaacacatttgggttcgtcatcagaggcggtgcccacgatgatagaaataagtctagacctgtggtgattacttgtgtccgacctggaggtccggccgaccgcgagggcacaattaaaccaggcgacagacttttgtccgttgacgggattagacttctggggactactcatgctgaggctatgagcatcctcaagcagtgcggccaggaagcggctctgttaatcgaatacgatgtgtccgtgatggacagcgttgcgacagcctctgggcctttacttgttgaggtggctaagacccctggcgcctcactgggggtcgcactcactacgagtatgtgttgtaataagcaggtcatcgtgatcgataagattaaaagcgccagcatagctgacaggtgcggagcgctgcacgtgggggaccacatcctctctatcgatggaacttccatggaatactgcactctagccgaggctacccagtttcttgccaacaccactgaccaagttaagctggagattctgccccaccatcagacacgactggctctcaaggggccggatcacgcagcattggttagttctagctttagcccgacctccatgagcgcatattccctgtcttctctgaacatggggacgctgcctcgcagcttgtactcaacttcccccaggggaacaatgatgaggcggcgccttaagaagaaggactttaagtcaagtctgtccctcgcgtctagcaccgtggggctggcgggccaggtggtacataccgagacgacggaggtggttttgaccgcagatccagtgactggatttggcatccagttgcaaggcagcgtgttcgccactgaaacactttcttcgcctcccttgatctcgtatatcgaagctgatagccctgcagaacgctgcggcgtcctacagattggcgacagggtgatggcaattaatggcatccccactgaagacagcaccttcgaagaagcctctcaactcctgagagactcttctattacatctaaagttactctcgagatcgagttcgatgtggccgaaagtgtgattccctccagtggtacgtttcatgtgaaactgcctaagaagcacaatgtcgaactgggaataacaattagttctccatccagcaggaagcctggggatcccctggtgatatccgatatcaagaaaggatcagtggctcaccgcaccggtacgctggaactgggagacaagctgctggcgatcgataatatcaggcttgataactgctccatggaggatgcagttcaaatcctgcagcagtgcgaggaccttgtgaaattaaagatacgaaaagacgaggacaattctgatgagcaggagtccagcggggcaatcatctacaccgtggaacttaagcgatatggtgggccgctaggaatcaccatctccggaacagaggagcccttcgatcccataattatctcatcgctgactaagggtgggcttgcagagaggacaggagcgattcacatcggggatcgaatcctagccatcaattcctctagtcttaaggggaagccgctcagtgaggctatacacctgctgcagatggccggcgagacagtgactctaaagataaagaagcagaccgacgcccagagcgcctcatccccaaaaaaatttcccatctcttctcacctaagcgacctgggagatgtggaagaggattcctctcctgcacagaagcctgggaagctttcggatatgtatcctagcacagtccctagcgtggatagcgccgtggacagttgggacggcagcgcaatcgataccagttacggtactcaggggaccagcttccaagcttctggatacaattttaatacgtatgactggcgctctcctaaacagaggggatcactgtccccagtaaccaaacctaggagccaaacttatccggatgttggcctttcctatgaagactgggacagatctactgcctccggatttgcaggggctgcggactccgctgagacagaacaggaggagaatttttggagtcaggccctcgaagacctcgagacgtgcgggcagagcgggatattgcgggaacttgaggaaaaagccgatagacgggtttcactgagaaatatgacactgcttgccacaatcatgtccggtagcactatgtccctgaaccatgaagcacctaccccgcggtcccagctgggccggcaggctagctttcaggaaaggagttcttccaggcctcactattcccagaccacaagatcgaatactctacctagcgatgtggggcggaagtccgtgaccctgcgaaagatgaagcaagagatcaaagaaattatgagtccaacccccgttgaactacataaggttaccctgtataaagattctgatatggaggactttggatttagcgtggccgatgggctgctggaaaagggcgtctacgtaaagaacataagacctgctggccctggtgacctgggaggactgaagccatatgatagactcctgcaggtcaatcatgtgagaactcgcgacttcgattgttgcctggtcgttccgctgatcgctgaatctggtaacaaactggatctcgtcatatccagaaacccactagcatcgcagaaatcaatcgaccagcagtccctcccaggcgactggtctgaacagaatagtgctttctttcagcagcctagccatggcgggaatctcgagacaagggagccaactaacaccttgtag

SEQ ID NO: 207927 - DNA, 3231 bp, Artificial Sequence
  derived and/or modified sequence
atgatagctgtgtcattcaaatgtagatgccagatcttgaggcgcctcaccaaggacgaatccccttatacaaaaagcgcatctcaaacgaagcctcctgacggcgctctggcagtccgaagacagtctatcccagaggagtttaaaggctccaccgtggttgagctgatgaagaaagaagggaccacacttgggctgacagtgagcggcggtatagataaggatgggaagccgagagtgtcaaatctccggcagggtgggattgccgcaaggagtgatcaactggacgtgggagattatattaaggctgtcaatggcataaatctggccaagtttcgacatgatgagatcatttcattgctgaagaacgtcggagagcgcgtggttttggaagttgaatacgaactcccacctgtgagcgtgcaggggtcttccgtaatttttcgtacagtagaagtgactctgcacaaggagggaaacacattcgggtttgtgattcggggtggggctcatgacgaccgaaacaagtcgcgtccagtcgtgattacttgcgtgagaccaggcggtcccgcagatcgggagggcaccataaaaccaggagacagactgctctcggtggacggaatccggctgttgggcaccacccatgcagaagccatgagcatcctgaaacagtgtggacaggaagcagccctactcatcgaatatgatgtgagtgtcatggacagcgtcgcgaccgcctcggggccactgttagtcgaggtcgccaagacccctggcgcatccctgggcgtcgcactgactacaagtatgtgctgcaataagcaggtgatagtgattgacaagattaagtcggcatccatcgccgataggtgtggcgctctgcacgtgggggaccatatcttgtctatcgatggaacctccatggagtattgtaccctcgctgaggccacccaattcctcgctaacaccacagatcaggtcaagctcgagatcctaccgcaccatcagacacgcctcgctttaaagggcccagatcacgcagccctcgtctcctcctccttttcccctaccagcatgagcgcctacagcctgagcagtttaaatatgggcacgttgcctagaagcttgtattcaacatctcccaggggcaccatgatgcgacggagacttaaaaaaaaagatttcaaatctagtctcagcctggcgtcctcaacggtgggtttggctggtcaggttgtgcatacagaaacgacagaggtcgtgctgactgctgacccagttaccggcttcggcattcagcttcaagggtccgtgtttgcaactgagacccttagcagcccaccgctaatcagctatatcgaagctgactcacctgcggaacgatgcggggtgctgcaaatcggcgatcgcgtgatggccataaacggcatccctactgaagactccactttcgaggaggcctcacagttactccgagacagtagcatcactagtaaagtaacccttgagatagagttcgacgtcgccgaatccgttatacccagttctggaacatttcacgtcaagctgcccaaaaagcacaacgtagaacttggtattactatatccagcccatctagtcgtaagccaggtgacccattagttatctccgatattaagaaggggagtgtcgcacatcggacaggcacccttgagctcggagacaaactcttagccatcgacaacatccgactggacaactgttcaatggaagacgccgtgcagattctgcagcaatgtgaggatttggtgaagctcaaaattaggaaggacgaagataactctgatgagcaggaatctagtggggcaatcatttatacggtcgagttgaagaggtatggcggacctctgggaatcaccatttctggaactgaggaaccctttgaccctatcatcatctctagtctaaccaaggggggtctggcagagaggacgggtgcgatacacatcggggacaggatcctcgccattaactcgagctcactgaagggcaagcccttgtccgaggccatccatctgctccaaatggctggcgaaaccgtgacattgaagatcaagaagcaaaccgacgctcaatcagcttccagccccaagaaatttcccatcagttcccatctgtcagacttgggtgacgtcgaggaggactcctccccagcacagaagcctgggaagctgagtgatatgtacccctccacagttccatccgtggatagtgcggttgacagctgggatggttcagccatagatacttcttatgggactcagggtacctcattccaggcgagcggctacaacttcaatacctacgattggagatctcctaagcagcggggaagtttgtctcctgtgaccaaacccaggtctcagacttatcctgacgtgggacttagttatgaggattgggaccgctctacggcctccggatttgcaggggctgctgattctgccgaaaccgaacaagaggagaacttctggagccaagccttggaggacctggagacttgtggacagtccgggattctacgagagcttgaggaaaaagctgatagacgggtcagtctccgaaatatgacactcctggccaccataatgtcgggatcgaccatgagtctcaaccacgaggcaccaaccccaaggtcacagttgggccgtcaggcttcctttcaggaaaggtcatcctcaagacctcactactctcaaaccactcgatccaataccttgccaagcgacgttggacgtaagtccgtgacgcttaggaagatgaagcaggaaataaaggagattatgtcccctacccccgtcgagttacataaagtgacgctgtataaggactctgacatggaggacttcggtttttctgtcgcagacggcctgctggagaaaggcgtctatgttaagaacatacggccagctggacctggtgacctggggggtcttaaaccatatgaccgattactgcaggtcaatcacgtgagaactcgagacttcgattgttgtcttgtggttccccttatcgctgagagtggtaataagcttgatttggtgattagtcggaacccactggcctcacagaagtctatcgaccaacagagtctacctggtgattggagcgaacaaaactcagctttcttccaacagcccagtcatggaggcaacctggaaacccgggaacctactaatacgctctag

SEQ ID NO: 207928 - DNA, 3231 bp, Artificial Sequence
  derived and/or modified sequence
atgatcgccgtgagcttcaagtgcagatgccagatcctgagaagactgaccaaggacgagagcccctacaccaagagcgccagccagaccaagccccccgacggcgccctggccgtgagaagacagagcatccccgaggagttcaagggcagcaccgtggtggagctgatgaagaaggagggcaccaccctgggcctgaccgtgagcggcggcatcgacaaggacggcaagcccagagtgagcaacctgagacagggcggcatcgccgccagaagcgaccagctggacgtgggcgactacatcaaggccgtgaacggcatcaacctggccaagttcagacacgacgagatcatcagcctgctgaagaacgtgggcgagagagtggtgctggaggtggagtacgagctgccccccgtgagcgtgcagggcagcagcgtgatcttcagaaccgtggaggtgaccctgcacaaggagggcaacaccttcggcttcgtgatcagaggcggcgcccacgacgacagaaacaagagcagacccgtggtgatcacctgcgtgagacccggcggccccgccgacagagagggcaccatcaagcccggcgacagactgctgagcgtggacggcatcagactgctgggcaccacccacgccgaggccatgagcatcctgaagcagtgcggccaggaggccgccctgctgatcgagtacgacgtgagcgtgatggacagcgtggccaccgccagcggccccctgctggtggaggtggccaagacccccggcgccagcctgggcgtggccctgaccaccagcatgtgctgcaacaagcaggtgatcgtgatcgacaagatcaagagcgccagcatcgccgacagatgcggcgccctgcacgtgggcgaccacatcctgagcatcgacggcaccagcatggagtactgcaccctggccgaggccacccagttcctggccaacaccaccgaccaggtgaagctggagatcctgccccaccaccagaccagactggccctgaagggccccgaccacgccgccctggtgagcagcagcttcagccccaccagcatgagcgcctacagcctgagcagcctgaacatgggcaccctgcccagaagcctgtacagcaccagccccagaggcaccatgatgagaagaagactgaagaagaaggacttcaagagcagcctgagcctggccagcagcaccgtgggcctggccggccaggtggtgcacaccgagaccaccgaggtggtgctgaccgccgaccccgtgaccggcttcggcatccagctgcagggcagcgtgttcgccaccgagaccctgagcagcccccccctgatcagctacatcgaggccgacagccccgccgagagatgcggcgtgctgcagatcggcgacagagtgatggccatcaacggcatccccaccgaggacagcaccttcgaggaggccagccagctgctgagagacagcagcatcaccagcaaggtgaccctggagatcgagttcgacgtggccgagagcgtgatccccagcagcggcaccttccacgtgaagctgcccaagaagcacaacgtggagctgggcatcaccatcagcagccccagcagcagaaagcccggcgaccccctggtgatcagcgacatcaagaagggcagcgtggcccacagaaccggcaccctggagctgggcgacaagctgctggccatcgacaacatcagactggacaactgcagcatggaggacgccgtgcagatcctgcagcagtgcgaggacctggtgaagctgaagatcagaaaggacgaggacaacagcgacgagcaggagagcagcggcgccatcatctacaccgtggagctgaagagatacggcggccccctgggcatcaccatcagcggcaccgaggagcccttcgaccccatcatcatcagcagcctgaccaagggcggcctggccgagagaaccggcgccatccacatcggcgacagaatcctggccatcaacagcagcagcctgaagggcaagcccctgagcgaggccatccacctgctgcagatggccggcgagaccgtgaccctgaagatcaagaagcagaccgacgcccagagcgccagcagccccaagaagttccccatcagcagccacctgagcgacctgggcgacgtggaggaggacagcagccccgcccagaagcccggcaagctgagcgacatgtaccccagcaccgtgcccagcgtggacagcgccgtggacagctgggacggcagcgccatcgacaccagctacggcacccagggcaccagcttccaggccagcggctacaacttcaacacctacgactggagaagccccaagcagagaggcagcctgagccccgtgaccaagcccagaagccagacctaccccgacgtgggcctgagctacgaggactgggacagaagcaccgccagcggcttcgccggcgccgccgacagcgccgagaccgagcaggaggagaacttctggagccaggccctggaggacctggagacctgcggccagagcggcatcctgagagagctggaggagaaggccgacagaagagtgagcctgagaaacatgaccctgctggccaccatcatgagcggcagcaccatgagcctgaaccacgaggcccccacccccagaagccagctgggcagacaggccagcttccaggagagaagcagcagcagaccccactacagccagaccaccagaagcaacaccctgcccagcgacgtgggcagaaagagcgtgaccctgagaaagatgaagcaggagatcaaggagatcatgagccccacccccgtggagctgcacaaggtgaccctgtacaaggacagcgacatggaggacttcggcttcagcgtggccgacggcctgctggagaagggcgtgtacgtgaagaacatcagacccgccggccccggcgacctgggcggcctgaagccctacgacagactgctgcaggtgaaccacgtgagaaccagagacttcgactgctgcctggtggtgcccctgatcgccgagagcggcaacaagctggacctggtgatcagcagaaaccccctggccagccagaagagcatcgaccagcagagcctgcccggcgactggagcgagcagaacagcgccttcttccagcagcccagccacggcggcaacctggagaccagagagcccaccaacaccctgtag

SEQ ID NO: 207929 - protein, 612 aa, Artificial Sequence
  derived and/or modified sequence
MENQLAKSTEERTFQYQDSLPSLPVPSLEESLKKYLESVKPFANQEEYKKTEEIVQKFQSGIGEKLHQKLLERAKGKRNWLEEWWLNVAYLDVRIPSQLNVNFAGPAAHFEHYWPPKEGTQLERGSITLWHNLNYWQLLRKEKVPVHKVGNTPLDMNQFRMLFSTCKVPGITRDSIMNYFRTESEGRSPNHIVVLCRGRAFVFDVIHEGCLVTPPELLRQLTYIHKKCHSEPDGPGIAALTSEERTRWAKAREYLIGLDPENLALLEKIQSSLLVYSMEDSSPHVTPEDYSEIIAAILIGDPTVRWGDKSYNLISFSNGVFGCNCDHAPFDAMIMVNISYYVDEKIFQNEGRWKGSEKVRDIPLPEELIFIVDEKVLNDINQAKAQYLREASDLQIAAYAFTSFGKKLTKNKMLHPDTFIQLALQLAYYRLHGHPGCCYETAMTRHFYHGRTETMRSCTVEAVRWCQSMQDPSVNLRERQQKMLQAFAKHNKMMKDCSAGKGFDRHLLGLLLIAKEEGLPVPELFTDPLFSKSGGGGNFVLSTSLVGYLRVQGVVVPMVHNGYGFFYHIRDDRFVVACSAWKSCPETDAEKLVQLTFCAFHDMIQLMNSTHL

SEQ ID NO: 207930 - DNA, 1839 bp, Artificial Sequence
  derived and/or modified sequence
atggagaaccagctggccaagagcaccgaggagagaaccttccagtaccaggacagcctgcccagcctgcccgtgcccagcctggaggagagcctgaagaagtacctggagagcgtgaagcccttcgccaaccaggaggagtacaagaagaccgaggagatcgtgcagaagttccagagcggcatcggcgagaagctgcaccagaagctgctggagagagccaagggcaagagaaactggctggaggagtggtggctgaacgtggcctacctggacgtgagaatccccagccagctgaacgtgaacttcgccggccccgccgcccacttcgagcactactggccccccaaggagggcacccagctggagagaggcagcatcaccctgtggcacaacctgaactactggcagctgctgagaaaggagaaggtgcccgtgcacaaggtgggcaacacccccctggacatgaaccagttcagaatgctgttcagcacctgcaaggtgcccggcatcaccagagacagcatcatgaactacttcagaaccgagagcgagggcagaagccccaaccacatcgtggtgctgtgcagaggcagagccttcgtgttcgacgtgatccacgagggctgcctggtgaccccccccgagctgctgagacagctgacctacatccacaagaagtgccacagcgagcccgacggccccggcatcgccgccctgaccagcgaggagagaaccagatgggccaaggccagagagtacctgatcggcctggaccccgagaacctggccctgctggagaagatccagagcagcctgctggtgtacagcatggaggacagcagcccccacgtgacccccgaggactacagcgagatcatcgccgccatcctgatcggcgaccccaccgtgagatggggcgacaagagctacaacctgatcagcttcagcaacggcgtgttcggctgcaactgcgaccacgcccccttcgacgccatgatcatggtgaacatcagctactacgtggacgagaagatcttccagaacgagggcagatggaagggcagcgagaaggtgagagacatccccctgcccgaggagctgatcttcatcgtggacgagaaggtgctgaacgacatcaaccaggccaaggcccagtacctgagagaggccagcgacctgcagatcgccgcctacgccttcaccagcttcggcaagaagctgaccaagaacaagatgctgcaccccgacaccttcatccagctggccctgcagctggcctactacagactgcacggccaccccggctgctgctacgagaccgccatgaccagacacttctaccacggcagaaccgagaccatgagaagctgcaccgtggaggccgtgagatggtgccagagcatgcaggaccccagcgtgaacctgagagagagacagcagaagatgctgcaggccttcgccaagcacaacaagatgatgaaggactgcagcgccggcaagggcttcgacagacacctgctgggcctgctgctgatcgccaaggaggagggcctgcccgtgcccgagctgttcaccgaccccctgttcagcaagagcggcggcggcggcaacttcgtgctgagcaccagcctggtgggctacctgagagtgcagggcgtggtggtgcccatggtgcacaacggctacggcttcttctaccacatcagagacgacagattcgtggtggcctgcagcgcctggaagagctgccccgagaccgacgccgagaagctggtgcagctgaccttctgcgccttccacgacatgatccagctgatgaacagcacccacctgtag

SEQ ID NO: 207931 - DNA, 3175 bp, Artificial Sequence
  derived and/or modified sequence
gggagcgagccggtgctgctgcaggctgaggctgcggcagaggcggcgaggcgcgggcggtgaggacggacagtcaccgacttagtccagttccctgtgatctcaaaacaattgttgcagcaggctcctggcagtctcaagcagttcatcttcttggtgtactggtttcctattgtgattttatcatggaaaatcaattggctaaatcaactgaagaacgaacatttcagtaccaggattctcttccatcactgcctgttccttcacttgaagaatcattaaaaaaataccttgaatcagtgaaaccatttgcaaatcaagaagaatataagaaaactgaagaaatagttcaaaaatttcaaagtgggattggagaaaaattgcaccagaaattgcttgaaagagcaaaaggaaaaagaaattggctggaagagtggtggctgaatgttgcctatctggatgttcgtataccatcacaattgaatgtcaactttgcgggtcctgcagctcattttgaacactactggcctccaaaggaagggactcaattagaaagaggaagtataactctttggcataacttgaactactggcagctattaagaaaagaaaaagtgcctgttcataaagttggaaatactcctctagatatgaatcaattccgaatgctattttctacctgcaaggttccaggaattactagagactccattatgaattattttaggactgagagtgaagggcgttccccaaaccacattgtagtgctgtgtcgaggccgagcttttgtctttgatgtaatacatgaaggatgtttggtcaccccgccagagcttctcagacaactgacatatatccacaagaagtgccatagtgaacctgatggacctgggattgcagcattaactagtgaggagcgaactcgatgggctaaggcacgagaatatctgattggtcttgatccagagaacttggctttgttagaaaaaattcagagtagtttactggtatattccatggaggatagcagtccacatgtaacaccagaggattattctgagattattgcagccatccttattggagatccaacagtacgctggggtgacaaatcctataacttgatttccttttctaatggagtatttggctgtaattgtgatcatgctccttttgatgcaatgattatggtgaacatcagttattatgtggatgagaaaatttttcagaatgaaggaagatggaagggttcagagaaggtacgagatataccacttccagaagagctcattttcattgtggatgagaaagttttaaatgacatcaaccaagctaaagcccagtatctcagggaggcatctgatctacagattgcggcttatgcctttacatcttttggcaaaaagctaaccaagaacaagatgcttcacccggatacgtttattcagcttgcacttcagctggcctattacagacttcatggacaccctggttgttgctatgaaacagctatgacaagacatttttatcatggccgtacagagactatgcgatcatgcacagttgaagcagtgaggtggtgccagtccatgcaggatccttctgtcaatcttcgtgagcggcagcaaaagatgttacaagcttttgcaaagcataataaaatgatgaaagattgttcagctggaaaaggatttgatcgtcaccttttaggtctcttactcatagcaaaagaggaaggtcttcctgttccagaactctttacggacccacttttttccaaaagcggaggaggtggaaattttgttctctcaacaagtctggttggctatttacgagtccagggagtggtagttcccatggtacacaatggttatggatttttctaccatatcagagatgacaggtttgttgtggcctgttcagcctggaaatcctgtcccgagactgatgcggaaaagctagttcagctgactttttgtgcttttcatgatatgatacagctgatgaactctactcatctttagagatgaatcatctattaagcacttaccaaaacatatcattaaactgagtgctgggagtgagttggtaatatgagatgggaaggaatgttgacttgctaacattcctttaacaagttaagaaaacttgttaaatgtagaaattagtagaatcatgctctctaaatttattctgccatagaaggtagaaatatttttaagctcctctgatgcagcagcaatgcaaattatgacatagtgaatatagaactatgcagtatttaagcctcaacaatccaaatctacaaactttaacaatgcaagtcttactctaatttttaagtatttttgttggtacttacatgggttataaatcctctctctggacatcaatgtagagtccatctttcaagcactttaatttttttagctgccaaagggtatgaattacattattgtatgctaatttccctgaaatcaatgccttctatgttcaccacagggatacaagcctgttatgtttgatgggaaagaccactacaatctaatggtgatctaaaataacttttttgggctgggtgcagtggctcatgcctataatcttagcactttgggaggccaaggtaggaggattgcttgaagctaggagtttgagaccagcctgggcaacagggtaaggtcctgtctctacaagatcaaaaacttagccgggtatggtggtgcatgtgtgcctgtagtccaagctacttgaaggctgagacaggaggatcggttgagcccaggaggttgtggctgcagtgagctgtgatgtgcccttatgctatagcctgggcaagagcgtgagaccctgtctcaaagaagaaaaaaagagaaaaataactcttttgaacaaacagacaaattagctagtagtatggagatgtataccctctattacacacataaaaccgtaacaaaattcattgtggtgtattataattagttttgtgaatagaaaaataaagcacttatgtttaaatttgttacagtgacttttaaaggattaatgttgaatcacattgtcagaattttttcctcctcgctgttcaattttgtagtttttactctcaaaaaatgaaattctcaaaattatatagctttttgttttgtttgaataaatgattcattcctgtttg

SEQ ID NO: 207932 - DNA, 1839 bp, Artificial Sequence
  derived and/or modified sequence
atggaaaaccagctagccaagagcacagaggaaaggacattccagtaccaagattcactgccatctttgcctgtgcctagcttggaagaatcgctgaagaagtatctagagtccgttaagccctttgccaatcaagaggaatataaaaagaccgaggaaatcgtacagaagtttcagagcggaatcggcgaaaagctccaccagaagctgctcgagcgtgcaaaggggaaacgaaattggctcgaggagtggtggctcaacgtggcatatttggatgttcggattccaagccaactgaacgtcaatttcgccggaccggcagcacattttgagcactattggcctcccaaggaggggacgcaactggaaagaggctccatcaccctgtggcataaccttaactattggcagctactgagaaaggagaaggtgcccgttcataaggtgggaaatacacccctggatatgaaccaatttaggatgctgttttcaacatgcaaagtccccgggatcacaagggactctatcatgaactacttccgtacggagagcgaagggcgttcgcctaatcacatcgtggttctctgtaggggacgagccttcgtattcgacgtgatccatgagggatgccttgtcacccccccagagttgctccggcagctgacttacatccataaaaaatgtcacagtgaacccgatggccctggcatcgcagctctgactagtgaggaacgtacccgatgggctaaggcccgggagtatctgataggactggaccccgagaacctagctctgctggagaaaatccagtcctcacttctggtctactcaatggaggattcttccccccacgttacaccagaggactattccgagataatcgctgctattctgattggcgatcctactgtgcggtggggagataagtcatataatcttatctccttctccaatggagtgtttggctgcaactgcgatcacgcaccctttgatgctatgatcatggtcaatattagttattatgtggacgagaaaatcttccaaaatgaggggagatggaagggctccgagaaggtccgcgatatccctctgcccgaagagctgatttttatcgtcgacgagaaggtcctcaacgacatcaaccaggctaaagcccagtacctgcgggaagcctcggatctgcagatcgccgcatatgctttcactagtttcggcaaaaaactcactaagaataaaatgttacaccctgacacatttatccagctggctctgcagctggcgtactaccgattgcacggccaccctgggtgctgttatgaaacagctatgaccagacacttctaccatgggcggacagagactatgagaagctgcaccgtggaggccgttagatggtgccagtccatgcaagaccccagcgtgaatctgagggagcgccaacagaagatgctgcaagctttcgctaagcataacaagatgatgaaggattgctctgccggcaagggcttcgaccgccatctgttgggactcctactgatcgccaaggaagaggggctcccagtcccagagctctttaccgaccctctgttttcaaagagcggtggaggcggcaacttcgtgctgtcaacctccctagtgggttatcttagagttcagggggtggttgtgcccatggtgcacaacggatatggcttcttttaccatatccgggatgacagattcgtcgttgcttgttccgcgtggaaatcgtgtccggagaccgatgccgagaagcttgtgcagctgactttctgtgcgttccatgatatgattcagttaatgaattccactcacttatag

SEQ ID NO: 207933 - DNA, 1839 bp, Artificial Sequence
  derived and/or modified sequence
atggagaaccagctggccaagagcacagaggagaggaccttccagtaccaggacagcctgcccagcctgcctgtgcccagcctggaggagagcctgaagaagtacctggagagcgtgaagccctttgccaaccaggaggagtacaagaagacagaggagatcgtgcagaagttccagagcggcatcggggagaagctgcaccagaagctgctggagcgggccaagggcaagaggaactggctggaggagtggtggctgaatgtggcctacctggatgtgcgcatccccagccagctgaatgtgaactttgctggccctgctgcccactttgagcactactggccacccaaggagggcacccagctggagcggggcagcatcaccctgtggcacaacctgaactactggcagctgctgaggaaggagaaggtgcctgtgcacaaggtgggcaacacccccctggacatgaaccagttcaggatgctgttcagcacctgcaaggtgcccggcatcacccgggacagcatcatgaactacttcagaacagagagcgagggccgcagccccaaccacatcgtggtgctgtgccggggccgggcctttgtgtttgatgtgattcatgagggctgcctggtgaccccacctgagctgctgcggcagctgacctacatccacaagaagtgccacagcgagccagatggccctggcattgctgccctgaccagcgaggagaggacccgctgggccaaggcccgggagtacctgattggcctggaccctgagaacctggccctgctggagaagatccagagcagcctgctggtgtacagcatggaggacagcagcccccacgtgaccccagaggactacagcgagatcatcgccgccatcctgattggagaccccaccgtgcgctggggagacaagagctacaacctgatctccttcagcaatggagtgtttggctgcaactgtgaccacgccccctttgatgccatgatcatggtgaacatctcctactacgtggatgagaagatcttccagaatgaaggccgctggaagggcagcgagaaggtgcgggacatccccctgcctgaggagctgatcttcatcgtggatgagaaggtgctgaatgacatcaaccaggccaaggcccagtacctgcgggaggccagtgacctgcagattgctgcctatgccttcaccagctttgggaagaagctgaccaagaacaagatgctgcacccagacaccttcatccagctggccctgcagctggcctactaccgcctgcacggccaccctggctgctgctatgaaacagccatgaccaggcacttctaccacggccgcacagagaccatgaggagctgcaccgtggaggccgtgcgctggtgccagagcatgcaggaccccagcgtgaacctgcgggagcggcagcagaagatgctgcaggcctttgccaagcacaacaagatgatgaaggactgcagcgctggaaaaggatttgacagacacctgctgggcctgctgctgattgccaaggaggagggcctgcctgtgcctgagctgttcacagaccccctcttcagcaagagcggcggcggcggcaactttgtgctgagcaccagcctggtgggctacctgcgggtgcagggcgtggtggtgcccatggtgcacaacggctacggcttcttctaccacatcagagatgacagatttgtggtggcctgcagcgcctggaagagctgcccagagacagatgctgagaagctggtgcagctgaccttctgtgccttccatgacatgatccagctgatgaacagcacccacctgtag

SEQ ID NO: 207934 - DNA, 1839 bp, Artificial Sequence
  derived and/or modified sequence
atggagaaccagctggccaagagcaccgaggagcggaccttccagtaccaggattccttgcctagcctgccagtgcccagtcttgaggagtctctcaagaaatatctggagagtgttaaaccctttgctaaccaggaagagtacaaaaaaactgaggagatcgtgcagaagttccaatccgggatcggagagaagctgcaccaaaagctgcttgaacgtgccaagggcaagcgtaactggcttgaggagtggtggttgaacgtcgcttacctggacgtccgcattccaagtcagctgaatgtgaactttgctggccccgctgcccattttgagcactactggcctccgaaggagggcacccaattagagcgtggcagtataacactatggcataatctcaattattggcagcttctgaggaaagagaaagttcctgtccacaaggtggggaatacccccctagacatgaaccaatttcgcatgctgttcagcacatgcaaagtccccggtatcacccgcgactccatcatgaactatttccgcactgagtccgaaggtcgctccccgaatcacattgtggtgctgtgtcgggggagagcttttgtgtttgacgtcatccacgagggatgcttggttacacccccggagctgttgcgacaactcacttacatccataaaaaatgtcacagtgaacctgatggccctggtattgcagctctgaccagcgaggagaggactcgctgggccaaagccagggagtatttgatcgggctggatcccgaaaacctcgctttgttggagaagattcagtcatctctcctggtgtatagcatggaagatagttccccgcatgtaacacccgaggactactcagaaattatcgctgccatcttaattggcgacccgacagtcagatggggcgataaaagctataacttgataagcttctccaatggcgtcttcgggtgtaattgcgatcatgctccatttgacgcaatgatcatggtgaatatctcctactacgtggatgaaaaaattttccagaatgagggcagatggaaaggcagtgaaaaagtgcgggatatcccacttcctgaagaacttatctttatagtcgacgagaaagtactcaatgatatcaaccaggctaaagcacagtacctacgcgaggcctccgaccttcaaatagcggcatacgccttcacttcttttgggaagaaactaaccaagaacaaaatgctacacccggacacctttattcaactggcattgcagctagcatattatagactccacggccatccaggctgctgctacgagaccgccatgacacgacatttctatcatggccggaccgaaactatgagaagttgtactgtcgaggccgtgcggtggtgccaaagtatgcaggacccatccgtaaacctgcgagagagacaacagaagatgctgcaagcattcgctaaacataacaaaatgatgaaggactgctccgcgggaaagggatttgataggcacttactgggcttactcctgatcgccaaagaagaaggcctacccgtccctgagctgttcaccgacccgctgttcagtaaaagtggcggaggcgggaactttgtcttaagtacaagtctggtgggctatcttcgtgtccagggagttgtggtgcccatggttcataatgggtacggcttcttttatcacatccgggatgatcggttcgtcgtggcctgcagcgcgtggaaatcctgccccgagacagacgccgagaagctcgttcagctgacattctgcgcgttccatgacatgatccagctaatgaactccacgcatttgtag

SEQ ID NO: 207935 - DNA, 1839 bp, Artificial Sequence
  derived and/or modified sequence
atggaaaaccagttggccaagagtactgaggagcgcaccttccagtaccaggatagcctgcccagtctcccagttccatcccttgaggaatctcttaaaaaatacttggagagcgtcaagccctttgccaaccaagaggaatataagaagacagaggagatcgtacaaaagtttcaaagcggaataggcgagaaactgcaccagaaattgctggagagggctaagggcaagagaaactggctcgaggaatggtggctcaacgttgcctacttggacgtgcggattccctcccaattgaacgtgaacttcgcgggtcctgcagcacatttcgagcactattggccacctaaggagggcacgcaactcgaacgaggatctattactctgtggcataatttaaattactggcagctgctcagaaaagagaaagttccagtgcataaggtggggaatactccgctcgatatgaatcagttccgcatgcttttctcgacttgcaaagtcccaggaattacacgggattcaatcatgaattacttccggacagagagcgagggtcgtagccccaaccacatagtggtcctgtgtcggggacgggctttcgtgttcgacgtcatacacgaaggctgtctcgtgacaccccctgagctcctgcggcaactcacctatatacacaaaaagtgccactctgagccagacggccctggcattgccgcattaacctctgaggaaagaactcgatgggctaaggcccgagaatacctgataggattggacccagagaacctcgccctactggagaagatccagagctctttgctggtgtactccatggaggactcctctcctcacgtcactcccgaggactatagcgagattatagcagcaattctaatcggggatccaacagtcaggtggggtgacaaatcgtacaacctcattagcttctcgaatggtgtctttggctgcaattgtgaccacgctccatttgatgctatgatcatggtgaatatttcttattatgtggacgagaagatattccagaatgagggacggtggaaggggagtgaaaaggtgcgggatatccccctacctgaggaattaatttttatcgtggatgagaaagtattaaacgacattaatcaggccaaagcacagtatctgcgggaagcatcggatcttcagatagcagcctatgcctttacttcttttggtaaaaagctcaccaagaacaagatgctccacccagacacatttattcagctggccttacaacttgcctactatcgtcttcatggacaccccggttgttgttacgaaacagctatgacaaggcatttttaccacgggcgtaccgaaacaatgagatcatgtactgtcgaggccgtgcggtggtgtcagtcaatgcaggatccttccgtcaatcttagggagcgtcagcagaagatgcttcaggcattcgcaaaacacaacaaaatgatgaaggactgcagtgctggtaagggattcgataggcacctgctggggctcctgctcatcgcaaaggaggaaggcctccccgtcccagagctatttactgatcctctgtttagcaaaagcggcggtggcggtaattttgtccttagtacgtcacttgtggggtaccttcgcgtgcagggggtggtcgtccccatggtacacaatgggtatggcttcttctaccacattcgagatgacaggtttgtagtcgcgtgcagtgcttggaagtcatgtcctgaaacagatgcagagaaactggttcaactgactttctgcgcgtttcacgacatgattcagcttatgaatagtacgcacttatag

SEQ ID NO: 207936 - protein, 772 aa, Artificial Sequence
  derived and/or modified sequence
MNCYLLLRFMLGIPLLWPCLGATENSQTKKVKQPVRSHLRVKRGWVWNQFFVPEEMNTTSHHIGQLRSDLDNGNNSFQYKLLGAGAGSTFIIDERTGDIYAIQKLDREERSLYILRAQVIDIATGRAVEPESEFVIKVSDINDNEPKFLDEPYEAIVPEMSPEGTLVIQVTASDADDPSSGNNARLLYSLLQGQPYFSVEPTTGVIRISSKMDRELQDEYWVIIQAKDMIGQPGALSGTTSVLIKLSDVNDNKPIFKESLYRLTVSESAPTGTSIGTIMAYDNDIGENAEMDYSIEEDDSQTFDIITNHETQEGIVILKKKVDFEHQNHYGIRAKVKNHHVPEQLMKYHTEASTTFIKIQVEDVDEPPLFLLPYYVFEVFEETPQGSFVGVVSATDPDNRKSPIRYSITRSKVFNINDNGTITTSNSLDREISAWYNLSITATEKYNIEQISSIPLYVQVLNINDHAPEFSQYYETYVCENAGSGQVIQTISAVDRDESIEEHHFYFNLSVEDTNNSSFTIIDNQDNTAVILTNRTGFNLQEEPVFYISILIADNGIPSLTSTNTLTIHVCDCGDSGSTQTCQYQELVLSMGFKTEVIIAILICIMIIFGFIFLTLGLKQRRKQILFPEKSEDFRENIFQYDDEGGGEEDTEAFDIAELRSSTIMRERKTRKTTSAEIRSLYRQSLQVGPDSAIFRKFILEKLEEANTDPCAPPFDSLQTYAFEGTGSLAGSLSSLESAVSDQDESYDYLNELGPRFKRLACMFGSAVQSNN

SEQ ID NO: 207937 - protein, 390 aa, Artificial Sequence
  derived and/or modified sequence
MNTTSHHIGQLRSDLDNGNNSFQYKLLGAGAGSTFIIDERTGDIYAIQKLDREERSLYILRAQVIDIATGRAVEPESEFVIKVSDINDNEPKFLDEPYEAIVPEMSPEGTLVIQVTASDADDPSSGNNARLLYSLLQGQPYFSVEPTTGVIRISSKMDRELQDEYWVIIQAKDMIGQPGALSGTTSVLIKLSDVNDNKPIFKESLYRLTVSESAPTGTSIGTIMAYDNDIGENAEMDYSIEEDDSQTFDIITNHETQEGIVILKKKVDFEHQNHYGIRAKVKNHHVPEQLMKYHTEASTTFIKIQVEDVDEPPLFLLPYYVFEVFEETPQGSFVGVVSATDPDNRKSPIRYSITRSKVFNINDNGTITTSNSLDREISAWYNLSITATEK

SEQ ID NO: 207938 - DNA, 2319 bp, Artificial Sequence
  derived and/or modified sequence
atgaactgctacctattgctcaggtttatgcttgggattcctcttctgtggccatgtctgggcgctactgaaaattcacaaactaagaaagtgaagcagccggtgaggagtcacctgagggtcaagaggggttgggtgtggaatcagttcttcgttccagaggagatgaacaccaccagccatcacatcggtcagctcaggtcggatcttgataatggaaacaatagttttcagtacaaactcctcggcgcgggtgcaggctcgacctttatcatcgatgaaagaaccggagatatatatgcaatccaaaaattggaccgggaggaacgcagtctgtatatattaagagcccaggttatcgatattgcaaccggaagagccgtcgaacccgagagcgagttcgtaattaaggtctccgatatcaatgacaacgaaccaaagtttcttgacgaaccatacgaagccattgtccctgaaatgtcccctgagggaaccctagttatccaggtaaccgcaagcgacgcagatgaccctagctcgggaaacaatgctaggctcctatatagcctattacaggggcaaccgtacttctccgtcgaacctactaccggcgtgatccgcatctcatctaaaatggacagagaactgcaagatgagtactgggtaatcatacaagcgaaggatatgattggccagccgggtgccttatctggcaccacctccgtgttaatcaaactctctgacgtgaacgacaataagccaattttcaaggagagcctgtacaggctgaccgtgtctgagagcgcccctaccggcacatccatcggaacaattatggcttatgacaacgatatcggtgagaacgcagaaatggactattccatcgaagaagatgatagtcagacctttgacataatcacgaaccacgagacgcaagaagggattgttattctaaagaaaaaagtggatttcgagcatcagaatcactatggcatacgagcgaaggtcaagaatcatcatgttcccgaacagttaatgaaatatcacaccgaggccagcacaacatttatcaaaatacaggtcgaggatgtagatgagcctcccttgttcctactcccctactatgtgtttgaggtgtttgaagaaacgccccagggatcctttgtcggtgtagtgagcgctacggatccggacaacagaaagtctccaatccgatattcaattaccaggtccaaagtgttcaatattaacgacaatgggaccatcaccacatccaactccttggatcgtgaaatcagcgcctggtacaatctgagcatcactgccactgaaaaatacaatattgagcagatctcatccattcctctgtatgttcaggtcctcaatatcaatgaccacgctccagaattctcccagtattacgaaacctacgtatgcgaaaacgcaggctccggacaagtgatccaaacaatttcagccgtggacagggatgagtcaatcgaggagcaccatttctattttaaccttagcgttgaagataccaacaattccagcttcacgattattgataaccaggacaataccgccgtgattttgacaaataggaccggtttcaacttgcaggaggaacccgtattttacatttcaattctcattgcggacaatggcataccctcactgacgtccacgaacacgcttactattcacgtctgcgattgcggagattccggtagcacgcagacatgtcagtatcaagagctggtgctgtccatgggattcaagactgaggtgatcattgcaattctgatttgcataatgattatcttcgggttcattttcctgacgttaggattgaagcagagacgcaaacagattttgttccccgagaagtcagaggattttagggaaaatatctttcagtacgatgacgaggggggaggcgaggaagataccgaagcttttgatatcgccgagctgaggtcctcaacaatcatgagggaaaggaagactagaaaaaccacgtccgccgaaattcggtccctgtatagacaatctctccaggtcggacccgactccgccatctttcgcaaattcatcttagagaaactggaggaggccaatactgatccatgcgctccaccttttgatagtttgcagacatacgcgttcgaagggactggttcgctggccggatctctgtcgtccctcgaaagtgctgtgtctgatcaggatgaatcatacgactatcttaatgaactcggacccagatttaaacgacttgcctgcatgtttggaagtgccgtgcagtctaacaactag

SEQ ID NO: 207939 - DNA, 2319 bp, Artificial Sequence
  derived and/or modified sequence
atgaactgctacctgctgctgcgcttcatgctgggcatccccctgctgtggccctgcctgggcgccacagagaacagccagaccaagaaggtgaagcagcctgtgcgcagccacctgcgggtgaagaggggctgggtgtggaaccagttctttgtgcctgaggagatgaacaccaccagccaccacatcggccagctgcggagtgacctggacaatggaaacaacagcttccagtacaagctgctgggcgctggggccggcagcaccttcatcattgatgagaggactggagacatctatgccatccagaagctggaccgggaggagaggagcctgtacatcctgcgggcccaggtgattgacatcgccaccggccgggctgtggagcctgagagcgagtttgtgatcaaggtgtctgacatcaatgacaatgagcccaagttcctggatgagccctatgaggccatcgtgcctgagatgagccctgagggcaccctggtgatccaggtgacagccagtgatgctgatgaccccagcagcggcaacaatgcccggctgctgtacagcctgctgcagggccagccctacttctctgtggagcccaccactggagtcatccgcatcagcagcaagatggaccgggagctgcaggatgagtactgggtgatcatccaggccaaggacatgattggccagcccggggccctgagcggcaccacctctgtgctgatcaagctgagtgatgtgaatgacaacaagcccatcttcaaggagagcctgtaccgcctgactgtgtctgagagcgcccccaccggcaccagcatcggcaccatcatggcctatgacaatgacattggagaaaatgctgagatggactacagcattgaagaagatgacagccagacctttgacatcatcaccaaccacgagacccaggagggcatcgtcatcctgaagaagaaggtggactttgagcaccagaaccactacggcatccgggccaaggtgaagaaccaccacgtgcctgagcagctgatgaagtaccacacagaggccagcaccaccttcatcaagatccaggtggaggatgtggatgagcccccactcttcctgctgccctactacgtgtttgaggtgtttgaggagaccccccagggcagctttgtgggcgtggtgtctgccacagatcctgacaacaggaagagccccatccgctacagcatcaccaggagcaaggtgttcaacatcaatgacaatggcaccatcaccaccagcaacagcctggaccgggagatcagcgcctggtacaacctgagcatcacagccacagagaagtacaacatcgagcagatcagcagcatccccctgtatgtgcaggtgctgaacatcaatgaccacgcccctgagttcagccagtactatgagacctacgtgtgtgaaaatgccggcagcggccaggtgatccagaccatctctgctgtggacagagatgagagcattgaggagcaccacttctacttcaacctgtctgtggaggacaccaacaacagcagcttcaccatcatcgacaaccaggacaacacagctgtgatcctgaccaacagaacaggcttcaacctgcaggaggagcccgtcttctacatcagcatcctgattgctgacaatggcatccccagcctgaccagcaccaacaccctgaccatccacgtgtgtgactgtggggacagcggcagcacccagacctgccagtaccaggagctggtgctgtccatgggcttcaagacagaggtgatcatcgccatcctgatctgcatcatgatcatcttcggcttcatcttcctgaccctgggcctgaagcagaggaggaagcagatcctcttccctgagaagtctgaggacttccgggagaacatcttccagtatgatgatgaaggaggaggagaggaggacacagaggcctttgatattgctgagctgcggagcagcaccatcatgagggagaggaagaccaggaagaccaccagcgctgagatccgcagcctgtaccggcagagcctgcaggtgggccctgacagcgccatcttcaggaagttcatcctggagaagctggaggaggccaacacagacccctgtgcccccccatttgacagcctgcagacctacgcctttgagggcaccggcagcctggccggcagcctgagcagcctggagagcgctgtgtctgaccaggatgagagctatgactacctgaatgagctgggcccccgcttcaagaggctggcctgcatgtttggcagcgctgtgcagagcaacaactag

SEQ ID NO: 207940 - DNA, 2319 bp, Artificial Sequence
  derived and/or modified sequence
atgaactgctacctgctgctgcggttcatgctgggcatccccctgctgtggccctgcctgggagccacagagaactcacagacaaagaaggtgaaacagcctgtacgctcccatcttcgcgtaaaacggggctgggtgtggaaccaattcttcgtgcccgaagaaatgaataccacttcgcaccacattggtcaactgcgaagcgacctggacaatggaaataatagctttcaatataaactgctgggggcgggggccggtagcacgtttataatcgatgagaggaccggcgacatttatgctattcagaaactggaccgggaagagaggtctctgtatatcttgcgcgcgcaggtgatcgacatcgctacgggaagggctgtggaacccgagagtgagtttgtcataaaggtcagcgatattaatgataatgagcccaagtttctggatgagccatatgaggctatcgtgcctgagatgagtcctgagggcaccctggttattcaagtgaccgcgtctgacgccgacgacccttcttccgggaacaatgcccgactcctctactcccttctgcagggacagccttacttcagcgttgagcccactactggagttatccgtatttcttcaaagatggatagagagctgcaggacgaatactgggtgatcatccaggcaaaggatatgattggccagccaggggccctttctggcaccacatccgtcctgattaaactgagtgatgtgaacgacaataagcccatctttaaagagtctttataccgcctaactgtgtccgaatcggctcctacaggaacgtcgatcggcaccatcatggcctatgataatgatattggcgaaaacgcggaaatggactactcaatcgaggaggacgattcccaaacttttgacatcattaccaaccacgaaacacaagagggaatcgtcatacttaaaaagaaagtggattttgaacatcaaaaccactatggaataagggccaaggtgaagaaccaccacgtccccgagcagttaatgaagtatcatacagaggcaagcactaccttcataaaaattcaagtcgaggacgtcgacgaacctcccctctttctgttaccatactacgtgttcgaggtgttcgaggaaaccccccaggggtcctttgttggagttgtgtccgcgaccgaccccgacaacaggaagagtccaattcgctactctattactcgctcgaaggtgtttaatattaacgataatggcaccatcaccacatcgaactctctggatagagaaatttcggcttggtacaacctctcgattaccgccacggaaaagtacaatatcgaacagattagcagcatccctctgtatgttcaagttctcaacattaatgatcacgcaccagagttttcacagtattatgagacttacgtgtgcgaaaacgctggctccgggcaggtgatacagacaatcagtgccgtagaccgggacgagtccatcgaggagcatcatttttattttaatctgtcggtggaggacactaataactcaagcttcaccatcattgacaatcaagacaacactgcagtgattctgactaaccggacagggtttaacctgcaagaggagcctgtgttctacatcagtattctcattgctgataatggaattccgagccttacatccaccaatacactcaccattcatgtatgtgactgcggtgactctgggagtacgcagacctgccaataccaggaactggtgctgtcaatgggtttcaagactgaagttattattgcaatcctcatttgtattatgattatttttggatttatttttctgacattgggtctgaaacaaaggcgaaaacaaatcttgttcccagagaaaagtgaagatttccgggagaacatctttcagtacgacgatgagggcggaggggaagaggacaccgaggcgtttgatatcgcagagttgcgctcctcgactatcatgcgcgaacgcaagacccggaaaaccacgagtgcagaaatccgcagcttgtatcgtcagtctctgcaggtcggccccgattcagcgattttccgaaagttcatcctggagaagctggaagaggctaatacggatccctgtgcccccccattcgatagcttgcagacatatgcttttgaaggcactgggagtctagccggcagcttgtctagtctggaatctgcagtttccgatcaggacgaatcatacgactatctgaatgagctgggtccgcggtttaaacgcttagcctgtatgttcggcagtgctgtgcagagcaataactag

SEQ ID NO: 207941 - DNA, 2319 bp, Artificial Sequence
  derived and/or modified sequence
atgaactgctacttactgctacgattcatgctgggcatccccctcctttggccctgtcttggagcaacggaaaatagccagaccaagaaggtgaagcagccggtgagatcccacttgcgcgtgaagagaggctgggtgtggaatcaatttttcgtccctgaggagatgaataccacaagccaccacatcggccagctccggtccgatttggacaacggcaataatagcttccagtacaagcttctcggagccggagctggctccaccttcattatcgacgaacgtactggcgacatttacgctatccagaaactggatagggaggaacggtccttgtacattctgagagcgcaggtgattgatatcgctactgggcgagcagtagagcccgagtccgagttcgttattaaggtgtctgatattaacgataatgaacctaagtttctggacgagccctacgaggcgatagttccggaaatgagccctgagggaacactggtcatccaggtgacagcttcagatgccgacgatccatccagcggcaataacgctcgactgctctacagcctcctacaagggcaaccctatttttctgtcgaaccaactaccggtgttataaggatcagctctaaaatggacagggaactgcaggatgaatattgggtcataatacaggctaaggatatgatcggtcaacctggggctctctccgggactactagcgtcctgattaagcttagtgacgtcaatgacaataagcctatttttaaggaatctctctatcgtctgactgtgagtgaaagcgcccctacggggacgtctatcggcaccatcatggcctacgataatgacatcggggaaaacgcagaaatggactactcgatcgaggaggatgactcccagaccttcgacatcatcaccaatcacgaaacccaggaggggatcgtgatccttaagaagaaagtggactttgaacaccagaaccactatggaatccgcgctaaagttaagaaccaccacgtccctgagcagctcatgaaatatcacacagaagcctctactacctttattaaaatccaagtggaagacgttgatgagcctccattgtttctgctgccttactacgtgttcgaggtctttgaagagacacctcagggaagttttgtcggagtggtctccgctaccgacccagacaatcggaaatctccaattagatatagtattacccgctctaaggtcttcaacataaacgataacggcaccattacaaccagcaacagccttgacagggagatttcggcctggtacaacctgagcataaccgctactgaaaaatacaatattgaacagatatcaagtattcccttgtatgtgcaagtgctgaatattaacgaccatgccccagaatttagtcagtactatgaaacctatgtctgcgagaacgccggatcgggacaggttatccaaaccatatcagctgtcgaccgggatgaaagcatcgaggaacatcacttttatttcaatttatcagtagaggataccaacaactcctcttttacaattattgacaaccaagacaacaccgctgtgatattgacgaacagaactggtttcaatctccaggaggagccggttttttacataagcatcctgattgcagacaacggaatcccttccctgacgagcaccaacacgttgaccatccatgtttgcgactgcggtgatagcggatcaacccagacatgtcagtatcaggagttagtgctcagcatgggcttcaaaacagaggtgattatcgctattcttatctgcatcatgattatcttcggatttattttcctgacacttgggttgaaacagagaaggaagcagatcctttttcctgagaagagtgaagatttccgcgagaatattttccagtatgatgatgaagggggtggggaggaggatacggaagcgttcgacatcgctgagctgagaagttccacaatcatgcgggaacgcaagacccgcaaaaccactagcgccgagattcggagcctgtatagacaatccctgcaggtcggccctgacagcgccatattccgaaaattcatcttagagaagctggaagaggccaatactgatccttgcgcaccccctttcgactctctacagacttacgccttcgaaggcaccgggtcccttgcaggaagcctgagcagcctcgagtctgccgtcagcgatcaggatgagagctatgactatctgaatgagctaggccctcggttcaagcgtctcgcatgtatgttcggatccgctgtgcagtctaacaattag

SEQ ID NO: 207942 - DNA, 6341 bp, Artificial Sequence
  derived and/or modified sequence
tgacagtgttgtggtactaaaagcacaagcgtctgtaactctgggcaatggggcacatcgagagtttgctgagaagactgtgaagcaaaaagaagaaagtttttcctactcttccttatgtgtccaacacgaagtttgctgttcagttttcacagaacttctagaagttgaagttacaaaggtatatagaaggtacacagaatcagaaaagattataaaagaaagcaagatttttgttagtgacgtcctgtttcctctgaagagtaatagttggaatcaaaagagtcaacgcaatgaactgttatttactgctgcgttttatgttgggaattcctctcctatggccttgtcttggagcaacagaaaactctcaaacaaagaaagtcaagcagccagtgcgatctcatttgagagtgaagcgtggctgggtgtggaaccaattttttgtaccagaggaaatgaatacgactagtcatcacatcggccagctaagatctgatttagacaatggaaacaattctttccagtacaagcttttgggagctggagctggaagtacttttatcattgatgaaagaacaggtgacatatatgccatacagaagcttgatagagaggagcgatccctctacatcttaagagcccaggtaatagacatcgctactggaagggctgtggaacctgagtctgagtttgtcatcaaagtttcggatatcaatgacaatgaaccaaaattcctagatgaaccttatgaggccattgtaccagagatgtctccagaaggaacattagttatccaggtgacagcaagtgatgctgacgatccctcaagtggtaataatgctcgtctcctctacagcttacttcaaggccagccatatttttctgttgaaccaacaacaggagtcataagaatatcttctaaaatggatagagaactgcaagatgagtattgggtaatcattcaagccaaggacatgattggtcagccaggagcgttgtctggaacaacaagtgtattaattaaactttcagatgttaatgacaataagcctatatttaaagaaagtttataccgcttgactgtctctgaatctgcacccactgggacttctataggaacaatcatggcatatgataatgacataggagagaatgcagaaatggattacagcattgaagaggatgattcgcaaacatttgacattattactaatcatgaaactcaagaaggaatagttatattaaaaaagaaagtggattttgagcaccagaaccactacggtattagagcaaaagttaaaaaccatcatgttcctgagcagctcatgaagtaccacactgaggcttccaccactttcattaagatccaggtggaagatgttgatgagcctcctcttttcctccttccatattatgtatttgaagtttttgaagaaaccccacagggatcatttgtaggcgtggtgtctgccacagacccagacaataggaaatctcctatcaggtattctattactaggagcaaagtgttcaatatcaatgataatggtacaatcactacaagtaactcactggatcgtgaaatcagtgcttggtacaacctaagtattacagccacagaaaaatacaatatagaacagatctcttcgatcccactgtatgtgcaagttcttaacatcaatgatcatgctcctgagttctctcaatactatgagacttatgtttgtgaaaatgcaggctctggtcaggtaattcagactatcagtgcagtggatagagatgaatccatagaagagcaccatttttactttaatctatctgtagaagacactaacaattcaagttttacaatcatagataatcaagataacacagctgtcattttgactaatagaactggttttaaccttcaagaagaacctgtcttctacatctccatcttaattgccgacaatggaatcccgtcacttacaagtacaaacacccttaccatccatgtctgtgactgtggtgacagtgggagcacacagacctgccagtaccaggagcttgtgctttccatgggattcaagacagaagtcatcattgctattctcatttgcattatgatcatatttgggtttatttttttgactttgggtttaaaacaacggagaaaacagattctatttcctgagaaaagtgaagatttcagagagaatatattccaatatgatgatgaagggggtggagaagaagatacagaggcctttgatatagcagagctgaggagtagtaccataatgcgggaacgcaagactcggaaaaccacaagcgctgagatcaggagcctatacaggcagtctttgcaagttggccccgacagtgccatattcaggaaattcattctggaaaagctcgaagaagctaatactgatccgtgtgcccctccttttgattccctccagacctacgcttttgagggaacagggtcattagctggatccctgagctccttagaatcagcagtctctgatcaggatgaaagctatgattaccttaatgagttgggacctcgctttaaaagattagcatgcatgtttggttctgcagtgcagtcaaataattagggctttttaccatcaaaatttttaaaagtgctaatgtgtattcgaacccaatggtagtcttaaagagttttgtgccctggctctatggcggggaaagccctagtctatggagttttctgatttccctggagtaaatactccatggttattttaagctacctacatgctgtcattgaacagagatgtggggagaaatgtaaacaatcagctcacaggcatcaatacaaccagatttgaagtaaaataatttaggaagatattaaaagtagatgagaggacacaagatgtagtcgatccttatgcgattatatcattatttacttaggaaagagtaaaaataccaaacgagaaaatttaaaggagcaaaaatttgcaagtcaaatagaaatgtacaaatcgagataacatttacatttctatcatattgacatgaaaattgaaaatgtatagtcagagaaattttcatgaattattccatgaagtattgtttcctttatttaaaaaaaaaaaaaaaaaaaaagaatgctaggtaatcttcgtagaaaactagaaagtatgataaacaacagttggaggaatccatggaaaatagacgagaaaatgtaaataaggctttctggggatcacagaacttttgtatgaataaaagccttataaaaccagctctggcatatgactaaaatattcctctactatttttcaatgtcatctaatgcaaacgctcaacctttttaaatggttaatgtgagaaaggcactgaattaagatatcttagtgttattttatttactcaattttcatctttcacactgtaagaataaaatgtttttgtggttaagttcctgatactatatagagataaactttaaaactttaacacctaggataatgtgggtgattacataaatgtttaaaaacatttaccttatatggaaagcagatttctgactaagatgccatgattcattctagtttgatattttaaaactttgccaagagcactctttaaaactgatttcaaatttgaacagatacttggtgtatacaaattaatcagagttatatagtataaatttgtattatttttgatattacaactttgtattaaaaaggaaaatatatttaggtgtttgtcatagattttttttcatatgcaactcaaaacacattcttatgtcaaaatacaatagcaaaatacaagtcaatatttactcataattaaatgcaaactttatgaaactggtggaaagtgtggaaaaatttaagtaaatttttacctctactaaaaattatttagacaacttaaaggaatactggattcaaacttcagttactattcactgtaaatattatgatcaactgaactgacttaccattcatgggataaaacatgatacaattctcagtatttgcttttctgttaagagcttggaatatgactgatgcttcagtgtcatttttttattattgaatataaaattaggtgcaatagatacatttattgtagccttaagaaggaaatcaatgctaagctgttgggcataaaactttacagtaacattagataacaagataataaaacactttaattttaatcgaccttttaagaatgatctttattattctatccaaatcaaggtagacttcaaaatttatggtttgaacaggaagaaagtagtgaatacaaaattcttaaaattggttcatatgatcatttttttattaatagcatgtgagactaagctgaaccaaactggccatatatgttaaatcaaataatttgagtaattttgaaatattgatgaagtagttaaatggttataatatattttattggtactttgaaatttaaacatctatatcacataataaagaaagtttttcatcaatctgaaacaggcaccattaaattggtgacacaaatattatcatttcacaaaagcttgagaaaaccagatttgaagtgaaataatttaggaagatattaaaagtggatgagaggacataagatgtagtcaatccttaacgcaatgataccattattaggaaagaggaaaaataccaaacaagagaaaatttaaaggagcaaaaatttgcaagtcaaatagaaatgcacaaatcgagagaacatttacatttctatcacattgacatgaaaattgaaaatgtatagtcagagaaattttcatgaattattccatgaagtgttgtttcctttatttaaaaagaatgctaggtaatcttagtagaaaactaaaaagtatgataaacaacagatggaagaattcatggaaaatagacgagaaaaagtaaataaggctttctggagatgacggaaattttgtatgaataaaagccttataaacaatgaatacatttggataaacaactcattaaaatgcacattaatggaatacctgtacaaatagttttaatacttgtgtccagtggcactaaagagatatattaaaatagattctggttgagttgattataagattgtcaatcataggatacacagggaaagcacagacacgattgctcatctctttggtagtctaaaatatgttccttttaaccacatcaaaagatactatctgattctaatacagaaggtgcaacttcctaggaattatactttgtattatattcaataattattttatgttttgcatcacatgggtgttgcaagaacacagctcttaaactaaaaaggcattacattaagaatttatttttgtaaattttaataaactctaaattaatgcaaaatatttatgaaaatagcacagcttcacattaatacccacagtacttaaatatctcccttagttgactcacagctttgtatgtaagcttcaaatttttaatggtaaaaataagaaaattaggactagcgaactgctagttgttccctcagtgcatgtgcttgagcctaacagatctttgtttgaattagttactttcaattaagcgaacatataatatttgttaaactgcttaatctttccagatctcactttgtaaaatgacgtccaatcaacctatttcacatggttgttatgaagaattaataataagatatgtaaaaccagcagcaccaatagtgcctgacaaaatataactgctcaataaataacagtgaattattataacaacagctaatggtattctattggaacacatggtctgtttcttttccaattctgagtgatctcaacagcctcacggcacattgaaaataaaagtcaacttcctcaccttccccataggccatggactttcccatctctacccacttgtgcagtttctcctctttcctctctcctcctcagttactaaagcaatcttccttcaaacacttctattttccattacatcacttcattcaggttggtgatcagctgcaacttcctcagaaagaccactgctgcttccagtgaccctggctttgtcttgctttgtattagattactcagctccctggtattattgttgtctttatcgcttattagaatgtaacccttaatgggcaagaaattgtcagtcttgttcatttatcatcgtataaaaaatgtttctagcacacagaaagtgaccaataaatatttctggaattaatgtagtaatgaatccaatctattttacttagtgacttgtagaaattcttttggtttccattgactatttttatagaatattaatatggaattaaagtatttttcaaaa

SEQ ID NO: 207943 - DNA, 2319 bp, Artificial Sequence
  derived and/or modified sequence
atgaactgctacctgctgctgagattcatgctgggcatccccctgctgtggccctgcctgggcgccaccgagaacagccagaccaagaaggtgaagcagcccgtgagaagccacctgagagtgaagagaggctgggtgtggaaccagttcttcgtgcccgaggagatgaacaccaccagccaccacatcggccagctgagaagcgacctggacaacggcaacaacagcttccagtacaagctgctgggcgccggcgccggcagcaccttcatcatcgacgagagaaccggcgacatctacgccatccagaagctggacagagaggagagaagcctgtacatcctgagagcccaggtgatcgacatcgccaccggcagagccgtggagcccgagagcgagttcgtgatcaaggtgagcgacatcaacgacaacgagcccaagttcctggacgagccctacgaggccatcgtgcccgagatgagccccgagggcaccctggtgatccaggtgaccgccagcgacgccgacgaccccagcagcggcaacaacgccagactgctgtacagcctgctgcagggccagccctacttcagcgtggagcccaccaccggcgtgatcagaatcagcagcaagatggacagagagctgcaggacgagtactgggtgatcatccaggccaaggacatgatcggccagcccggcgccctgagcggcaccaccagcgtgctgatcaagctgagcgacgtgaacgacaacaagcccatcttcaaggagagcctgtacagactgaccgtgagcgagagcgcccccaccggcaccagcatcggcaccatcatggcctacgacaacgacatcggcgagaacgccgagatggactacagcatcgaggaggacgacagccagaccttcgacatcatcaccaaccacgagacccaggagggcatcgtgatcctgaagaagaaggtggacttcgagcaccagaaccactacggcatcagagccaaggtgaagaaccaccacgtgcccgagcagctgatgaagtaccacaccgaggccagcaccaccttcatcaagatccaggtggaggacgtggacgagccccccctgttcctgctgccctactacgtgttcgaggtgttcgaggagaccccccagggcagcttcgtgggcgtggtgagcgccaccgaccccgacaacagaaagagccccatcagatacagcatcaccagaagcaaggtgttcaacatcaacgacaacggcaccatcaccaccagcaacagcctggacagagagatcagcgcctggtacaacctgagcatcaccgccaccgagaagtacaacatcgagcagatcagcagcatccccctgtacgtgcaggtgctgaacatcaacgaccacgcccccgagttcagccagtactacgagacctacgtgtgcgagaacgccggcagcggccaggtgatccagaccatcagcgccgtggacagagacgagagcatcgaggagcaccacttctacttcaacctgagcgtggaggacaccaacaacagcagcttcaccatcatcgacaaccaggacaacaccgccgtgatcctgaccaacagaaccggcttcaacctgcaggaggagcccgtgttctacatcagcatcctgatcgccgacaacggcatccccagcctgaccagcaccaacaccctgaccatccacgtgtgcgactgcggcgacagcggcagcacccagacctgccagtaccaggagctggtgctgagcatgggcttcaagaccgaggtgatcatcgccatcctgatctgcatcatgatcatcttcggcttcatcttcctgaccctgggcctgaagcagagaagaaagcagatcctgttccccgagaagagcgaggacttcagagagaacatcttccagtacgacgacgagggcggcggcgaggaggacaccgaggccttcgacatcgccgagctgagaagcagcaccatcatgagagagagaaagaccagaaagaccaccagcgccgagatcagaagcctgtacagacagagcctgcaggtgggccccgacagcgccatcttcagaaagttcatcctggagaagctggaggaggccaacaccgacccctgcgccccccccttcgacagcctgcagacctacgccttcgagggcaccggcagcctggccggcagcctgagcagcctggagagcgccgtgagcgaccaggacgagagctacgactacctgaacgagctgggccccagattcaagagactggcctgcatgttcggcagcgccgtgcagagcaacaactag

SEQ ID NO: 207944 - protein, 324 aa, Artificial Sequence
  derived and/or modified sequence
MDAPRQVVNFGPGPAKLPHSVLLEIQKELLDYKGVGISVLEMSHRSSDFAKIINNTENLVRELLAVPDNYKVIFLQGGGCGQFSAVPLNLIGLKAGRCADYVVTGAWSAKAAEEAKKFGTINIVHPKLGSYTKIPDPSTWNLNPDASYVYYCANETVHGVEFDFIPDVKGAVLVCDMSSNFLSKPVDVSKFGVIFAGAQKNVGSAGVTVVIVRDDLLGFALRECPSVLEYKVQAGNSSLYNTPPCFSIYVMGLVLEWIKNNGGAAAMEKLSSIKSQTIYEIIDNSQGFYVSVGGIRASLYNAVTIEDVQKLAAFMKKFLEMHQL

SEQ ID NO: 207945 - DNA, 975 bp, Artificial Sequence
  derived and/or modified sequence
atggatgctcctcggcaggtggtcaactttggcccaggccctgccaagcttcctcattctgtcctgctggagatccagaaagagctcctggattacaaaggcgtcggcatttccgtcctggagatgagtcacaggtcctccgatttcgctaagattataaataacaccgagaatttagtgagagagttactggccgtgcccgacaactataaggtcatttttctccaggggggggggtgcgggcaattttccgccgtgccgcttaacctgattgggctgaaggccgggcggtgtgccgattatgtggtgaccggtgcttggagtgcgaaggcagctgaagaagccaaaaagttcggaactattaatatcgtccacccaaaattgggaagctacacaaaaatccccgatccttcgacttggaatcttaatcccgacgcctcctacgtttactactgcgccaatgagacagtgcatggagttgaatttgactttattcctgacgtgaaaggggctgtcctcgtctgcgatatgagcagcaacttcctgtccaaacctgtggatgtgtctaaatttggtgttatctttgctggggctcagaaaaatgtggggtccgctggcgtaaccgtggtgattgtgcgggacgacttgctcggcttcgcgctgcgcgaatgtccctcagtgctcgagtacaaagtccaggcaggtaattccagtctgtataacacccccccctgcttcagtatttatgtgatgggacttgtgctggaatggatcaagaacaacggcggagcggccgccatggagaagctgtcgagcatcaagagccaaactatttatgagatcatcgacaatagtcaggggttctacgtgtcggtaggcggcattcgggcctctttgtacaacgcagtcaccatagaagatgtacagaaactcgccgcattcatgaaaaagttcctagagatgcaccagttatag

SEQ ID NO: 207946 - DNA, 975 bp, Artificial Sequence
  derived and/or modified sequence
atggatgccccccggcaggtggtgaactttggacctggccctgccaagctgccccacagcgtgctgctggagatccagaaggagctgctggactacaagggcgtgggcatctctgtgctggagatgagccacaggagcagtgactttgccaagatcatcaacaacacagagaacctggtgcgggagctgctggccgtgcctgacaactacaaggtgatcttcctgcagggcggcggctgcggccagttctctgctgtgcccctgaacctgattggcctgaaggccggccgctgtgccgactatgtggtgactggagcctggagcgccaaggctgctgaggaggccaagaagtttggcaccatcaacatcgtgcaccccaagctgggcagctacaccaagatcccagaccccagcacctggaacctgaacccagatgccagctatgtgtactactgtgccaatgagaccgtgcacggcgtggagtttgacttcatcccagatgtgaagggagctgtgctggtgtgtgacatgagcagcaacttcctgagcaagcctgtggatgtgtccaagtttggagtcatctttgctggggcccagaagaatgtgggcagcgctggggtgacagtggtgattgtgagagatgacctgctgggctttgccctgagagaatgtcccagcgtgctggagtacaaggtgcaggccggcaacagcagcctgtacaacaccccaccctgcttcagcatctacgtgatgggcctggtgctggagtggatcaagaacaatggaggagctgctgccatggagaagctgagcagcatcaagagccagaccatctatgagatcatcgacaacagccagggcttctacgtgtctgtgggcggcatccgggccagcctgtacaatgctgtgaccattgaagatgtgcagaagctggccgccttcatgaagaagttcctggagatgcaccagctgtag

SEQ ID NO: 207947 - DNA, 975 bp, Artificial Sequence
  derived and/or modified sequence
atggacgccccccggcaggtggtgaacttcggccccggccccgccaagctgccccactccgtcttgctggagatccagaaggaattgctcgattacaaaggcgttggaatcagtgttctcgagatgtctcataggtcctctgacttcgctaagatcattaacaacaccgaaaacctggtgcgggagctcctggcggtgccagacaattacaaagtcatttttctacagggcggtggatgtgggcaattttcagccgttcctctaaatctgattgggctgaaggctgggcggtgtgctgactacgtggtgacaggtgcctggtccgccaaagccgcagaagaggctaaaaagttcgggactataaacatcgtgcatccaaaactcggaagttacacgaaaatccccgacccctctacctggaatcttaacccagatgccagctatgtgtactactgtgctaatgaaaccgttcatggcgtagaattcgacttcattcctgacgtcaaaggggctgttctcgtgtgcgacatgtccagcaactttctgtccaagcctgtggacgtatccaagttcggtgtcattttcgcaggtgcccaaaaaaacgtgggatctgcaggggtgacagtggtgatcgtgagggatgatctgctcggttttgcactgcgtgagtgccccagtgtgctcgaatataaggtccaggccggcaattctagtctatataatacaccaccttgtttcagtatctacgtcatgggactggtgctggagtggattaaaaacaacggtggtgccgctgccatggagaaactgtccagtatcaaatcacagacaatttacgagatcatcgataacagccaaggattttatgtctcggtgggcgggatccgcgcatccctgtataacgctgtcacaattgaggatgtccagaaactagcagcctttatgaaaaagtttttggagatgcatcagctttag

SEQ ID NO: 207948 - DNA, 1411 bp, Artificial Sequence
  derived and/or modified sequence
ggccaggaacgccagccgttcacgcgttcggtcctccttggctgactcaccgccctggccgccgcaccatggacgcccccaggcaggtggtcaactttgggcctggtcccgccaagctgccgcactcagtgttgttagagatacaaaaggaattattagactacaaaggagttggcattagtgttcttgaaatgagtcacaggtcatcagattttgccaagattattaacaatacagagaatcttgtgcgggaattgctagctgttccagacaactataaggtgatttttctgcaaggaggtgggtgcggccagttcagtgctgtccccttaaacctcattggcttgaaagcaggaaggtgtgctgactatgtggtgacaggagcttggtcagctaaggccgcagaagaagccaagaagtttgggactataaatatcgttcaccctaaacttgggagttatacaaaaattccagatccaagcacctggaacctcaacccagatgcctcctacgtgtattattgcgcaaatgagacggtgcatggtgtggagtttgactttatacccgatgtcaagggagcagtactggtttgtgacatgtcctcaaacttcctgtccaagccagtggatgtttccaagtttggtgtgatttttgctggtgcccagaagaatgttggctctgctggggtcaccgtggtgattgtccgtgatgacctgctggggtttgccctccgagagtgcccctcggtcctggaatacaaggtgcaggctggaaacagctccttgtacaacacgcctccatgtttcagcatctacgtcatgggcttggttctggagtggattaaaaacaatggaggtgccgcggccatggagaagcttagctccatcaaatctcaaacaatttatgagattattgataattctcaaggattctacgtgtctgtgggaggcatccgggcctctctgtataatgctgtcacaattgaagacgttcagaagctggccgccttcatgaaaaaatttttggagatgcatcagctatgaacacatcctaaccaggatatactctgttcttgaacaacatacaaagtttaaagtaacttggggatggctacaaaaagttaacacagtatttttctcaaatgaacatgtttattgcagattcttcttttttgaaagaacaacagcaaaacatccacaactctgtaaagctggtgggacctaatgtcaccttaattctgacttgaactggaagcattttaagaaatcttgttgcttttctaacaaattcccgcgtattttgcctttgctgctactttttctagttagatttcaaacttgcctgtggacttaataatgcaagttgcgattaattatttctggagtcatgggaacacacagcacagagggta

SEQ ID NO: 207949 - DNA, 975 bp, Artificial Sequence
  derived and/or modified sequence
atggacgcccctagacaggtggttaactttggcccaggacccgctaagcttccccacagtgtgctgctggagattcagaaggagctgctagattataaaggggtaggaatctctgtactagagatgtcacaccggtccagcgacttcgctaaaattatcaataatacagaaaatctagtgcgcgagttactggcagtcccagacaactataaggtgatattcttgcaagggggaggctgtggccaattttctgcggtcccgcttaatcttataggacttaaagctggcagatgcgccgactacgttgtgacaggagcatggagtgccaaggccgcagaagaggccaaaaagtttggcaccatcaatatcgtacaccctaagctgggaagttacaccaagatccccgatccctccacctggaacctcaacccggatgctagctacgtatactactgcgctaatgaaaccgttcacggcgtggagttcgattttatcccggacgtcaagggtgccgtgctggtgtgtgacatgtcttcgaacttcctttccaagccagtggatgtgagcaagttcggagtcattttcgccggtgcacagaaaaatgtaggctccgctggggttacggtcgtgattgtgcgagatgatcttctagggttcgctctgagggaatgtccctcagttctggagtacaaggtgcaggctgggaacagctccctctacaataccccaccgtgcttcagcatatacgttatggggttggtgctggaatggatcaagaataatgggggagcagctgcaatggaaaaactcagttcaatcaagtctcaaacaatttatgagatcattgataacagccagggcttttacgtcagtgtgggaggcatccgcgcttcgctctataatgccgtgactattgaagatgtgcagaaactggcggctttcatgaagaagtttctggaaatgcaccaactatag

SEQ ID NO: 207950 - DNA, 975 bp, Artificial Sequence
  derived and/or modified sequence
atggacgcccccagacaggtggtgaacttcggccccggccccgccaagctgccccacagcgtgctgctggagatccagaaggagctgctggactacaagggcgtgggcatcagcgtgctggagatgagccacagaagcagcgacttcgccaagatcatcaacaacaccgagaacctggtgagagagctgctggccgtgcccgacaactacaaggtgatcttcctgcagggcggcggctgcggccagttcagcgccgtgcccctgaacctgatcggcctgaaggccggcagatgcgccgactacgtggtgaccggcgcctggagcgccaaggccgccgaggaggccaagaagttcggcaccatcaacatcgtgcaccccaagctgggcagctacaccaagatccccgaccccagcacctggaacctgaaccccgacgccagctacgtgtactactgcgccaacgagaccgtgcacggcgtggagttcgacttcatccccgacgtgaagggcgccgtgctggtgtgcgacatgagcagcaacttcctgagcaagcccgtggacgtgagcaagttcggcgtgatcttcgccggcgcccagaagaacgtgggcagcgccggcgtgaccgtggtgatcgtgagagacgacctgctgggcttcgccctgagagagtgccccagcgtgctggagtacaaggtgcaggccggcaacagcagcctgtacaacacccccccctgcttcagcatctacgtgatgggcctggtgctggagtggatcaagaacaacggcggcgccgccgccatggagaagctgagcagcatcaagagccagaccatctacgagatcatcgacaacagccagggcttctacgtgagcgtgggcggcatcagagccagcctgtacaacgccgtgaccatcgaggacgtgcagaagctggccgccttcatgaagaagttcctggagatgcaccagctgtag

SEQ ID NO: 207951 - protein, 404 aa, Artificial Sequence
  derived and/or modified sequence
MSDSKEPRLQQLGLLEEEQLRGLGFRQTRGYKSLAGCLGHGPLVLQLLSFTLLAGLLVQVSKVPSSISQEQSRQDAIYQNLTQLKAAVGELSEKSKLQEIYQELTQLKAAVGELPEKSKLQEIYQELTRLKAAVGELPEKSKLQEIYQELTWLKAAVGELPEKSKMQEIYQELTRLKAAVGELPEKSKQQEIYQELTRLKAAVGELPEKSKQQEIYQELTRLKAAVGELPEKSKQQEIYQELTQLKAAVERLCHPCPWEWTFFQGNCYFMSNSQRNWHDSITACKEVGAQLVVIKSAEEQNFLQLQSSRSNRFTWMGLSDLNQEGTWQWVDGSPLLPSFKQYWNRGEPNNVGEEDCAEFSGNGWNDDKCNLAKFWICKKSAASCSRDEEQFLSPAPATPNPPPA

SEQ ID NO: 207952 - DNA, 1215 bp, Artificial Sequence
  derived and/or modified sequence
atgtctgacagtaaagaacctcggctccaacaattgggtcttctggaggaggagcaattgagaggccttggcttccgtcagaccagggggtacaaaagtctggctggatgccttggacacggccccctggtgttacaattgctaagttttacgctccttgccggcttgctggtccaagtgagtaaagtgccctcttcaatatcacaagaacagtctcggcaggatgcaatataccagaatttaactcagttgaaagctgccgtgggtgagctctctgagaaatcaaagctacaggaaatctaccaggagcttacacaacttaaagctgccgtgggagaactgccggaaaaatctaaactgcaggagatatatcaggaactgacccggctcaaggcggctgtgggcgagcttcctgagaagtctaaactgcaggaaatataccaggagctgacatggctgaaggcggctgtgggtgagctgccagaaaagagcaaaatgcaagaaatctatcaggaactaacaagattaaaggctgccgtcggcgagctgcctgagaaatcaaagcagcaggagatctatcaggagctgactcgactcaaggccgccgttggtgaattgcccgaaaagtccaagcagcaggagatctatcaagagttgacacgactgaaagcagcagtgggagagttgccagagaaatccaagcagcaggagatctatcaagaactcactcaactgaaagccgctgtcgaaagactgtgccatccgtgtccatgggagtggactttctttcagggcaactgttactttatgtccaactcacagcggaattggcacgactcaattaccgcgtgcaaagaggttggtgcccagcttgtggttattaaatctgccgaagagcaaaattttcttcaactgcagagcagcaggagcaatcgttttacctggatggggctcagcgatctgaaccaggaaggaacatggcaatgggtggatggcagcccactgctgcccagcttcaagcagtactggaatagaggcgagccgaataacgtcggagaggaggactgcgccgagttctcgggcaatggatggaatgacgacaaatgtaatctggccaagttttggatttgcaagaaatctgcagcttcctgctctagggatgaagaacaattcttgtctccagcacctgccacccccaacccccctcccgcttag

SEQ ID NO: 207953 - DNA, 1215 bp, Artificial Sequence
  derived and/or modified sequence
atgtctgacagcaaggagccccggctgcagcagctgggcctgctggaggaggagcagctgcggggcctgggcttccggcagacccggggctacaagagcctggccggctgcctgggccacggccccctggtgctgcagctgctgtccttcaccctgctggccggcctgctggtgcaggtgtccaaggtgcccagcagcatcagccaggagcagagccggcaggatgccatctaccagaacctgacccagctgaaggctgctgtgggggagctgtctgagaagagcaagctgcaggagatctaccaggagctgacccagctgaaggctgctgtgggggagctgcctgagaagagcaagctgcaggagatctaccaggagctgacccggctgaaggctgctgtgggggagctgcctgagaagagcaagctgcaggagatctaccaggagctgacctggctgaaggctgctgtgggggagctgcctgagaagagcaagatgcaggagatctaccaggagctgacccggctgaaggctgctgtgggggagctgcctgagaagagcaagcagcaggagatctaccaggagctgacccggctgaaggctgctgtgggggagctgcctgagaagagcaagcagcaggagatctaccaggagctgacccggctgaaggctgctgtgggggagctgcctgagaagagcaagcagcaggagatctaccaggagctgacccagctgaaggctgctgtggagcggctgtgccacccctgcccctgggagtggaccttcttccagggcaactgctacttcatgagcaacagccagaggaactggcatgacagcatcacagcctgcaaggaggtgggcgcccagctggtggtgatcaagtctgctgaggagcagaacttcctgcagctgcagagcagccgcagcaaccgcttcacctggatgggcctgagtgacctgaaccaggagggcacctggcagtgggtggatggcagccccctgctgcccagcttcaagcagtactggaacagaggagagcccaacaacgtgggggaggaggactgtgccgagttctctggaaatggctggaatgatgacaagtgcaacctggccaagttctggatctgcaagaagtctgctgccagctgcagcagagatgaggagcagttcctgagccctgccccagccacccccaaccccccaccagcctag

SEQ ID NO: 207954 - DNA, 1215 bp, Artificial Sequence
  derived and/or modified sequence
atgagcgacagcaaggagccccggctgcagcagctgggcctgctggaggaagaacaactcagaggactggggtttcgccagacaaggggatacaagtctctcgctggctgtttggggcatggaccattagtgcttcagttactgtccttcactctcctcgcaggcttgctggtccaggttagtaaggtgccttcaagtattagccaagagcaaagccgccaggacgccatttaccagaatctgacccagttgaaggcagctgtgggagagctatctgagaagtccaagctgcaggaaatctatcaggagttgacccagctcaaggctgcagttggggaactcccggagaagagtaaactgcaagagatatatcaggaattgacccgcctcaaagcagccgtgggcgaattacctgagaaatcaaagcttcaagagatttatcaagaacttacttggctcaaagccgccgttggggagctaccagagaagtcaaaaatgcaagaaatataccaggaactgacgagactaaaggctgcagttggagagctgcctgaaaaaagcaagcagcaggagatatatcaagagctgacacgcctgaaagccgccgttggagagctcccagaaaaatccaagcagcaggagatctaccaggagctcacacgcctgaaagccgcagtaggagagttgcccgagaaatcaaagcaacaagagatctaccaggaattaacgcagctgaaggcagccgttgaacgactgtgccatccgtgtccctgggagtggactttctttcaggggaactgttacttcatgtccaactcgcagcgcaattggcacgatagcattacagcctgtaaggaggtaggtgcacagctggtggtgattaagtcagccgaagaacaaaatttcctacagctccagtctagccgcagcaaccgatttacatggatgggcctgtccgacctcaatcaggaagggacttggcagtgggtggatggctctcccctcttaccctcttttaagcaatactggaataggggggagccgaataacgtgggagaggaggattgcgctgagttttccgggaacggctggaatgatgacaagtgtaatctggcaaaattttggatttgcaagaaaagcgccgcctcatgctctcgcgacgaagagcagttcctcagcccagcaccggcaaccccaaacccccccccagcatag

SEQ ID NO: 207955 - DNA, 1215 bp, Artificial Sequence
  derived and/or modified sequence
atgtctgactctaaagaaccacgcttgcagcagttaggcctgttggaggaggaacaactaagagggcttggtttccggcagacccgcggttataagtccctggccggatgtctggggcatgggccattggtcctacagttattgagtttcacgctgttagcaggcctgcttgtgcaggtgtccaaggtgccttcaagtatctcccaggagcagagtcggcaggacgcaatatatcaaaacctgactcagctcaaggcagctgttggggaactgtcagaaaagtctaagctacaggagatctaccaggaattgacacagcttaaagcagcggtgggagaattgccggagaaatctaaactgcaggagatctaccaggagctgacccgcctcaaggccgcagtcggcgagttacccgagaaaagtaaattacaagagatataccaagagcttacttggttgaaggctgccgtcggcgagctccccgagaaatcgaagatgcaagagatttatcaggaattgactcgcttgaaagccgcagttggcgagctgcccgaaaagagcaagcagcaggagatttatcaggagctgaccaggctcaaagctgccgtgggggagctacccgaaaaaagcaagcagcaggaaatttaccaggaactaaccaggcttaaggcggctgtgggggaattgcctgagaagtcaaagcaacaggagatctatcaggaattaactcaacttaaggcagctgttgagcgcctctgtcacccatgtccctgggaatggacattcttccaaggtaactgttacttcatgtcaaattcacagcgaaattggcatgattcaatcacagcctgcaaggaggttggggctcagctcgtcgtgatcaaatccgctgaggaacagaacttcttgcagttgcagagcagtaggtctaatcgattcacatggatggggctcagtgacctgaatcaggagggaacctggcagtgggtggatggctctcctttgttaccctctttcaaacagtactggaaccgcggagagcccaataatgtgggagaggaggattgcgccgagttcagcgggaacggttggaacgatgacaagtgcaacttggctaagttttggatatgcaagaagagcgccgcttcatgctcccgcgacgaggaacagtttctaagcccagcacccgctacacccaatcccccacccgcttag

SEQ ID NO: 207956 - DNA, 4328 bp, Artificial Sequence
  derived and/or modified sequence
atcacagggtgggaaataaaagctgtggcccccaggagttctggacactgggggagagtggggtgacatgagtgactccaaggaaccaagactgcagcagctgggcctcctggaggaggaacagctgagaggccttggattccgacagactcgaggatacaagagcttagcagggtgtcttggccatggtcccctggtgctgcaactcctctccttcacgctcttggctgggctccttgtccaagtgtccaaggtccccagctccataagtcaggaacaatccaggcaagacgcgatctaccagaacctgacccagcttaaagctgcagtgggtgagctctcagagaaatccaagctgcaggagatctaccaggagctgacccagctgaaggctgcagtgggtgagcttccagagaaatctaagctgcaggagatctaccaggagctgacccggctgaaggctgcagtgggtgagcttccagagaaatctaagctgcaggagatctaccaggagctgacctggctgaaggctgcagtgggtgagcttccagagaaatctaagatgcaggagatctaccaggagctgactcggctgaaggctgcagtgggtgagcttccagagaaatctaagcagcaggagatctaccaggagctgacccggctgaaggctgcagtgggtgagcttccagagaaatctaagcagcaggagatctaccaggagctgacccggctgaaggctgcagtgggtgagcttccagagaaatctaagcagcaggagatctaccaggagctgacccagctgaaggctgcagtggaacgcctgtgccacccctgtccctgggaatggacattcttccaaggaaactgttacttcatgtctaactcccagcggaactggcacgactccatcaccgcctgcaaagaagtgggggcccagctcgtcgtaatcaaaagtgctgaggagcagaacttcctacagctgcagtcttccagaagtaaccgcttcacctggatgggactttcagatctaaatcaggaaggcacgtggcaatgggtggacggctcacctctgttgcccagcttcaagcagtattggaacagaggagagcccaacaacgttggggaggaagactgcgcggaatttagtggcaatggctggaacgacgacaaatgtaatcttgccaaattctggatctgcaaaaagtccgcagcctcctgctccagggatgaagaacagtttctttctccagcccctgccaccccaaacccccctcctgcgtagcagaacttcacccccttttaagctacagttccttctctccatccttcgaccttcacaaaatctctgggactgttctttgtcagattcttcctcctttagaaggctgggtcccattctgtccttcttgtcatgcctccaatttcccctggtgtagagcttgtttttctggcccatccttggagctttatgagtgagctggtgtgggatgcctttgggggtggacttgtgttccaagaatccactctctcttccttttggagattaggatatttgggttgccatgtgtagctgctatgtcccctggggcgttatcttatacatgcaaacctaccatctgttcaacttccacctaccacctcctgcacccctttgatcggggacttactggttgcaagagctcattttgcaggctggaagcaccagggaattaattcccccagtcaaccaatggcacccagagagggcatggaggctccacgcaaccccttccacccccacatcttcctttgtcttatacatggcttccatttggctgtttctaagttgtattctttattttattattattattactatttttcgagatggagtttcactcttgtcgctcaggctggagtgccatggcgcgatcttggctcactgcaacctctgcctcccgggttcaagtgattctcctgcctcagcctcacgagtagctggaattacaggcaggcgccaccagacccggctaattttttgtatttttagtacagatggggtttctccgtgttggtcaggctggtcttgaactcccgacctcagatgatctgcccgcctcggcctcccaaaattgctgggattacaggtgtgagccaccgcgcctggcctattattttttgtaagaataaaacaggtttattgggatttgggactctgaacagttctgtctctactacctgatctcctcctaccacgactttgggatctagaggagctttggctccggctgtgacggctccggccgttctcactgcggctgcaccggcccccgctgcggtcactatttcttcctctgctaggtgaattgtgcctctcctggctctttgacatgtgctagtgagatttcttccttttcctttcggattccccatttcttttgtaggaatggtctggactagggttctccttccccgcagcctgtagtattcatcgtggtggcccaccctctctctccccttggagctcttgccaaaggaggagacaagcagaggtctctattggatttctcaacacctgaagaaagttgcagtgttttcctcttggacattgttgtatttcaaataaaccacaaatcatcattttccaccgagccactgggcagaattcacactgaagctgtcgtcctgcgtacataccatcgtccgttaaacagagaaagagctgcttggcattcttcttccgactggtactgaacatatatacttgcccctcaggtgaggttccaagttgcaactgaccttgaactgaatcactctccccacgttattttttaattactatttttttttaaagatggggtcttgctctgtcgccaggctggagtgcagtggcgcgatctaggctcactgcaacttccgcctcccgggttcaagcgattctcctgcctcagcctcccgagtagctgggactccactaaaagtacaaaaattagctgggcgtgcaccactgcgcccagctaattcttgtatttttggtagagacggggtttcaacatgttgaccaggatggtctcgatctcttgacctcgtgattcgcccgccgcgtcctcccaaagtgctgggattacaggcctgagccaccgcgcccagtctctccccacgttcttgaactcgggcagcacatcctcacagaaatctaggaactgttggtaggtttcttcctcgctgtactccaggcttgcttcggagtcatagtcatccctcctgcactgctcctttccaaacactgtaaacatgcttttaataagaagggtaggactggatgttgggaaatcatgtgaacatctatctccaaatctgcaagctcctgttttactgtagaagggacaattaactccatccttctccatgactctgaaatccaagggggggttccgggttttgccatgtggcgccattttccaactcattttcagcctgatccagcatcttctggacagcttccggtttttgtttcttctgtcgtttctgttcctcctcctctctctctttcctctgctgttcttcccattgttcctttaactttcgctcttgttcttgccgttttctagccacctcttccttttccttctttattctgaattcttcttgtgccttctgctctctcagcaaccactcctcatgtaatctttgcctctctcttccccatagcttttctagttgttgtttttcaataaaagtgtcctcctctttctgtgagagtcctgagtccctcagtggagcaagttcctgctggcgtttctttcgtttctccttcttcagggcggccctgtactttttgtggcttggtttctctggaaatgtcaccttttcgggcgcagccatcttgccggcaccgccccgcccctctagttgtatcctttataataaactggtaaacattgtaaccgcagattcagcccaatctggttcaactttgtgtaataaaatggcgagttgtttttcagttgtcgtggacccccaggttgcaagttacataccctgggcatgtccagatgaacgaagcgtgcaaatccacgtggaacctaagtgctcagaccgaggaacagggactgagttaagaagtggacaccacgtggcatgatccttgatccaatcagattgagccctggcgtgatccagtcagatcaagcctcctgaatcccctcattacaagatccaatcatatcatgcctcactaccctctgtatataaaatctgccccagcctccaacttggagagacagatttgggccagactcctgtgtccttgcttggctgccttgcaataaatttttctctctacaaaa

SEQ ID NO: 207957 - DNA, 4280 bp, Artificial Sequence
  derived and/or modified sequence
atcacagggtgggaaataaaagctgtggcccccaggagttctggacactgggggagagtggggtgacatgagtgactccaaggaaccaagactgcagcagctgggcctcctggggtgtcttggccatggtcccctggtgctgcaactcctctccttcacgctcttggctgggctccttgtccaagttcttggcccagtgtccaaggtccccagctccataagtcaggaacaatccaggcaagacgcgatctaccagaacctgacccagcttaaagctgcagtgggtgagctctcagagaaatccaagctgcaggagatctaccaggagctgacccagctgaaggctgcagtgggtgagcttccagagaaatctaagctgcaggagatctaccaggagctgacccggctgaaggctgcagtgggtgagcttccagagaaatctaagctgcaggagatctaccaggagctgacctggctgaaggctgcagtgggtgagcttccagagaaatctaagatgcaggagatctaccaggagctgactcggctgaaggctgcagtgggtgagcttccagagaaatctaagcagcaggagatctaccaggagctgacccggctgaaggctgcagtgggtgagcttccagagaaatctaagcagcaggagatctaccaggagctgacccggctgaaggctgcagtgggtgagcttccagagaaatctaagcagcaggagatctaccaggagctgacccagctgaaggctgcagtggaacgcctgtgccacccctgtccctgggaatggacattcttccaaggaaactgttacttcatgtctaactcccagcggaactggcacgactccatcaccgcctgcaaagaagtgggggcccagctcgtcgtaatcaaaagtgctgaggagcagaacttcctacagctgcagtcttccagaagtaaccgcttcacctggatgggactttcagatctaaatcaggaaggcacgtggcaatgggtggacggctcacctctgttgcccagcttcaagcagtattggaacagaggagagcccaacaacgttggggaggaagactgcgcggaatttagtggcaatggctggaacgacgacaaatgtaatcttgccaaattctggatctgcaaaaagtccgcagcctcctgctccagggatgaagaacagtttctttctccagcccctgccaccccaaacccccctcctgcgtagcagaacttcacccccttttaagctacagttccttctctccatccttcgaccttcacaaaatctctgggactgttctttgtcagattcttcctcctttagaaggctgggtcccattctgtccttcttgtcatgcctccaatttcccctggtgtagagcttgtttttctggcccatccttggagctttatgagtgagctggtgtgggatgcctttgggggtggacttgtgttccaagaatccactctctcttccttttggagattaggatatttgggttgccatgtgtagctgctatgtcccctggggcgttatcttatacatgcaaacctaccatctgttcaacttccacctaccacctcctgcacccctttgatcggggacttactggttgcaagagctcattttgcaggctggaagcaccagggaattaattcccccagtcaaccaatggcacccagagagggcatggaggctccacgcaaccccttccacccccacatcttcctttgtcttatacatggcttccatttggctgtttctaagttgtattctttattttattattattattactatttttcgagatggagtttcactcttgtcgctcaggctggagtgccatggcgcgatcttggctcactgcaacctctgcctcccgggttcaagtgattctcctgcctcagcctcacgagtagctggaattacaggcaggcgccaccagacccggctaattttttgtatttttagtacagatggggtttctccgtgttggtcaggctggtcttgaactcccgacctcagatgatctgcccgcctcggcctcccaaaattgctgggattacaggtgtgagccaccgcgcctggcctattattttttgtaagaataaaacaggtttattgggatttgggactctgaacagttctgtctctactacctgatctcctcctaccacgactttgggatctagaggagctttggctccggctgtgacggctccggccgttctcactgcggctgcaccggcccccgctgcggtcactatttcttcctctgctaggtgaattgtgcctctcctggctctttgacatgtgctagtgagatttcttccttttcctttcggattccccatttcttttgtaggaatggtctggactagggttctccttccccgcagcctgtagtattcatcgtggtggcccaccctctctctccccttggagctcttgccaaaggaggagacaagcagaggtctctattggatttctcaacacctgaagaaagttgcagtgttttcctcttggacattgttgtatttcaaataaaccacaaatcatcattttccaccgagccactgggcagaattcacactgaagctgtcgtcctgcgtacataccatcgtccgttaaacagagaaagagctgcttggcattcttcttccgactggtactgaacatatatacttgcccctcaggtgaggttccaagttgcaactgaccttgaactgaatcactctccccacgttattttttaattactatttttttttaaagatggggtcttgctctgtcgccaggctggagtgcagtggcgcgatctaggctcactgcaacttccgcctcccgggttcaagcgattctcctgcctcagcctcccgagtagctgggactccactaaaagtacaaaaattagctgggcgtgcaccactgcgcccagctaattcttgtatttttggtagagacggggtttcaacatgttgaccaggatggtctcgatctcttgacctcgtgattcgcccgccgcgtcctcccaaagtgctgggattacaggcctgagccaccgcgcccagtctctccccacgttcttgaactcgggcagcacatcctcacagaaatctaggaactgttggtaggtttcttcctcgctgtactccaggcttgcttcggagtcatagtcatccctcctgcactgctcctttccaaacactgtaaacatgcttttaataagaagggtaggactggatgttgggaaatcatgtgaacatctatctccaaatctgcaagctcctgttttactgtagaagggacaattaactccatccttctccatgactctgaaatccaagggggggttccgggttttgccatgtggcgccattttccaactcattttcagcctgatccagcatcttctggacagcttccggtttttgtttcttctgtcgtttctgttcctcctcctctctctctttcctctgctgttcttcccattgttcctttaactttcgctcttgttcttgccgttttctagccacctcttccttttccttctttattctgaattcttcttgtgccttctgctctctcagcaaccactcctcatgtaatctttgcctctctcttccccatagcttttctagttgttgtttttcaataaaagtgtcctcctctttctgtgagagtcctgagtccctcagtggagcaagttcctgctggcgtttctttcgtttctccttcttcagggcggccctgtactttttgtggcttggtttctctggaaatgtcaccttttcgggcgcagccatcttgccggcaccgccccgcccctctagttgtatcctttataataaactggtaaacattgtaaccgcagattcagcccaatctggttcaactttgtgtaataaaatggcgagttgtttttcagttgtcgtggacccccaggttgcaagttacataccctgggcatgtccagatgaacgaagcgtgcaaatccacgtggaacctaagtgctcagaccgaggaacagggactgagttaagaagtggacaccacgtggcatgatccttgatccaatcagattgagccctggcgtgatccagtcagatcaagcctcctgaatcccctcattacaagatccaatcatatcatgcctcactaccctctgtatataaaatctgccccagcctccaacttggagagacagatttgggccagactcctgtgtccttgcttggctgccttgcaataaatttttctctctacaaaa

SEQ ID NO: 207958 - DNA, 1215 bp, Artificial Sequence
  derived and/or modified sequence
atgagcgacagcaaggagcccagactgcagcagctgggcctgctggaggaggagcagctgagaggcctgggcttcagacagaccagaggctacaagagcctggccggctgcctgggccacggccccctggtgctgcagctgctgagcttcaccctgctggccggcctgctggtgcaggtgagcaaggtgcccagcagcatcagccaggagcagagcagacaggacgccatctaccagaacctgacccagctgaaggccgccgtgggcgagctgagcgagaagagcaagctgcaggagatctaccaggagctgacccagctgaaggccgccgtgggcgagctgcccgagaagagcaagctgcaggagatctaccaggagctgaccagactgaaggccgccgtgggcgagctgcccgagaagagcaagctgcaggagatctaccaggagctgacctggctgaaggccgccgtgggcgagctgcccgagaagagcaagatgcaggagatctaccaggagctgaccagactgaaggccgccgtgggcgagctgcccgagaagagcaagcagcaggagatctaccaggagctgaccagactgaaggccgccgtgggcgagctgcccgagaagagcaagcagcaggagatctaccaggagctgaccagactgaaggccgccgtgggcgagctgcccgagaagagcaagcagcaggagatctaccaggagctgacccagctgaaggccgccgtggagagactgtgccacccctgcccctgggagtggaccttcttccagggcaactgctacttcatgagcaacagccagagaaactggcacgacagcatcaccgcctgcaaggaggtgggcgcccagctggtggtgatcaagagcgccgaggagcagaacttcctgcagctgcagagcagcagaagcaacagattcacctggatgggcctgagcgacctgaaccaggagggcacctggcagtgggtggacggcagccccctgctgcccagcttcaagcagtactggaacagaggcgagcccaacaacgtgggcgaggaggactgcgccgagttcagcggcaacggctggaacgacgacaagtgcaacctggccaagttctggatctgcaagaagagcgccgccagctgcagcagagacgaggagcagttcctgagccccgcccccgccacccccaaccccccccccgcctag

SEQ ID NO: 207959 - protein, 607 aa, Artificial Sequence
  derived and/or modified sequence
MADNLSDTLKKLKITAVDKTEDSLEGCLDCLLQALAQNNTETSEKIQASGILQLFASLLTPQSSCKAKVANIIAEVAKNEFMRIPCVDAGLISPLVQLLNSKDQEVLLQTGRALGNICYDSHEGRSAVDQAGGAQIVIDHLRSLCSITDPANEKLLTVFCGMLMNYSNENDSLQAQLINMGVIPTLVKLLGIHCQNAALTEMCLVAFGNLAELESSKEQFASTNIAEELVKLFKKQIEHDKREMIFEVLAPLAENDAIKLQLVEAGLVECLLEIVQQKVDSDKEDDITELKTGSDLMVLLLLGDESMQKLFEGGKGSVFQRVLSWIPSNNHQLQLAGALAIANFARNDANCIHMVDNGIVEKLMDLLDRHVEDGNVTVQHAALSALRNLAIPVINKAKMLSAGVTEAVLKFLKSEMPPVQFKLLGTLRMLIDAQEAAEQLGKNVKLVERLVEWCEAKDHAGVMGESNRLLSALIRHSKSKDVIKTIVQSGGIKHLVTMATSEHVIMQNEALVALALIAALELGTAEKDLESAKLVQILHRLLADERSAPEIKYNSMVLICALMGSECLHKEVQDLAFLDVVSKLRSHENKSVAQQASLTEQRLTVES

SEQ ID NO: 207960 - DNA, 1824 bp, Artificial Sequence
  derived and/or modified sequence
atggcggataatttatcagataccctgaagaagctgaaaatcacagccgtggacaagactgaggacagtctggagggctgtctggactgtcttctgcaggccctcgcccagaacaacaccgagacttccgagaaaattcaggccagcggaattctgcaactgtttgcctctctcttgactccacagtcttcctgtaaagccaaagtggctaacattatcgcggaagtggccaaaaacgagtttatgcgcatcccctgcgttgatgccgggctgatctcacccctagtgcagctgctgaactcaaaagaccaggaagtccttttgcagactggccgggcactgggcaacatatgctatgattcccatgaggggcggtccgccgttgatcaggctgggggggcacagatcgtcatcgaccacctcaggtcactctgttccataactgatccggcaaatgagaaactactgacagtgttttgcggaatgctgatgaactatagtaatgagaatgacagtttacaagcacagctcataaatatgggagtcattcccacactggtgaagttgctcggaattcattgccaaaacgcagctctgaccgaaatgtgtctggttgcctttggaaatcttgccgagctagaatcctccaaagaacaattcgccagcactaatatcgcagaggaactagtcaagctatttaagaaacagattgagcatgacaagcgggagatgatattcgaggtgctggcaccattggcagagaatgatgccataaagcttcagttggtagaggcggggttggtggaatgcctgctggaaatcgtacagcaaaaggtcgactctgacaaggaagacgacatcaccgagctaaaaactggcagtgatttgatggtgctgctgctcctcggcgacgagagtatgcagaagcttttcgagggaggtaaggggtcagtgttccaaagagtattatcatggatcccgagtaataaccaccagctgcaactggcaggcgcgcttgccattgctaacttcgcccgcaacgatgcgaactgtatacatatggtagacaacgggatcgtggagaagttgatggatttgctggatcggcatgtggaggatggtaatgtgacagtccagcatgctgctctgtctgcccttcgaaacctcgccatcccagttattaacaaggcaaaaatgctctcggccggtgtgactgaagctgttctgaagttcttaaagtccgaaatgccacctgtccagtttaaactgctcggaacgctgaggatgctgattgacgctcaggaagccgccgaacagctgggcaagaacgttaagctggtagagagactggtggagtggtgcgaggccaaagatcacgccggcgttatgggagagtctaatagactcttgtctgctctcatcagacacagtaaatccaaggatgtcatcaagaccatcgtgcagagcggagggattaagcatctggtcacgatggctacatcagagcacgtgattatgcagaatgaagcactagtggctctagctctcatcgccgcgctggaactggggacagccgagaaggatctcgaatccgccaagctggtgcaaatcttgcaccgactgctggccgacgagcgctctgctcctgagatcaaatacaacagtatggtgctgatctgtgctctgatggggtcagaatgtctgcataaagaagttcaggacctagccttcctggacgtggtatctaagctgaggagccatgagaacaaaagcgttgctcagcaggctagtctgaccgagcagcgcctgacagttgagtcttag

SEQ ID NO: 207961 - DNA, 1824 bp, Artificial Sequence
  derived and/or modified sequence
atggctgacaacctgagtgacaccctgaagaagctgaagatcacagctgtggacaagacagaggacagcctggagggctgcctggactgcctgctgcaggccctggcccagaacaacacagagaccagcgagaagatccaggccagcggcatcctgcagctgtttgccagcctgctgaccccccagagcagctgcaaggccaaggtggccaacatcatcgccgaggtggccaagaatgagttcatgaggatcccctgtgtggatgctggcctcatcagccccctggtgcagctgctgaacagcaaggaccaggaggtgctgctgcagacaggccgggccctgggcaacatctgctatgacagccatgagggccgctctgctgtggaccaggccggcggggcccagatcgtcatcgaccacctgcggagcctgtgcagcatcacagatcctgccaatgagaagctgctgactgtgttctgtggcatgctgatgaactacagcaatgaaaatgacagcctgcaggcccagctgatcaacatgggcgtcatccccaccctggtgaagctgctgggcatccactgccagaatgctgccctgacagagatgtgcctggtggcctttggaaacctggccgagctggagagcagcaaggagcagtttgccagcaccaacattgctgaggagctggtgaagctgttcaagaagcagattgaacatgacaagcgggagatgatctttgaggtgctggcccccctggccgagaatgatgccatcaagctgcagctggtggaggccggcctggtggagtgcctgctggagatcgtgcagcagaaggtggacagcgacaaggaggatgacatcacagagctgaagacaggcagtgacctgatggtgctgctgctgctgggagatgagagcatgcagaagctgtttgaaggaggaaaaggatctgtgttccagagggtgctgtcctggatccccagcaacaaccaccagctgcagctggccggggccctggccatcgccaactttgccagaaatgatgccaactgcatccacatggtggacaatggaattgtggagaagctgatggacctgctggacagacatgtggaggatggaaatgtgacagtgcagcacgccgccctgagcgccctgaggaacctggccatccctgtgatcaacaaggccaagatgctgtctgctggggtgacagaagctgtgctgaagttcctgaagtctgagatgcctcctgtgcagttcaagctgctgggcaccctgaggatgctgattgatgcccaggaggccgctgagcagctgggcaagaatgtgaagctggtggagcggctggtggagtggtgtgaggccaaggaccacgccggcgtgatgggagagagcaaccggctgctgagcgccctgatccgccacagcaagagcaaggatgtgatcaagaccatcgtgcagagcggcggcatcaagcacctggtgaccatggccaccagcgagcacgtgatcatgcagaatgaggccctggtggccctggccctgattgctgccctggagctgggcacagctgagaaggacctggagagcgccaagctggtgcagatcctgcaccggctgctggctgatgagaggtctgcccctgagatcaagtacaacagcatggtgctgatctgtgccctgatgggcagcgagtgcctgcacaaggaggtgcaggacctggccttcctggatgtggtgtccaagctgcggagccatgagaacaagtctgtggcccagcaggccagcctgacagagcagaggctgactgtggagagctag

SEQ ID NO: 207962 - DNA, 1824 bp, Artificial Sequence
  derived and/or modified sequence
atggccgacaacctgagcgacaccctgaagaagctgaagatcaccgccgtagacaagaccgaggactcgctggagggctgccttgactgtctgctgcaggccctggcacagaataatactgagacgagcgaaaagatccaggcctccggtatactgcagctgtttgccagccttttgaccccgcagagcagttgcaaagcgaaggtggccaatattatcgctgaggtcgccaagaacgaatttatgcgcattccatgtgtcgatgctggtctgatcagccccctggtacagctactcaattcgaaggaccaggaggtgctcctacagaccggacgcgcccttggtaacatttgctacgatagccacgaaggaaggagtgccgtcgaccaggccgggggagctcagattgtcattgaccacctccggtcactgtgcagcatcacagatccagccaacgagaagctcttgaccgtcttctgcgggatgctcatgaactattccaatgagaatgactctctacaagcccagctaattaacatgggggttattcctactctggtgaaactcttgggcatacactgtcaaaacgccgccctgaccgaaatgtgtctggtggcattcgggaatctggcagaactggaatcatctaaagagcaattcgcatccactaatattgcggaggaactggtaaagctttttaagaagcagatcgagcacgacaagcgggagatgatcttcgaggttctggcccctctcgccgagaatgatgcaattaaactacaactagtggaggcaggcctggttgagtgcctgctggaaatcgttcagcagaaagtggactccgataaagaggacgacatcaccgagctcaagacggggtccgacctgatggtcctgctccttcttggtgatgaatccatgcagaaactctttgagggcgggaagggtagcgtttttcagcgtgttctctcctggatcccttcaaacaaccaccagttacagctggccggagccctggcaatcgcaaattttgccagaaacgacgcgaactgcatccacatggtcgataatgggatcgtggagaaactgatggacctgctggaccggcacgtagaggatggtaacgtgacagtgcagcacgctgccctttccgcgctgaggaatctggctatcccggttatcaacaaagccaagatgctttccgcaggagtaaccgaagctgtgctgaagttccttaagtccgagatgcctccagtccagttcaaactgctcggaacgttgagaatgcttattgacgctcaggaagctgccgaacagttaggtaaaaatgtcaaactggtggagagacttgttgaatggtgtgaggcgaaagaccatgcaggagtgatgggagagtctaacagattactgagtgccctgattagacattcaaaaagtaaggatgtgataaaaacgatcgtgcagtcagggggaattaagcacctcgtaacgatggcaacatccgagcacgtgataatgcagaacgaagctcttgtagcactggcactgattgccgccctagaactcggcacagccgaaaaggacttggagtccgccaagctcgtgcagatcttgcacagactgttggctgacgaacgctctgcacctgaaattaaatacaactctatggtcctcatctgtgccttgatgggaagtgaatgtttgcacaaagaggtgcaggacctcgcctttctcgacgtcgtcagtaaactgaggtcacacgagaataagtctgtggcccagcaggcttcgctgactgagcagcgcctgacagttgaaagctag

SEQ ID NO: 207963 - DNA, 1824 bp, Artificial Sequence
  derived and/or modified sequence
atggcagataatctcagtgacactttaaaaaagctcaaaatcaccgcggtcgacaagactgaggacagtctggagggatgcttagattgccttctacaggccctggctcagaataacaccgaaacttctgagaagattcaagcatcaggaatcttacagctcttcgccagtctgctgacgccccagagttcctgcaaggcaaaggttgccaatattattgcagaggtggccaaaaacgagttcatgcgaatcccatgcgtggatgctgggctgatttcacccctcgtgcagttgcttaacagtaaggaccaggaagttcttttgcagactggccgagctctggggaatatatgctacgattcacatgagggcagatcggccgtggaccaggcaggcggagcccagattgtaatcgaccacctgcgttcactgtgtagcatcactgatccggctaacgaaaagctgttgacagtgttctgtgggatgctgatgaactattccaacgaaaacgattcactgcaggctcagctcattaatatgggcgtgatccccaccttggtgaaactccttggaattcactgtcagaacgctgccctcaccgaaatgtgtcttgtggccttcggcaatcttgccgagttggaaagctctaaggagcagttcgcttctacaaacatcgctgaagagctggtgaaactgtttaaaaagcagatcgaacatgataagcgggaaatgatttttgaggtattggcgccacttgccgaaaatgacgccatcaagcttcagctggtagaagcaggcctcgtggaatgccttctggaaattgttcaacagaaggtcgacagcgataaggaggacgatattacagagctcaagactggcagtgatcttatggtactcctgttactcggggatgagtccatgcagaaactctttgaaggtggcaagggatccgtgtttcaaagggttctgagttggattccctctaataaccaccagctgcaattggctggcgctctcgccatagccaactttgctcgtaacgatgccaactgtatccacatggtcgacaatggcattgtggaaaaactgatggatctactggaccggcacgtcgaagacggaaatgttaccgtgcaacacgccgcactttctgccctgcgcaatttggccatcccagtgatcaacaaggctaaaatgctgtcagcaggtgttacagaagctgtgctgaaattcctgaagtctgagatgcccccagtgcagtttaaactcctgggaactctgagaatgctaatagatgcccaggaggctgcagagcagttaggaaaaaacgttaagctggtggagcggctcgtggagtggtgcgaggccaaggatcacgctggggtgatgggggagtccaataggctactgagcgctctcattcggcacagtaagtctaaagacgttattaagaccatcgttcaatctggcggaattaaacacttggtcacgatggccacatcagaacatgtgatcatgcagaatgaagctcttgtggccctggccctcattgctgctttagagttagggaccgctgagaaagacctggaaagtgcgaagctggtccagatcctacatagactgctcgcagacgaacggtccgcgcctgaaatcaaatataattcaatggtacttatatgtgcccttatggggtccgaatgcttgcacaaggaggtgcaggatctggcgtttctggacgtggtctctaaactgcgtagccatgaaaacaaaagcgtggcccagcaggccagcctgaccgagcagagactgacagtagagagctag

SEQ ID NO: 207964 - DNA, 2470 bp, Artificial Sequence
  derived and/or modified sequence
gcgggagagacggaggtagagggaggacacagagccgcgccgcccgcaccacagaccttcgcctcgccccgccggttcctcaccctcggggagcaacatggcagataatctcagtgataccttgaagaagctgaagataacagctgttgacaagactgaggatagtttagaaggatgcttggattgtctgcttcaagccctggctcaaaataatacggaaacaagtgaaaaaatccaagcaagtggaatacttcagctgtttgcaagtctgttgactccacagtcttcctgcaaagccaaagtagctaacatcatagcagaagtagccaaaaatgagtttatgcgaattccatgtgtggatgctggattgatttcaccactggtgcagctgctaaatagcaaagaccaggaagtgctgcttcaaacgggcagggctctaggaaacatatgttacgatagccatgagggcagaagtgcagttgaccaagcaggtggtgcacagattgtaattgaccatttaaggtcactgtgcagtataacagatcccgccaatgagaagctcttgactgtcttttgtggcatgctgatgaactatagcaatgagaatgattcgcttcaagctcagcttatcaatatgggtgttattcctaccttagtgaaattactgggcatccactgccaaaatgcagctcttacagaaatgtgtcttgttgcatttggtaatttagcagaacttgagtcaagtaaagaacagtttgccagtacaaacattgctgaagagctagtaaaactcttcaagaaacaaatagaacatgataagagagaaatgatttttgaagttcttgctccattggcagaaaatgatgctattaaactacagctggttgaagcaggcctagtagagtgtctactagagattgttcagcaaaaagtggatagtgacaaagaagatgatattactgagctcaaaactggttcagatctcatggttttattacttcttggagatgaatccatgcagaagttatttgaaggaggaaaaggtagtgtatttcaaagggtactctcttggatcccatcaaataaccaccagctacagcttgctggagcattggcaattgcaaattttgccagaaatgatgcaaattgtattcatatggtagacaatgggattgtagaaaaacttatggatttactggacagacatgtagaagatggaaatgtaacagtacagcatgcagcactaagtgccctcagaaacctggccattccagttataaataaagcaaagatgttatcagctggggtcacagaggcagttttgaaatttcttaaatctgaaatgcctcctgttcagttcaaacttctgggaacattaagaatgttaatagatgcacaagaagctgctgaacaattgggaaagaatgttaagttagtggagcgtttggtggaatggtgtgaagccaaagatcatgctggtgtgatgggggagtcaaacagactgctgtctgcccttatacgacacagtaaatcaaaagatgtaattaaaaccattgtgcagagtggtggcatcaagcatctagttaccatggcaactagtgaacatgtaataatgcagaatgaagctcttgttgctttggcattaatagcagctttagaattgggcactgctgagaaagatctagaaagtgctaaacttgtacagattttacatagactgctagcagatgagagaagtgctcctgaaatcaaatataattccatggtcctgatatgtgctcttatgggatctgaatgtctacacaaggaagtacaggatttggcttttctagatgtcgtatccaaacttcgcagtcatgagaacaaaagtgttgcccagcaggcctctctcacagagcagagacttactgtggaaagctgagaactgcccgatacacggcatcatcccatctctaatttcccctctgtcctccatccagcggcttcttccgcttcattctctaccataccacttgtgcatgcatgtgatgttctaataccaattgaagaaccgctgtaggtacctccctaataagatttctaaacctatagttagtgtgatcatgactttgtcaaaggcaagtctccacccataaccgttctcttgtattcctgttgcttgagctacattaagtagaatgtgcatgttgtagtcctatgatgatgtaaacttggtactacataatgacttgctccacacatgcagtaaactacataatgatgtactggtaaactagaaacaaagaatgcagcaggatctgtctagcttattaaagatgaaactgaattggaaaaatagctccattttttggtgcttgggaagcacagtgaccaaaaaagttgtatggctgcttattcattagtctttcctactgatgtcaaatccatggtacctagagttaaataaaattccaatgctcttactctttaa

SEQ ID NO: 207965 - DNA, 1824 bp, Artificial Sequence
  derived and/or modified sequence
atggccgacaacctgagcgacaccctgaagaagctgaagatcaccgccgtggacaagaccgaggacagcctggagggctgcctggactgcctgctgcaggccctggcccagaacaacaccgagaccagcgagaagatccaggccagcggcatcctgcagctgttcgccagcctgctgaccccccagagcagctgcaaggccaaggtggccaacatcatcgccgaggtggccaagaacgagttcatgagaatcccctgcgtggacgccggcctgatcagccccctggtgcagctgctgaacagcaaggaccaggaggtgctgctgcagaccggcagagccctgggcaacatctgctacgacagccacgagggcagaagcgccgtggaccaggccggcggcgcccagatcgtgatcgaccacctgagaagcctgtgcagcatcaccgaccccgccaacgagaagctgctgaccgtgttctgcggcatgctgatgaactacagcaacgagaacgacagcctgcaggcccagctgatcaacatgggcgtgatccccaccctggtgaagctgctgggcatccactgccagaacgccgccctgaccgagatgtgcctggtggccttcggcaacctggccgagctggagagcagcaaggagcagttcgccagcaccaacatcgccgaggagctggtgaagctgttcaagaagcagatcgagcacgacaagagagagatgatcttcgaggtgctggcccccctggccgagaacgacgccatcaagctgcagctggtggaggccggcctggtggagtgcctgctggagatcgtgcagcagaaggtggacagcgacaaggaggacgacatcaccgagctgaagaccggcagcgacctgatggtgctgctgctgctgggcgacgagagcatgcagaagctgttcgagggcggcaagggcagcgtgttccagagagtgctgagctggatccccagcaacaaccaccagctgcagctggccggcgccctggccatcgccaacttcgccagaaacgacgccaactgcatccacatggtggacaacggcatcgtggagaagctgatggacctgctggacagacacgtggaggacggcaacgtgaccgtgcagcacgccgccctgagcgccctgagaaacctggccatccccgtgatcaacaaggccaagatgctgagcgccggcgtgaccgaggccgtgctgaagttcctgaagagcgagatgccccccgtgcagttcaagctgctgggcaccctgagaatgctgatcgacgcccaggaggccgccgagcagctgggcaagaacgtgaagctggtggagagactggtggagtggtgcgaggccaaggaccacgccggcgtgatgggcgagagcaacagactgctgagcgccctgatcagacacagcaagagcaaggacgtgatcaagaccatcgtgcagagcggcggcatcaagcacctggtgaccatggccaccagcgagcacgtgatcatgcagaacgaggccctggtggccctggccctgatcgccgccctggagctgggcaccgccgagaaggacctggagagcgccaagctggtgcagatcctgcacagactgctggccgacgagagaagcgcccccgagatcaagtacaacagcatggtgctgatctgcgccctgatgggcagcgagtgcctgcacaaggaggtgcaggacctggccttcctggacgtggtgagcaagctgagaagccacgagaacaagagcgtggcccagcaggccagcctgaccgagcagagactgaccgtggagagctag

SEQ ID NO: 207966 - protein, 339 aa, Artificial Sequence
  derived and/or modified sequence
MLYPGSVYLLQKALMPVLLQGQARLVEECNGRRAKLLACDGNEIDTMFVDRRGTAEPQGQKLVICCEGNAGFYEVGCVSTPLEAGYSVLGWNHPGFAGSTGVPFPQNEANAMDVVVQFAIHRLGFQPQDIIIYAWSIGGFTATWAAMSYPDVSAMILDASFDDLVPLALKVMPDSWRGLVTRTVRQHLNLNNAEQLCRYQGPVLLIRRTKDEIITTTVPEDIMSNRGNDLLLKLLQHRYPRVMAEEGLRVVRQWLEASSQLEEASIYSRWEVEEDWCLSVLRSYQAEHGPDFPWSVGEDMSADGRRQLALFLARKHLHNFEATHCTPLPAQNFQMPWHL

SEQ ID NO: 207967 - protein, 558 aa, Artificial Sequence
  derived and/or modified sequence
MAKLLSCVLGPRLYKIYRERDSERAPASVPETPTAVTAPHSSSWDTYYQPRALEKHADSILALASVFWSISYYSSPFAFFYLYRKGYLSLSKVVPFSHYAGTLLLLLAGVACLRGIGRWTNPQYRQFITILEATHRNQSSENKRQLANYNFDFRSWPVDFHWEEPSSRKESRGGPSRRGVALLRPEPLHRGTADTLLNRVKKLPCQITSYLVAHTLGRRMLYPGSVYLLQKALMPVLLQGQARLVEECNGRRAKLLACDGNEIDTMFVDRRGTAEPQGQKLVICCEGNAGFYEVGCVSTPLEAGYSVLGWNHPGFAGSTGVPFPQNEANAMDVVVQFAIHRLGFQPQDIIIYAWSIGGFTATWAAMSYPDVSAMILDASFDDLVPLALKVMPDSWRGLVTRTVRQHLNLNNAEQLCRYQGPVLLIRRTKDEIITTTVPEDIMSNRGNDLLLKLLQHRYPRVMAEEGLRVVRQWLEASSQLEEASIYSRWEVEEDWCLSVLRSYQAEHGPDFPWSVGEDMSADGRRQLALFLARKHLHNFEATHCTPLPAQNFQMPWHL

SEQ ID NO: 207968 - protein, 601 aa, Artificial Sequence
  derived and/or modified sequence
MSQLARRRSRYGLTSRAHNTSEAGRAGPAGGPAAGRAAARAGAMAKLLSCVLGPRLYKIYRERDSERAPASVPETPTAVTAPHSSSWDTYYQPRALEKHADSILALASVFWSISYYSSPFAFFYLYRKGYLSLSKVVPFSHYAGTLLLLLAGVACLRGIGRWTNPQYRQFITILEATHRNQSSENKRQLANYNFDFRSWPVDFHWEEPSSRKESRGGPSRRGVALLRPEPLHRGTADTLLNRVKKLPCQITSYLVAHTLGRRMLYPGSVYLLQKALMPVLLQGQARLVEECNGRRAKLLACDGNEIDTMFVDRRGTAEPQGQKLVICCEGNAGFYEVGCVSTPLEAGYSVLGWNHPGFAGSTGVPFPQNEANAMDVVVQFAIHRLGFQPQDIIIYAWSIGGFTATWAAMSYPDVSAMILDASFDDLVPLALKVMPDSWRGLVTRTVRQHLNLNNAEQLCRYQGPVLLIRRTKDEIITTTVPEDIMSNRGNDLLLKLLQHRYPRVMAEEGLRVVRQWLEASSQLEEASIYSRWEVEEDWCLSVLRSYQAEHGPDFPWSVGEDMSADGRRQLALFLARKHLHNFEATHCTPLPAQNFQMPWHL

SEQ ID NO: 207969 - DNA, 1677 bp, Artificial Sequence
  derived and/or modified sequence
atggccaagctgttaagttgtgtgctgggaccgaggctttataaaatctatagagaacgagacagtgagcgtgctccagcctcagtgcctgaaacgcctaccgcagttactgctccccactcttcaagctgggatacatattatcaaccgcgcgcactcgagaaacatgccgacagtatcctcgccctcgcgtcagtgttttggagcattagttactatagttcacctttcgcgtttttttacctatatagaaaaggctacctcagcttatccaaagtggttcccttcagtcactacgccgggaccctcttactgttactggcgggtgtggcctgtctgcggggcatcggccgctggacgaatcctcagtaccgtcaatttattaccatactagaggccacacaccgtaaccagagctcagagaataaacgccagctcgctaattacaactttgactttcggagttggcccgttgatttccactgggaagagccatcctctcgtaaagaaagccgaggcgggccatctcgcagaggagtggcccttcttcgacctgaacccctgcaccgtggtaccgccgatactctgcttaacagggttaagaaattgccatgtcagattacaagttaccttgtggctcatacgctgggccgacggatgttgtatccaggctcagtttacctccttcaaaaagcgctcatgcccgttctcctgcaaggccaggcccgtttggtggaagaatgtaacggaaggcgagcgaagctgctggcctgcgacgggaacgagattgataccatgttcgtggaccgcagggggacggctgagccccaaggtcaaaagctggtgatctgctgcgagggcaacgcgggcttttatgaggtcgggtgcgtttctacccccctggaggcaggatactcagtcctgggctggaaccaccctggattcgccgggagcaccggcgttcctttcccccaaaacgaggctaatgccatggacgtcgtcgttcagtttgccatccaccgcctgggcttccagccacaggacattattatatacgcatggtcgatcggtgggttcacggccacgtgggccgccatgagttaccccgatgtttcagctatgatcctcgatgcttcttttgacgacctcgtgcctcttgccttgaaagtgatgcccgattcctggcggggtctggtcactagaacggtccgccagcatctgaatctgaacaacgcagaacagctgtgtcggtatcaagggccagttttactgatcagaagaaccaaagacgagattataacaactaccgtgcccgaagacatcatgagtaaccgaggcaatgacctgctgttgaaactgctgcagcatcgttatcctcgggtcatggcggaggagggactgagggttgtacgccaatggcttgaggccagcagccaactcgaagaagcttcaatctacagccggtgggaggtcgaagaagattggtgcttgagtgtgcttcgatcgtaccaagctgagcatggaccagattttccatggagtgtcggagaagacatgagcgccgacgggcggcgtcagctggccctcttcttagctagaaagcacctccataactttgaggccacccattgcacacctctacctgcccagaatttccagatgccatggcatctgtag

SEQ ID NO: 207970 - DNA, 1806 bp, Artificial Sequence
  derived and/or modified sequence
atgagccagctcgccagaagacggtcacggtatggcctgacgagtagagctcataacaccagcgaggcggggagggccgggcctgccggcgggccagcggccggccgggccgcagcacgcgcaggggccatggccaagctgctgagctgtgtactggggcctagactgtacaaaatttatagagagcgggactctgaaagggcgccggcaagcgtccccgagactccgaccgcagtcactgccccccactcctcttcctgggatacctactaccagccacgggccctggaaaagcacgctgactccatcttagctttagcctctgtattctggtctatttcttattactcatcgccctttgcattcttttacttgtaccggaaaggctacctgtcactttccaaggtggtcccatttagccactatgccggcacgctcctgttactgcttgccggagtcgcttgtctgagaggaattgggagatggactaatccacagtaccgccagtttattacaatactggaggcaactcaccgcaaccagtcgtctgagaacaaaaggcagctggccaactacaattttgacttcagatcttggcctgtcgattttcactgggaagagccatcaagccgcaaagagtctcgcggaggccccagtcgcaggggtgtcgccctgcttaggcccgaacctctccacagaggcacagcagacactcttctgaaccgagtgaaaaaactgccctgccagataacgagctacctggtggcacacactctcggacgccggatgctgtaccctggttctgtttacctgctgcagaaggcactgatgcctgtgttgttgcagggacaagcccggttggttgaagaatgcaacggacgcagagctaagctcttagcctgcgacggcaacgaaattgacacgatgttcgttgacaggcgcggtaccgcagagccacaaggccaaaagctcgtgatctgctgtgaagggaacgcgggtttctatgaggtcggttgcgtgagcaccccgctggaggcgggctattcagtgttggggtggaatcacccaggctttgctggctctactggggtgccctttcctcagaacgaagctaatgctatggatgtggtggttcaattcgccattcatcggcttggattccaaccccaagatatcataatttatgcctggagtattgggggatttacagcaacctgggccgcaatgagctatccagacgtctccgcgatgatcctcgacgcatccttcgatgaccttgtacctttagccctcaaggtgatgccagattcctggagaggcctagttactcggacagttcgacagcaccttaacctaaacaatgctgaacaactgtgtcgctatcaaggccctgtactacttatcagaagaacaaaagacgagattatcactaccacagtgccggaggacataatgtccaacaggggcaatgatctcctcttgaagctgctgcagcaccggtacccaagggtgatggccgaagaaggtctcagagttgtgagacagtggctggaagcctcatcccagctggaggaggcatctatctacagcagatgggaggtagaagaggactggtgcctctcagtgcttaggagttatcaggctgagcacggaccagactttccttggtcagtcggcgaagatatgtccgcagacgggcgcaggcagttagcattattcttggcgaggaagcatctgcacaacttcgaggccacacattgtacaccactgcccgcccagaactttcagatgccttggcatttatag

SEQ ID NO: 207971 - DNA, 1806 bp, Artificial Sequence
  derived and/or modified sequence
atgtcccagttagccagacgtagatctcggtatggcctgacatcccgagctcacaatacttctgaggccggcagagcaggccccgccggcggacccgccgcaggtcgagccgccgctcgcgccggagcaatggccaaactcctcagttgcgttcttgggcctagactgtataaaatctaccgtgaacgggacagcgagcgggccccagcttcagtcccagagactcccaccgctgtgactgcccctcattccagctcttgggacacctactatcaaccccgcgctttggagaagcacgccgatagtatcctggccctggcatctgtgttctggtcgatcagttactattctagtccgttcgcctttttctacctgtacaggaagggatatctgtccttgtctaaggtggttcctttttcgcactatgcagggaccttgctgctgctcctggctggcgttgcctgtctccggggcatcggacgttggactaatccccaatatcgccagttcattacgattctcgaggccacccatcgcaatcaaagtagcgaaaataagcggcagctggctaattataacttcgatttcagatcgtggcctgtggattttcactgggaggaaccttcctcacggaaggagtctagggggggtccttctagaaggggcgtggcattgctgaggcccgaaccgctccatagaggaacagcagatacccttctcaacagggtgaagaagctcccatgccagattacttcatatctggtggcccacactctcggcaggcgtatgttgtaccccgggagtgtgtatctcctgcagaaggccctgatgcccgttctcctccagggacaggcacggttggtggaagagtgcaacgggaggcgcgccaaacttctggcctgtgatggaaacgagatcgacacaatgttcgttgatcggcggggtactgccgaaccacagggacagaagcttgtgatatgttgcgaagggaatgccggcttttacgaagtggggtgcgtgtccacccccctcgaggctgggtattccgtgcttggttggaaccaccccggttttgcaggcagcacgggtgttcctttcccccaaaacgaggctaacgccatggacgttgtcgttcagttcgcaatccaccggcttgggtttcagccacaggatataataatttatgcatggagcattggcggatttaccgccacatgggccgccatgagttatccagacgtctcagcgatgatcctcgatgcctccttcgacgacttagtccctctcgccctgaaagtgatgcccgattcctggcgaggactggtgacgcgcacggtacggcagcacctgaacctaaataatgccgaacaactctgcaggtaccaaggtccagtgcttcttattagaaggaccaaggatgagatcataaccaccactgttcccgaggatatcatgtcaaaccggggcaatgacctgctcttaaagcttctacagcataggtatccccgcgtgatggcggaggagggtctgagagtggtgcggcagtggctggaagcgagctctcagcttgaggaagccagcatctattcacgttgggaagttgaggaggactggtgtctctccgtgctgcggagctatcaggcggaacacggacctgactttccctggagtgtgggggaagacatgtcggccgatggaagacggcagcttgccctcttcctcgctcggaagcatttgcacaatttcgaagcaacacactgcacccctcttcctgctcaaaatttccagatgccatggcacctgtag

SEQ ID NO: 207972 - DNA, 1806 bp, Artificial Sequence
  derived and/or modified sequence
atgtctcaactcgcacgtcgaagaagccgctatggactgacttcaagggcacataatacatcagaagccggccgagccggtcctgcaggagggcccgccgccggtcgagccgctgcgcgggcaggcgccatggccaaactgttgagctgcgtgctggggccccgcctctataaaatttacagagagagagactccgagagagcccccgcctcagtgccagagactccgaccgctgtcacggccccgcacagcagttcgtgggatacctactatcagccccgggccctcgaaaaacatgccgactccattctagccttggcctcagtattttggagtatctcgtactattcctctcccttcgcttttttttacctttacaggaagggctacctgtccctgagcaaggtcgtaccctttagccattatgccggcacattactgctattgctggcaggcgtagcctgcttgagaggtatagggcggtggacaaatcctcagtatagacagttcataacgatacttgaagccacccacaggaaccaaagttccgagaacaaaagacaattggcaaattacaacttcgactttcggtcctggcctgttgactttcactgggaggaaccctctagtagaaaggagagtagaggtggtccttctcggcgcggtgttgctctcctgagacccgaacctcttcatcggggaactgccgacactctcctcaacagagtcaaaaaacttccttgccaaattacctcttacctggtagcgcacactttgggccggcgcatgctgtaccccggaagcgtgtacttgctccagaaggcactgatgcccgtgctattgcaggggcaggcccgcttggtggaggaatgcaatggccggcgggcaaaactgctggcctgcgatgggaatgaaattgacaccatgtttgtggatcggcgagggacggctgaacctcagggacaaaaattggtgatctgttgcgagggcaacgcaggattttatgaggtaggatgtgttagtacaccactcgaggccggctactcagttctcggatggaaccatccaggatttgccggctctaccggcgtgccattccctcagaacgaagctaacgccatggatgtggtggtgcagttcgccattcaccgtctgggatttcagccacaggacataataatctacgcttggtccatcggtggattcacagcgacttgggcggctatgtcataccccgatgtcagcgccatgatcttggacgcctcattcgacgacctggttcccctagctctcaaggtgatgcctgattcgtggagagggctggtgacaagaacagtgagacaacacctgaacctgaataatgctgagcagttgtgccggtatcagggccctgttctgttgatacgacgaacaaaggacgaaatcataactaccacagtgcctgaagatatcatgagtaataggggcaatgacctgttgctgaagctcctgcaacatcgttaccctcgagtgatggccgaggagggtctgcgcgtggtgcgccaatggctcgaagcaagctctcagctggaagaggccagtatctacagccgatgggaagttgaagaagactggtgtttgtccgtcctcagaagttaccaggcagagcatgggcctgacttcccatggtctgtaggtgaggacatgtccgctgacggtaggcggcagctcgcgctgttcctggccagaaagcaccttcataattttgaggctacccactgtactcctctgcccgcccagaattttcaaatgccctggcacctgtag

SEQ ID NO: 207973 - DNA, 1806 bp, Artificial Sequence
  derived and/or modified sequence
atgagccaactggcccgacggcgctcccggtacggcctgacctcgagagcccataacacttctgaggctggtcgggcgggtcctgccggcgggcccgccgccggcagggctgccgcacgtgctggggccatggcaaaactattgtcatgcgtgttggggcctaggttgtataagatctacagagaacgtgattccgagagggcaccagctagtgttccagaaacccccactgccgtgacagcaccacactcctcgtcttgggacacatactatcagccgcgggcattggagaagcatgcagatagtatcctcgctctggcgagcgttttttggtctattagttactatagttccccattcgcgtttttctacctttaccgcaaaggctaccttagtctcagtaaagtggttccttttagtcactatgccggtacactgttactcctgctagccggcgttgcctgcctgcggggcatagggcgctggactaaccctcagtatcggcaatttattacgattctcgaggccactcatagaaaccagagcagcgagaacaagaggcaattggccaattataattttgatttcaggagttggcctgtggactttcattgggaggagccttcaagccgcaaagagagtcgaggcgggcccagccggaggggggtggccctgctgcggcccgaaccgttgcacaggggtaccgcagatacactgctgaatcgcgtgaaaaaactcccttgtcagatcacttcgtacctggtggcacacaccctgggacgccgtatgctgtatcccggatctgtctacctgcttcagaaagccctcatgcctgtgctcctgcaaggtcaagcacggctggtcgaggaatgcaacggccggcgtgctaagctgctcgcgtgtgacggcaacgagatcgataccatgtttgtggatcggcgcggcacagctgaaccgcagggccagaaattggtgatctgttgcgagggcaacgccgggttttacgaggttggttgtgtgtccacccctttggaggcaggctactcggtcctaggctggaatcaccccggatttgcaggctcaactggcgtcccattcccacagaacgaggccaatgctatggatgtggtggttcagtttgctattcataggctcggcttccagccacaagatatcatcatttatgcttggtccatcggaggcttcacagcgacatgggctgccatgagctacccagatgtatccgccatgattttggatgccagtttcgacgatctagtccccttggctctcaaagtgatgcctgactcatggagggggctggtaacgcggaccgtgagacagcatctcaatctcaacaatgcagagcagctctgtcgctaccaggggccagtgctgcttatccggagaaccaaggacgagatcatcacaaccactgtgcctgaagatatcatgtcaaatcggggcaacgatttgctgctcaagttgctgcagcacaggtacccacgggtgatggctgaagagggactcagagtcgtacgacaatggctggaagcaagctcccagctggaggaagcttcgatatacagtcggtgggaagtcgaggaggactggtgcctaagcgtcctccgcagctatcaggcggagcacggaccagacttcccctggtcagtcggtgaggacatgtccgccgacggaaggcggcagttagctctgtttctggcgcggaagcacctacacaacttcgaagccactcactgcacaccgcttccggcccagaattttcagatgccctggcatctgtag

SEQ ID NO: 207974 - DNA, 1677 bp, Artificial Sequence
  derived and/or modified sequence
atggctaagctgctctcatgtgtcctgggtccacgcctgtacaaaatttacagagagagagattcagagcgcgctccggcctccgtcccagaaactccgaccgctgttactgcgcctcatagcagttcttgggatacatactatcaacctagggcattggaaaagcatgcagactctatcttagcgctggcaagtgtgttttggagtatcagctattactctagtcccttcgcttttttctatttatacaggaaaggatatctcagtctaagcaaagttgttccgttctcccattacgccggaacgctgcttttgctgttggcgggcgtagcatgcttgagaggtatcggaaggtggacaaaccctcagtatcgccagttcattacaattcttgaggcaactcatagaaatcaaagcagtgagaataaaagacagttggcaaactacaacttcgactttaggagttggcctgtcgacttccactgggaagagccctcaagtcggaaggagtccaggggtggtccttcaaggagaggcgtggctctgctgcggcctgaaccactccataggggaactgccgacaccctgttgaatcgggtgaaaaaactcccatgccagattacatcatatctagtggcccatacgctgggcagaagaatgctatatcctggctccgtgtatcttcttcaaaaggctctcatgcccgtgctgcttcagggccaggcccgccttgttgaggaatgtaatggacgcagggctaaacttctcgcctgtgacggcaacgaaatcgacactatgttcgtggaccggaggggcaccgctgagccccaggggcagaagctcgtgatctgttgcgaaggaaacgccggattctacgaagtgggatgcgtgtccacacctctcgaggccggctactctgtcttaggttggaatcacccaggtttcgcggggtcaaccggagttcctttcccacaaaacgaagccaatgctatggacgtcgttgtccagttcgccattcaccgcttggggttccagccacaggatattatcatctatgcgtggagcatagggggttttacagccacctgggccgctatgagctacccagacgtgagtgctatgatacttgatgccagcttcgacgatctcgtccccttggctttgaaggtgatgcctgactcctggagaggattagttacccgcaccgtcagacagcacctgaacctgaacaacgccgagcagctgtgccgataccaaggaccagtcctgctcatccgtcgcaccaaggatgaaataatcactacaaccgtcccagaagacattatgagtaataggggcaatgacctactgcttaaactgctgcaacaccgctacccccgggtgatggccgaagagggactgcgggtggtaaggcagtggcttgaggcctccagtcagctcgaagaagcaagcatctattcacgatgggaagtggaagaggattggtgtctgagtgtactccggtcataccaggcagaacacggacccgacttcccatggtcagtgggggaggacatgagtgctgatggcagacgccagctggccctgtttctagctaggaagcacctgcacaacttcgaagctactcactgcactcctcttccggcccaaaacttccagatgccttggcacctatag

SEQ ID NO: 207975 - DNA, 1806 bp, Artificial Sequence
  derived and/or modified sequence
atgagccagctggccaggcgtaggtcccgatacgggctcacatctagagcccacaacacctctgaagccgggagggcgggccccgccggggggcccgccgccggccgggccgcagcccgggccggagctatggccaagctcttgagttgcgttttgggccccagactgtacaaaatctatcgggaaagggactctgagagggcacctgcatcggtcccagaaacccccacagcagttaccgcgccccactcaagtagctgggatacatactaccagccccgggccttggagaaacacgcagactctattttggcccttgcctctgtgttttggagcattagttactactctagtccctttgcatttttctatctctacagaaaaggttacttgagcctatccaaagtagtccctttttcccactacgcaggaactttgcttctgcttcttgcaggagtggcttgcctgagaggcatcgggaggtggactaatcctcagtatagacaatttatcaccattctggaggcaacccatcgaaaccagtcctctgagaacaagagacagttggctaactataatttcgactttcgctcctggcctgtagatttccactgggaagaaccttcctcacgcaaagaatcacggggtggccctagccgtcggggggttgctttactgcgccctgagcctctgcaccgcggtaccgcagatacactgcttaaccgcgtcaaaaaacttccttgtcagatcacaagttatctggtggcccacacactcggccgaaggatgttataccctggatcagtgtatttacttcagaaggccctaatgcccgttctcctgcagggccaggcacggttggtggaggagtgcaacgggcgacgcgcaaaattgctggcctgtgatgggaacgagatcgacaccatgtttgtagaccgcagggggactgccgagccccagggtcagaagctcgtcatttgttgcgaggggaatgcgggattttatgaagtcggctgcgtatccacccctttggaagctggttacagtgtactgggatggaaccaccccgggttcgctggatccactggcgtgccttttccacagaatgaggcaaacgccatggatgtcgtagttcagtttgcaatacaccgtctcggattccaacctcaggatattattatttacgcctggagtattggtgggttcactgctacttgggccgctatgagttatccagatgtctcggccatgatactcgacgctagtttcgatgatttggtcccgctagctctgaaagtcatgcccgactcttggcggggtctcgtgactcgcacagtgcggcagcatcttaacttgaataacgcagagcaactctgccgctatcagggaccggtcctcctaattcggcgcacgaaagacgagataattactacgactgttccagaggacataatgagtaatcgggggaatgaccttcttttgaagttactgcagcacagatacccccgagtgatggccgaagaggggctcagggtggtgaggcagtggctcgaagcatcgtctcagctggaggaggcttctatctattctagatgggaagtggaggaggactggtgtctgagcgtgctgaggtcataccaggctgaacacggcccagacttcccgtggagtgtgggcgaggatatgagcgcagacggccggcggcaactggcactgtttctcgcacgaaagcacctccataactttgaagccacacactgcactcccctgcccgcacaaaatttccagatgccctggcacctgtag

SEQ ID NO: 207976 - DNA, 1677 bp, Artificial Sequence
  derived and/or modified sequence
atggcgaagcttctttcctgtgttctgggaccgcggctctataagatctacagggagcgcgactctgaaagagccccggcatcagtgcccgaaacacctaccgctgtgacagcgccacactcttcttcctgggatacatattaccaacccagggccttggaaaagcacgccgatagtatattggcgctggccagcgttttttggagtatcagctattactccagccccttcgcatttttttacctatatcgaaaaggttacttgagtctcagcaaggtggtacccttttcccattacgcaggcacgttgttattgctactggccggcgtagcctgcctgaggggcattgggagatggacaaacccccagtatcgacagtttatcacaatcctggaggcaacccacagaaatcagagctccgaaaacaagcggcaattggcaaactacaactttgatttccgcagctggccagtcgacttccattgggaagagcccagcagtcgcaaggaatcgcgaggaggtccaagtaggcgaggcgtggcgctgctgcgccccgagccgctgcatcgtggtacagctgatactcttctgaaccgggtcaagaaactgccgtgtcagattactagctatcttgtcgcacacaccctagggaggcgcatgctatatccaggaagtgtgtaccttttgcagaaagctttaatgcccgttctactgcaggggcaggcccggttggtcgaagagtgtaatggccgccgggccaagttactggcttgtgatggaaacgagatcgacacaatgttcgtcgaccggcggggcaccgcggaaccccagggtcagaaactggtgatctgctgcgaaggcaacgccggattttatgaagtaggttgcgtctccacacctctggaggctgggtattctgttctgggatggaaccaccccggatttgccggttccactggagtgccctttccacaaaacgaggctaacgccatggatgtggtggtccagttcgctatccaccgccttgggttccagccacaagacattatcatctacgcttggtcaatagggggtttcacagcaacgtgggcggctatgtcctaccccgacgtttctgccatgattcttgacgcatcgttcgatgacctagttccactcgctttgaaagtcatgccggacagctggcgggggctcgttacaaggaccgtccgccagcatctgaatctcaataatgcggagcagttatgtagataccaaggccctgtgctcctgattcgccgcacaaaagatgaaatcattacaacgactgtccccgaagacattatgtcgaatagaggcaatgacctcctgctcaagctcctgcagcaccggtaccctcgagtgatggctgaggagggtctccgcgtcgtccggcagtggctggaggcgagtagccaactggaggaggcgtctatatacagcagatgggaggtggaagaagattggtgcctgtccgtcctgaggagttaccaggcggaacacggcccagacttcccctggtccgtcggtgaagatatgagtgccgacggccggcgccaattggctctgtttttggcgaggaagcacctccataattttgaggccacacattgtacaccgttgccagcccagaatttccagatgccctggcatctgtag

SEQ ID NO: 207977 - DNA, 1677 bp, Artificial Sequence
  derived and/or modified sequence
atggcgaagctgctgagctgtgtgctgggtccacggctttataagatctaccgcgagcgagatagtgaaagggctcccgcatccgtgcccgaaacacccactgccgtgacagctccccatagctcctcctgggacacatactaccaaccacgggcactcgaaaaacatgctgattctatcctcgcactcgctagtgtcttctggagcatttcatactatagcagtcccttcgcatttttctacctatatcggaaaggatatcttagcctatcaaaggtcgtaccattttcccactatgctggcacactacttctccttcttgctggggtggcgtgtcttcggggcattggacgatggaccaacccacagtaccgacaattcattactatactggaggctacgcatcgcaatcagagctcggaaaataagagacaactggccaattataatttcgacttccgcagttggccagtggacttccactgggaggaaccctcatcccgcaaggaatctcgcggtggccctagccgccgtggcgtggcactgctgagaccagagcctctccataggggcaccgcggacaccttgctgaaccgggtgaaaaagctgccatgccagataacatcttacctagtagcccatactctgggccgccggatgctgtaccccggatccgtttacctgctgcagaaggctttgatgccagtgctgttacaaggacaggccaggctagtcgaggagtgtaatgggaggagagccaaattactagcctgtgatgggaacgagatcgacacaatgttcgtagatagacgaggcaccgctgagcctcagggtcagaagttagtgatttgctgtgaaggcaacgccggcttttacgaggtggggtgtgtctctacccctctggaggcaggatactccgtgctggggtggaatcatccaggcttcgccggcagcacaggggtgccgtttccacagaacgaggccaatgctatggacgtggtcgtgcagtttgccatccatagattagggtttcagccacaggatatcattatctacgcttggtcaatcggggggtttacggctacttgggctgcgatgtcctatcctgacgtgtcggcgatgatcctggacgccagttttgatgatctggtccctctggccttgaaggtcatgccagacagttggagaggtctcgtaactaggaccgtgcgccagcacctgaacctgaacaacgccgaacagctctgtaggtaccaaggacccgtccttctgattcgcagaactaaagacgagattatcacgacgactgtgcctgaggacatcatgagcaatcgcggcaacgacttgttactgaaattactccagcaccggtaccccagggtgatggccgaggaaggcttgcgagtggtgcgacagtggctggaggcatcttcccagctggaggaggcttccatttacagccgttgggaggtggaagaggactggtgtctgagcgtcctgcgttcttatcaagccgaacatggacccgatttcccatggagtgttggcgaggatatgagtgccgacgggcgccggcagctagcactgttcttggcgcggaagcacctgcacaatttcgaggcgacccattgcacccccctccctgcccaaaacttccagatgccttggcacctttag

SEQ ID NO: 207978 - DNA, 1677 bp, Artificial Sequence
  derived and/or modified sequence
atggctaaactcctatcctgtgtgctgggccctcgactctacaagatttatcgcgaaagggacagtgaaagggctcctgcttctgtgccagagactccaaccgccgtgacggcgccacacagcagtagttgggacacttattaccagcctagagctttggagaagcatgccgactccatcctggcactcgcatcagtgttttggtctatctcctattactcctcaccctttgcttttttctacctgtacagaaaggggtatctctcactgtctaaagtggtgccattcagtcattatgccggcactctgcttctgctgctcgcgggagtagcgtgtttacggggcataggacgatggacgaatccgcaatacagacaatttataaccatcttagaggctacacatagaaatcaaagttccgagaacaagagacaattggcaaattataacttcgatttccgcagttggcccgtggacttccattgggaggagccctccagccgtaaggagtctcgaggcggacctagtcgccggggagtcgcactgctgagaccggagcccttgcacagaggcacagccgacacacttctaaacagggttaaaaagttaccttgccagatcacatcgtaccttgttgcccatacactgggtaggcggatgctgtaccctggatctgtctacttgctccagaaggcgttgatgcctgtgctgttacagggccaggccagactagtggaagagtgcaacggccgcagggcaaagctactcgcttgcgatggaaacgaaatcgatactatgttcgtggatagacgtggaacagccgaaccccaagggcagaagctggtgatctgctgcgaggggaacgcggggttttatgaggtgggatgcgtaagcacgcccctagaagccggatatagcgtcttaggttggaaccacccaggtttcgccgggagcaccggtgtcccctttccccagaacgaggctaatgcaatggacgtggttgtacagtttgctattcacaggctggggttccaacctcaagatatcattatctacgcctggtccatcggcggctttacggccacttgggctgccatgtcgtacccggacgtcagcgcaatgatactggacgcctcttttgacgatttggttcccttagcactcaaagtcatgcccgactcctggcgggggttagtgacgagaacggtacggcagcaccttaatcttaacaatgctgaacagctgtgcaggtaccagggcccagtcctcttgattagacgtactaaagacgaaattattacaactacagtgccagaggacattatgtcaaatagaggcaatgatctactcctcaagctgctccagcaccggtatccccgggtcatggccgaagaaggcctgcgggtggtgcggcaatggctggaggcctcgagccagcttgaggaggcgagtatctactcacgctgggaagttgaagaggattggtgtctgtccgtgctccgctcttatcaagccgagcacggtcccgatttcccctggagtgtcggcgaggacatgtccgcagacggccgtaggcagcttgccctcttcctggcgaggaagcatctacataacttcgaggccacccactgcacccccctgcctgcccagaacttccagatgccatggcatctgtag

SEQ ID NO: 207979 - DNA, 1677 bp, Artificial Sequence
  derived and/or modified sequence
atggccaagctgctgagttgcgtcctgggtccaaggctgtataagatctatcgagagcgggactcggagcgagctccagcatcagttccagagacaccaactgcggtgactgcccctcattcatccagttgggatacatattatcagcctagggccctggagaagcacgctgactccattttagctctggccagcgtgttttggagtattagttattactcctctccatttgccttcttttacttgtaccggaagggatatttatcactatccaaagtggttccatttagccactatgccggcaccctgctgctgctgttagctggggtggcttgtctgagggggatcggccggtggactaatccacagtatagacaatttatcacaatattagaggctacacatagaaaccagagctcagaaaacaaacgacagttggccaactataacttcgatttccgctcctggccggttgatttccactgggaggagccatcttcccgcaaggagtcccgggggggccccagtaggcggggcgttgcacttctccggcccgagcccctgcacaggggtactgcagatactcttctgaaccgggtgaaaaagctgccgtgccaaatcacctcctacctggttgcccacacattaggacgcaggatgctgtaccccggaagcgtttatttgttgcagaaagcactgatgcccgtgttgctgcaaggacaggcccgcctcgtggaagagtgtaatggcagacgcgctaaactgctcgcatgcgatggaaatgagattgacactatgtttgtagatagacgaggaaccgccgaacctcaaggccagaagttagtcatttgttgtgagggcaacgctggattctacgaagtgggttgtgtgtccacccccctggaagctggctattcagttctgggctggaaccaccctggcttcgccggtagcacgggtgttccatttccccagaatgaggcgaacgcgatggatgtagtggtgcaattcgccattcatcggctgggcttccaaccgcaggatattattatctacgcatggtccattgggggtttcaccgccacctgggccgcaatgagctaccccgatgtgagcgcaatgatccttgatgccagctttgacgatttagtgccgctcgcactcaaagtgatgcccgacagctggcgcgggttggtaacccgtaccgtgcggcagcacttaaacctgaataacgccgaacagttgtgtcgctaccagggccccgtcctgttaattcggcgaacaaaggatgaaatcattaccacgactgtcccggaagacatcatgtccaacagggggaatgatttgctactgaagctcctgcagcaccgctatcctcgggtcatggcggaggaaggcttgcgcgtggtgcggcagtggttagaggccagtagccagttggaagaagcttctatttattctaggtgggaagtggaggaagactggtgcttgagtgtgttacgctcctatcaggccgagcacggacccgattttccctggtcagtcggcgaggatatgagcgctgatgggcggcggcaactggctctgttccttgctagaaagcatctgcataattttgaagccactcattgcacccccctccccgcccagaatttccagatgccctggcatctgtag

SEQ ID NO: 207980 - DNA, 1677 bp, Artificial Sequence
  derived and/or modified sequence
atggccaaattgttatcctgtgtactgggccctcgcctctacaaaatttatcgggaaagggattcagagcgcgcccctgctagcgtcccagagacaccgacggccgtcacagctccccacagctcttcatgggatacttattaccagcctcgcgccctcgagaagcatgcagatagcatcctcgccctcgcatcagtgttttggtccatttcttactacagcagccccttcgcgttcttttacctgtatagaaagggttatctgtcactcagtaaggttgtccccttcagccactatgccggaacacttctccttcttttggccggcgtggcctgcttacgagggatcggccggtggactaatccacaataccgacagtttattaccatcctggaagcgacccacaggaaccagagcagcgagaacaaacgccagctggccaactacaatttcgatttcagaagctggccagtggattttcattgggaggagccatcttcccggaaggagtcgcgcggaggtccgagcagacgaggagttgccctactgcggcccgaacctctgcatagaggaaccgctgatacgttgctgaatagggtcaagaagctgccatgtcaaatcactagttacttggtcgcacacacacttggcaggcgcatgctgtatcccggatcagtgtatctccttcagaaagcgttgatgcccgtgttattgcagggacaggccagactggtggaagaatgcaacggccggcgagctaaactgctggcttgtgatggtaatgaaattgatactatgtttgtggatcgtagaggcactgccgaaccccaggggcagaagctggtgatttgttgcgagggaaacgccggattttatgaagtaggatgtgttagtaccccactcgaagccggctactcggtcttagggtggaatcatcctgggtttgctggctctaccggcgtcccttttcctcaaaatgaagccaacgctatggacgttgttgtgcagttcgcgatccacagactcggcttccagccacaagatatcatcatatacgcgtggtcaatagggggtttcacagcaacttgggcagccatgtcctacccagacgtcagcgccatgatcctggacgcatcatttgacgacctcgtacccttagccctcaaagtaatgcctgattcttggcggggactggtcacaagaactgtgcgacagcaccttaatctgaacaacgcggaacaactgtgtcgctaccaaggccctgtcttgctgatacgcagaacaaaagatgagatcatcacaaccacggtaccggaagacatcatgtccaacagaggaaacgatctcttactcaagctgctgcagcacagatatcctagagtgatggctgaggagggcctcagagtcgtccggcagtggttggaagcctcctcccagctggaagaagcgagcatctatagcagatgggaagtggaagaggattggtgcctgagtgtgctgcgttcttaccaggctgaacacgggccagattttccttggagtgtaggagaagacatgagcgcagatggccgccgccagctggccctgttcctcgcacggaaacatcttcacaatttcgaggccactcattgcactcctctgcctgctcagaattttcagatgccatggcatctgtag

SEQ ID NO: 207981 - DNA, 1677 bp, Artificial Sequence
  derived and/or modified sequence
atggccaagctgctgagctgtgtgctgggcccccggctgtacaagatctaccgggagcgggacagcgagcgggccccagcctctgtgcctgagacccccacagctgtgacagccccccacagcagctcctgggacacctactaccagccccgggccctggagaagcatgctgacagcatcctggccctggcctctgtgttctggagcatctcctactacagcagcccctttgccttcttctacctgtacaggaagggctacctgagcctgagcaaggtggtgcccttcagccactacgccggcaccctgctgctgctgctggccggcgtggcctgcctgcggggcatcggccgctggaccaacccccagtaccggcagttcatcaccatcctggaggccacccacaggaaccagagcagcgagaacaagaggcagctggccaactacaactttgacttccgctcctggcctgtggacttccactgggaggagcccagcagcaggaaggagagcagaggaggccccagcagaagaggagtggccctgctgcggcctgagcccctgcaccggggcacagctgacaccctgctgaacagagtgaagaagctgccctgccagatcaccagctacctggtggcccacaccctgggccgcaggatgctgtacccaggctctgtgtacctgctgcagaaggccctgatgcctgtgctgctgcagggccaggcccggctggtggaggagtgcaatggaagaagagccaagctgctggcctgtgatggaaatgaaattgacaccatgtttgtggaccggcggggcacagctgagccccagggccagaagctggtgatctgctgtgagggcaatgccggcttctatgaggtgggctgtgtgtccacccccctggaggccggctacagcgtgctgggctggaaccaccctggctttgctggcagcactggagtgcccttcccccagaatgaggccaatgccatggatgtggtggtgcagtttgccatccaccggctgggcttccagccccaggacatcatcatctatgcctggagcatcggcggcttcaccgccacctgggccgccatgagctacccagatgtgtctgccatgatcctggatgccagctttgatgacctggtgcccctggccctgaaggtgatgccagacagctggaggggcctggtgaccaggacagtgcggcagcacctgaacctgaacaatgctgagcagctgtgccgctaccagggccctgtgctgctgatccggaggaccaaggatgagatcatcaccaccaccgtgcctgaggacatcatgagcaacagaggaaatgacctgctgctgaagctgctgcagcaccgctacccccgggtgatggccgaggagggcctgcgggtggtgcggcagtggctggaggccagcagccagctggaggaggccagcatctacagccgctgggaggtggaggaggactggtgcctgtctgtgctgcggagctaccaggccgagcacggccctgacttcccctggagcgtgggggaggacatgtctgcagatggccggcggcagctggccctcttcctggccaggaagcacctgcacaactttgaggccacccactgcacccccctgcctgcccagaacttccagatgccctggcacctgtag

SEQ ID NO: 207982 - DNA, 1806 bp, Artificial Sequence
  derived and/or modified sequence
atgagccagctggccaggagaagaagccgctatggcctgaccagccgggcccacaacaccagcgaggccggccgggccggccctgctgggggccctgctgctggccgggccgccgcccgggccggggccatggccaagctgctgagctgtgtgctgggcccccggctgtacaagatctaccgggagcgggacagcgagcgggccccagcctctgtgcctgagacccccacagctgtgacagccccccacagcagctcctgggacacctactaccagccccgggccctggagaagcacgccgacagcatcctggccctggccagcgtcttctggagcatctcctactacagcagcccctttgccttcttctacctgtacaggaagggctacctgagcctgagcaaggtggtgcccttcagccactacgccggcaccctgctgctgctgctggccggcgtggcctgcctgcggggcatcggccgctggaccaacccccagtaccggcagttcatcaccatcctggaggccacccacaggaaccagagcagcgagaacaagaggcagctggccaactacaactttgacttccgctcctggcctgtggacttccactgggaggagcccagcagcaggaaggagagccggggcggccccagccggcggggcgtggccctgctgcggcctgagcccctgcaccggggcacagctgacaccctgctgaacagagtgaagaagctgccctgccagatcaccagctacctggtggcccacaccctgggccgcaggatgctgtacccaggctctgtgtacctgctgcagaaggccctgatgcctgtgctgctgcagggccaggcccggctggtggaggagtgcaatggccggcgggccaagctgctggcctgtgatggaaatgaaattgacaccatgtttgtggacagaagaggaacagctgagccccagggccagaagctggtgatctgctgtgagggcaatgccggcttctatgaggtgggctgtgtgtccacccccctggaggccggctacagcgtgctgggctggaaccaccctggctttgctggcagcactggagtgcccttcccccagaatgaggccaatgccatggatgtggtggtgcagtttgccatccaccggctgggcttccagccccaggacatcatcatctatgcctggagcattggaggcttcaccgccacctgggccgccatgagctacccagatgtgtctgccatgatcctggatgccagctttgatgacctggtgcccctggccctgaaggtgatgccagacagctggaggggcctggtgaccaggacagtgcggcagcacctgaacctgaacaatgctgagcagctgtgccgctaccagggccctgtgctgctgatccggaggaccaaggatgagatcatcaccaccaccgtgcctgaggacatcatgagcaacagaggaaatgacctgctgctgaagctgctgcagcaccgctacccccgggtgatggccgaggagggcctgcgggtggtgcggcagtggctggaggccagcagccagctggaggaggccagcatctacagccgctgggaggtggaggaggactggtgcctgtctgtgctgcggagctaccaggccgagcacggccctgacttcccctggagcgtgggggaggacatgtctgcagatggaagacggcagctggccctcttcctggccaggaagcacctgcacaactttgaggccacccactgcacccccctgcctgcccagaacttccagatgccctggcacctgtag

SEQ ID NO: 207983 - DNA, 1677 bp, Artificial Sequence
  derived and/or modified sequence
atggccaagctgctgagctgcgtgctgggcccccggctgtacaagatataccgggaaagggattctgagagagcacccgcgagcgtgccagagacccccacggcagtgacggccccccattcgtcctcgtgggacacttactaccagccccgcgctctcgaaaagcatgccgactccattcttgcactggcgtccgtgttctggtccatctcctactacagcagcccttttgcttttttttacctttataggaagggttatctcagtctctccaaagtcgtgccgttttcacactacgcaggtactctgcttctgttgttggccggcgttgcatgcctcaggggtatcggcagatggacaaacccacaataccgacaatttatcactattctggaagctacgcacagaaaccagtcgagtgaaaacaagcgccaactagctaactataatttcgactttagaagctggccagttgatttccactgggaagagcccagttcaagaaaagaatctcgggggggtccatcaaggcgaggggtcgctctgctgcggccagaaccactacatcgtggcaccgctgatactctactgaatagagtcaaaaagctgccatgtcagataacctcttacttggtggcccatactcttggacgcagaatgttataccccgggtcagtgtaccttctgcagaaggctctgatgcccgtgctcctccagggccaggcacgcctggtggaagagtgcaatggaaggagagctaagctgctggcatgtgacggtaacgagatagacactatgttcgtggatcgcagggggaccgctgagcctcagggacagaagcttgtgatttgctgtgagggcaatgctggcttctatgaagtgggctgcgtgtcaacgccattagaagctggttactctgtcttaggatggaaccacccggggttcgcaggaagtaccggtgttccattccctcaaaacgaggcaaatgcgatggatgtggttgtgcaattcgccatacatcgattgggattccagccccaagacatcattatatacgcgtggtctatcggtggcttcaccgctacatgggctgccatgtcttatcccgacgtgtccgccatgatattggacgccagcttcgacgacctggtacctctggctctgaaagtcatgccagactcttggagagggcttgtcacaagaactgttcgccagcatctgaacctcaacaacgccgaacaactttgccgctaccaagggcccgtcttgctcatcaggcggacaaaggacgaaataattacaacgaccgtgccggaagatattatgtcgaaccggggtaacgacctcctgctgaagttgttacagcatcgatatcctcgcgtcatggccgaggaaggcctgagagtggtaagacaatggctcgaggcgagttcccagttggaagaggcctctatttattctaggtgggaggtcgaggaagattggtgcctctccgtattgcgaagctaccaggccgagcatggacctgatttcccatggtcggttggggaggacatgtctgcagatggacgccggcagttggcattattcctcgctcgcaagcacttgcacaattttgaggccacccactgcacaccactgcccgctcaaaacttccagatgccctggcatctgtag

SEQ ID NO: 207984 - DNA, 1806 bp, Artificial Sequence
  derived and/or modified sequence
atgagccagctggcccggcggcggagccggtacggcctgaccagccgggcgcacaataccagtgaagcaggccgggccgggcctgctggcggacctgcagccggacgagccgcggcgcgcgctggggccatggctaaactgctgtcatgcgtcctaggacccaggctctacaaaatctaccgagagagggactcagagagagcccccgccagtgttccagagactcccaccgctgtcacggccccacacagctcttcatgggacacatattatcagccaagggcgcttgaaaagcacgccgactctatattagcactggcctccgtattttggagcattagttactacagttcccctttcgcatttttttacctctaccgcaaggggtacctgtcactcagcaaggtcgtgcctttcagccactacgcaggaaccctacttctgctgctggccggcgtggcttgcctcaggggcattggcagatggaccaacccacaatataggcagtttatcactattctcgaagcaacccataggaaccaaagcagcgagaacaagcgccagttggcaaattataatttcgattttaggtcatggccggtcgacttccattgggaggagccaagtagccgcaaagagagccgaggagggccttctcgcaggggcgtggccctcttgcgcccggagcccttgcacagaggcacagccgacacactgctcaacagagtgaagaaactcccatgccagataacttcgtatctagtggcacatacactcgggaggagaatgctgtaccctggctccgtctacctcctccagaaggcacttatgccagtgctgttgcagggccaggcccgccttgtggaagagtgcaatgggaggagggctaagctactggcttgtgacgggaacgaaatagatacaatgttcgtcgacaggagggggaccgccgagccgcaagggcaaaagcttgtgatttgctgtgaagggaatgccggcttctacgaggttggttgcgtctccacaccgctggaagcgggatattcagtcctgggttggaatcaccctggcttcgcgggatcaaccggcgtgccctttccccagaacgaggccaatgccatggacgtcgtggtccagttcgcaatccacaggttagggttccagccccaggatattatcatatacgcatggtctattggcggcttcaccgcgacatgggcagctatgtcttatccagatgtttctgccatgatcctggatgcctccttcgatgaccttgttccattagccctgaaggttatgccagactcctggcggggcctggtgacccgaacagtgaggcagcacctcaacttgaacaacgcagagcagctttgtagataccagggcccggtgctgcttattaggcggacaaaagacgaaattattaccactaccgtgcctgaggacatcatgagcaaccgaggtaatgatctgctgttaaagcttttgcaacaccggtatccccgtgtcatggccgaagagggtttgagagttgtgagacagtggctggaagctagcagccagttggaagaagcttctatatactcccgttgggaggtcgaagaggactggtgtctctcggttctgcgaagctaccaggctgaacatggccccgacttcccttggtcagtgggagaggacatgtcagcggatgggaggcggcaattagccttattcctggccaggaagcatttgcacaactttgaggcaacacactgcactcccttgcctgcacagaatttccagatgccatggcatctgtag

SEQ ID NO: 207985 - DNA, 1806 bp, Artificial Sequence
  derived and/or modified sequence
atgagccagctggcccggcggcggagccggtacggcctgaccagccgcgcccacaacacatctgaggctggacgcgccggccccgcaggtggcccggccgctggacgagccgccgcccgggccggagcgatggctaagctgttgagctgtgttctaggcccacgactgtacaagatctatcgtgaaagagactccgagcgcgcacccgcgtcagtcccagagacccctactgccgttacagctccacattcctcctcctgggacacttattatcagccgagggccttggaaaagcatgccgactcgatcctcgctctggcaagcgtgttttggtccattagctactactcctctccctttgcctttttctacctatacagaaaaggctacctgtctctaagcaaagtggtgcctttctcacattatgctgggactctcctcctgctcctggcaggcgtggcgtgtctgcggggcattgggcggtggaccaacccacagtataggcagtttatcacaattctggaggctacacatagaaaccagagtagcgagaacaagcggcaattggccaactataactttgattttcgcagctggcccgttgactttcactgggaagagccctccagcaggaaagagtctcgcggaggacctagcaggcgcggcgtggcccttttacggcccgaacccctgcacagagggaccgccgacaccctactgaatcgggtgaagaagctcccctgtcagatcacatcttacctcgtcgcgcacaccttgggccggaggatgctgtatcccggatctgtgtatctgctgcaaaaggctctgatgccggtcttactccaaggacaggctagactcgttgaggagtgtaatggccgacgcgccaagctcctggcttgtgatggtaatgagattgataccatgttcgtggatagacgggggacagcagagcctcagggacagaaactcgtaatctgctgcgagggtaatgctggcttttatgaggtaggatgcgtgagcacccccctggaggcgggatatagcgtcctgggctggaaccatccaggattcgctggttcaactggagttccgttcccccagaatgaagccaatgctatggacgttgtggtacaattcgccatacacagattgggctttcaacctcaagatatcataatttacgcctggagtataggggggttcacagccacatgggcagcaatgtcatatcctgacgtgtcagctatgattttggatgccagctttgatgacctggttcctctcgccctgaaggttatgcctgactcgtggagaggcttggtcaccaggactgtgcggcagcatctgaacctgaataacgccgagcagttatgtcgctaccaggggcccgtcttgctgattcgacgaaccaaggacgaaatcattaccactactgttccagaggacatcatgagcaatagaggcaacgacctgctgttgaaactgcttcagcaccgctacccacgggttatggctgaagaaggtctccgggttgtgagacagtggctagaggcgagctcacagttggaggaagcatctatctattcccgttgggaagttgaagaggactggtgtctgagtgtgctgagaagttaccaggcagaacacggtcccgactttccatggagtgtgggcgaagatatgtccgccgacgggcggcgccaactggcactctttttggcccgcaaacacctgcacaactttgaagctacccactgcacccccctccctgctcagaatttccagatgccctggcacctctag

SEQ ID NO: 207986 - DNA, 1806 bp, Artificial Sequence
  derived and/or modified sequence
atgagccagctggcccggcggcggagccggtacggcctgaccagcagagcacacaataccagcgaggccggacgggctggaccggccggcgggcctgccgcagggagagctgcagcacgcgccggagccatggctaaacttctgagctgcgttctggggccccggctgtacaaaatttatcgggagagggacagcgaaagagcccccgcctccgtgcctgagaccccaaccgccgtcaccgccccccacagttctagctgggatacgtactatcagcctcgggcgctcgaaaagcatgcggatagcattctggcgcttgcctccgtgttttggtccatctcatattactcctcacccttcgcgttcttctatttatatcgcaagggctatctttctctcagcaaagtggtgcccttttcacactatgccgggacgcttctgctgctcttggctggagttgcctgtctgcgaggtatcggaaggtggacaaacccccaatacaggcagttcataaccattctagaggcaacacacagaaaccagagcagcgagaacaagcggcagctggcaaattataacttcgattttagatcctggcctgtggacttccattgggaggagccatcctcaagaaaggaatcccggggggggccatctcggcgtggggtagcactactccggccagaacctctccatcgaggcacagccgacaccctgttgaatcgtgtcaagaagcttccgtgccagattacctcatacctcgttgctcacactctgggtcgaagaatgttgtatcctggttctgtttacttactgcagaaagctctgatgcccgttctcctgcaggggcaggccaggctggtagaagaatgcaatggcagacgcgcaaaactgctggcgtgtgacggtaatgagattgataccatgttcgttgacaggcgaggcactgcagagcctcaggggcagaaactggttatctgttgtgaaggcaacgccggattctacgaagtagggtgtgtaagtacccctctggaggcaggttatagtgtcttggggtggaatcatccaggatttgccgggtcaaccggcgtgccattcccgcagaatgaggcgaacgctatggatgttgtggtgcagttcgctattcatcggttgggatttcaacctcaggatattatcatatacgcctggtccattggcggattcacagccacttgggccgcgatgtcataccccgatgtctctgcaatgatcctcgacgcgtctttcgacgacctggtgccactggctttgaaagtcatgccggatagctggcgaggattggtgacccgaacagttcgacagcatttgaaccttaacaacgccgaacagctatgtcggtaccaaggtccagtgctcttaattcgcaggactaaagatgaaattatcacgaccacagtgccagaagatatcatgtccaataggggaaacgatctcttactcaagctgctacaacacaggtatccacgcgtcatggctgaagaagggctgcgcgttgtgagacaatggcttgaggcttcatcccaactagaggaggccagcatctatagtcggtgggaggttgaagaagactggtgcctcagtgtactcagatcgtaccaagcagaacatggccccgacttcccttggagtgttggggaggacatgtccgctgatggccgcaggcagctggccttgtttctggcccgtaaacacctacacaatttcgaggcaacgcactgtacccctctgcccgcccaaaacttccagatgccttggcacttgtag

SEQ ID NO: 207987 - DNA, 1806 bp, Artificial Sequence
  derived and/or modified sequence
atgagccagctggcccggcggcggagccggtacggcctgaccagccgagcccacaacacatccgaagcggggcgagccggccctgccggtggcccagcggcgggcagggcagcagcgagggccggcgcgatggctaaattgctcagctgcgttctgggccctcgtctgtacaaaatctacagggaacgggatagtgagagggctccagcctccgtgcctgaaacccccacggctgtaacagcccctcattcgagctcatgggatacatactatcaacccagggccctggagaaacatgccgactccatcctcgctctggccagcgttttctggagtatctcttattactccagtcctttcgcttttttttatctgtatcgaaagggctacctcagcctttccaaggtggtgcccttttcccactatgcgggaacacttttactactgcttgcaggggtcgcctgtcttcggggaatcggaagatggaccaatcctcagtacagacaattcatcaccatactggaggcgacccaccgcaatcaatccagcgagaacaagagacagctggcgaactacaacttcgatttcaggtcttggccagttgatttccattgggaggagcctagcagccgcaaggagagccggggtggcccctctaggaggggtgttgcactcctacggcccgagcccctccaccgcggtaccgcagacactctgttgaatcgagttaagaagttgccttgtcagatcacgagctatcttgtagcacacacactaggcagacggatgctgtaccctggcagcgtgtatctgttgcagaaagctctcatgccggttcttctgcaaggtcaagctagactggttgaggagtgtaatggccggcgagcaaagctgctcgcctgtgacggcaatgagatcgacaccatgttcgtagaccggcgcggcactgcggaaccccagggccagaagcttgtgatttgctgcgagggaaatgctggcttttatgaggtgggttgcgtaagcacacccttggaggccggatactccgtcttgggatggaatcatcctggatttgctgggtctaccggtgtgccctttcctcaaaacgaagctaatgccatggatgtggtcgtccagttcgccatacaccgactgggattccagccacaggatattattatttacgcctggtctataggcggtttcactgccacctgggccgcaatgtcctatcctgatgtatccgcaatgattcttgacgccagttttgacgatttggtgcccctcgcgctgaaagtgatgcctgattcctggcgcggattggtgacgcggacggtgcggcagcatctgaatttgaataacgcggagcagctgtgcaggtaccagggccccgtgctcttgatcaggcggacaaaagacgagatcattaccaccactgtgcccgaggatatcatgagtaaccgggggaacgatctgcttcttaaattgctgcagcacagatatcctcgagtgatggctgaagagggactaagggtggtccggcaatggctagaagcatcatctcaattagaagaggcttctatctactctcgttgggaggtagaggaagactggtgcctctcagtcctgcgcagctaccaggcggaacacggaccggattttccttggtcggtgggcgaggacatgagcgccgacggcagaaggcaactcgctctctttttagcccggaaacacctccataatttcgaggctacacattgtacccctctgcccgcccagaatttccagatgccctggcatctttag

SEQ ID NO: 207988 - DNA, 1677 bp, Artificial Sequence
  derived and/or modified sequence
atggccaagctgctgagctgcgtgctgggcccccggctgtacaagatttatagagagagggactctgagcgtgctcccgcatctgtcccagagaccccgaccgcagtaacagcaccccatagctcttcctgggatacatattatcaaccacgcgctctggaaaaacacgctgattctatcttggcacttgcttcagtcttttggtccattagctattacagttcacccttcgcctttttctatctgtaccggaaaggctatctttccttaagcaaagtggtgccattttcccattatgcagggacactgcttctattgctcgcaggtgtagcttgtttaagaggaatagggcgctggacgaacccccaatacagacagtttatcacaattttggaggctacacatagaaaccagagctccgagaataagaggcaactcgccaactacaactttgactttaggtcatggcccgtggatttccattgggaggagccgagcagtcggaaggagtcacgcggcgggccgtctcgtaggggagtggcccttctcaggcccgaacccttacatcggggtactgcagacaccctcctcaaccgcgtcaagaaactgccgtgtcagataacctcttatctcgtggcccatacgctcggaaggcgaatgctctaccccggcagcgtttatctgctccaaaaagccctcatgccggtgctgctacagggccaggcacgcctcgtggaggagtgtaacgggcgtcgggctaaattgctcgcctgcgacgggaacgagatagataccatgttcgtggaccgcagggggacagccgaaccacagggtcaaaaactcgttatatgctgcgaaggaaacgctggcttctacgaggtgggttgtgtctctacaccactcgaagcagggtacagtgtgctcggttggaaccatcctggtttcgcaggcagcaccggggtcccctttccacaaaacgaagctaacgctatggacgttgtggtgcagttcgctatccataggctcggcttccagccccaagacatcattatttatgcttggtccatcggcggattcacagctacctgggccgctatgagctaccccgatgtaagcgccatgatcttggacgcctcctttgacgatctggtgcctctggctctgaaggtaatgcctgattcttggaggggactggtcacacgcacagtcaggcagcacctgaatttgaacaatgctgagcaattgtgtagatatcagggtccagtcttgttgatccggaggaccaaggatgaaattatcacaaccactgtgcccgaggatatcatgtctaacagaggaaacgatctgctcctcaagctgctgcagcatagatatccacgggtaatggcagaggagggattgcgcgtggttcgacagtggctggaagcttcatcccagctggaggaagcatctatttactcccggtgggaagtggaggaggattggtgcctctccgtcctgaggtcctatcaggctgaacatggtcctgactttccttggtccgtcggcgaagatatgtcagctgatggtagacgtcagctcgccctctttctagcaaggaaacacttacacaattttgaagcgacccactgtactcccctccccgctcagaatttccagatgccctggcacctgtag

SEQ ID NO: 207989 - DNA, 1806 bp, Artificial Sequence
  derived and/or modified sequence
atgagccagctggcccggcggcggagccggtacggcctgaccagccgagcacacaacacgtccgaggcaggtcgagctgggccagcaggcggacctgcagccggccgtgccgcggcgagagctggcgcaatggccaagctgctcagttgtgtccttggacctcggctctacaagatctatcgggaacgcgatagcgagagagcgccggcttcagtgcccgaaacccctacagctgtgacagcgccccactccagcagttgggacacatactaccagcctcgtgctcttgaaaaacacgctgattctattttagctcttgcctccgtcttttggagcatatcctattattcaagcccgtttgctttcttctacctctacagaaaaggttatctctccctgagtaaggtagttccattctcgcactacgccggtacactcctcttactgctggcaggggtcgcgtgcttgcgcggtatcgggcggtggactaacccccagtaccgacaattcattaccattttggaggccacacaccggaatcagagctcagagaacaagcgtcagctggcaaactataacttcgattttagaagctggccagtcgactttcactgggaggagcctagctctagaaaagagtcccgcggtgggcccagtcgtcggggggtggctctgcttcgtccagaacctctccatcggggcactgccgatacactgctgaacagagtcaagaagctcccttgccagatcaccagttacctggtggcgcacactctcggacggcggatgctgtatcctggttcggtttacctgctgcagaaggccttgatgccagtgttgctacagggacaagcccggctggtcgaagagtgcaatggaagacgcgctaaactcttggcttgtgacgggaatgagatcgacaccatgttcgtggatcggcgaggcacagcagagccccagggccagaaactggtgatctgttgcgaaggtaatgctggattctacgaggtggggtgcgtgagcactcctctggaagccggatactccgtgcttggttggaaccatccgggattcgctgggtctacgggggtgcccttcccccagaatgaagccaatgccatggacgtggtcgtgcagtttgctatccaccgactaggatttcaaccacaggacattattatctatgcttggtcaattggcggctttactgcaacatgggccgcaatgagttaccctgatgtgagcgctatgatccttgacgcctcttttgatgacttggtccctctcgctctgaaggtgatgccagattcatggcgcggccttgtcaccaggactgtgcgccagcatttgaaccttaataacgccgagcagctctgccgttaccaaggccctgtgctccttattcgccggactaaggatgaaatcatcacaactacagtgcctgaggacattatgtcaaacaggggaaatgacttattgcttaaactcctgcagcatagataccctcgagtgatggctgaggagggtctgcgagtggtccgacagtggctcgaggcatcttcgcagctcgaggaagccagtatctacagtaggtgggaagtcgaggaagactggtgcttatcagtgttaagaagctatcaagccgaacacggaccagactttccatggagtgtcggggaggacatgtctgccgatggcagacgacaactggcgctgttcttggcacgcaagcatctgcataatttcgaggctacccattgtacacccctcccagcccagaactttcagatgccttggcatctctag

SEQ ID NO: 207990 - DNA, 1677 bp, Artificial Sequence
  derived and/or modified sequence
atggccaagctgctgagctgcgtgctgggcccccggctgtacaagatctacagggagcgggactcggagagagcccccgcaagtgtccccgagaccccaaccgcagtgactgccccccactcaagctcgtgggatacctattatcagccgcgggctcttgaaaagcatgcggattcaattctggctctagccagcgttttttggtcgattagttactacagtagtccattcgccttcttctacctgtatcgaaagggatatctttcactgtctaaggtggttcctttttctcattacgctgggacgttgcttctcctgctggctggcgtagcctgtctaagaggtataggcaggtggacaaaccctcagtatcggcaattcatcacaatactggaggccacccaccggaatcagagttcagaaaacaagcgtcaattggccaattataacttcgattttagatcgtggcctgtggatttccactgggaagaaccttccagccgcaaggagagcagaggtgggccctcaaggcggggagttgccttgctgaggcctgaaccgctccacagaggaaccgccgacacgctgcttaacagagttaagaaacttccttgccagattacatcataccttgtggcccacacccttggcaggcggatgctatacccgggctctgtgtatctgctgcagaaggctctcatgcccgtcctgctccaaggacaggcacgactggtggaggaatgcaatggtagaagagcgaagctcttggcatgcgatggcaacgagatcgatacgatgttcgttgatagacgtgggacagcagagcctcaggggcagaaactggttatctgctgtgagggcaacgccgggttttatgaagtaggttgcgtctcgacaccattggaggctggttacagtgtcctcgggtggaaccaccccgggttcgcggggtctaccggggtgcccttccctcaaaacgaagcgaacgccatggacgtcgtggttcagtttgcaatccatcggctgggcttccagccgcaggacattatcatctacgcctggagcattgggggttttacggccacgtgggccgccatgagttatcccgacgtgagcgccatgatcctggacgcatccttcgatgacttggtgcctctagccctgaaagtgatgcctgactcatggcgaggtctggttacaaggactgtacggcagcacctgaatctgaataacgccgagcaactctgccggtaccagggcccagttcttcttatccggcggaccaaggatgagattataacaacaaccgtgcccgaggacatcatgagtaacagaggaaacgatttgctgctgaaactgctacaacataggtatccacgggtaatggctgaggaggggttgagggtcgtgaggcagtggctggaagcctcttctcaactggaagaggcatcgatttacagtcgttgggaggtggaggaggactggtgcctgagcgtgttgaggagttaccaggccgagcacggccccgacttcccatggagcgtcggcgaagatatgtcagcagacggccggcgtcagctggccttgttcctggcccgaaagcacctccacaacttcgaagctacccactgtactccactacctgcacagaactttcagatgccatggcatttgtag

SEQ ID NO: 207991 - DNA, 1677 bp, Artificial Sequence
  derived and/or modified sequence
atggccaagctgctgagctgcgtgctgggcccccggctgtacaagatttatagagagcgggactctgaacgggccccggccagcgtgcctgaaactcccaccgcagtgacagctccccactctagctcgtgggatacttattaccaaccccgcgcattggagaagcacgcggattcaattttagccctcgcctccgtgttctggagcatatcctattactcctcaccatttgccttcttctacctttaccgaaagggctacctatccctgtcaaaagtggtgcctttcagtcactatgctggtacgcttctactgctactcgctggagtagcctgtctacgtggaatcgggaggtggacgaatccccaatatcggcagttcatcacaatattagaagctacacacagaaatcagagttcagaaaacaaaaggcaactcgcaaactacaatttcgactttcgcagttggcccgtggattttcactgggaagagccttcaagcagaaaggaaagccgtggcggcccttcgcgccgcggtgttgccctcctgaggccggagccgctgcaccgcggaacagccgatactctgctgaacagggtgaagaagttaccctgtcaaataacttcctacctggtcgcccatacattaggacggcggatgctataccccggaagcgtgtatctattgcagaaggcactgatgccagtcctcctgcagggacaggcacggctggtcgaagagtgcaatggcaggcgcgcaaagctactagcttgcgatggaaacgaaatagacaccatgtttgtggaccggcggggcaccgccgagccccaggggcaaaagctggttatctgttgcgagggcaacgctggcttctatgaagttggctgtgtgtccactcctctggaagccgggtacagtgtcttgggttggaaccatcccggattcgctgggagcactggggtcccttttccgcagaatgaagccaatgcgatggacgttgtggttcagttcgcgattcaccggttggggtttcagccacaggacattataatctatgcttggtccatcggggggttcacggcgacctgggcagcaatgtcttatcccgatgttagtgctatgattcttgacgcctccttcgatgatcttgtacccctagccctcaaggtgatgcccgattcctggcgagggctggttactcggacggtgcggcagcatctaaatctgaacaatgccgagcaactgtgccgctaccagggcccggtactgctcatcaggaggacaaaagacgaaatcattactaccacagttccagaagatataatgtcgaataggggtaacgacttgttgctaaaactgttgcagcaccggtatccaagggtgatggccgaggaaggattacgcgttgtacggcagtggctagaggctagcagccaattggaagaggcctcgatttatagtcggtgggaagttgaggaagattggtgtctgtctgttctgcgatcctatcaggccgagcatggtcccgattttccgtggtcagtgggggaagatatgtcggctgacggacgacggcagctcgccttattcctggcccgcaaacaccttcataacttcgaggcaacccactgtactccactcccagcacagaatttccagatgccatggcacttatag

SEQ ID NO: 207992 - DNA, 1677 bp, Artificial Sequence
  derived and/or modified sequence
atggccaagctgctgagctgcgtgctgggcccccggctgtacaagatctatcgggaacgcgactccgaaagggcacctgcgagcgttcccgagactcccaccgcggttacggctccacattcctccagctgggatacctattaccaaccacgggccttggagaaacatgccgatagcattctggctttggcatctgtattctggtccatcagttactacagctctcccttcgctttcttttatctatatcgaaaaggctacctgtccctgagcaaggttgtccccttcagtcactacgccggaacactgctgcttctcttggccggggtggcttgcttacgaggcattggcagatggaccaacccccagtataggcagtttatcactattcttgaggccacacacaggaatcagtccagtgagaataagcggcagctggcgaactataattttgacttccgctcgtggcccgtcgatttccattgggaagagccatccagccgtaaagagtcccgcggtgggcccagtcgaagaggtgtagctctcctgcggcctgagcctttgcacagaggcacagctgacaccctgcttaatagagtaaagaagcttccttgtcagatcacttcataccttgtggcccatacactcggacgccgcatgctgtatcccggcagcgtgtacctccttcaaaaggctctcatgccagtcctcctgcagggacaggcgaggctggtcgaggaatgcaacggtcgccgcgccaaactgttagcttgtgatggcaatgagattgatacaatgttcgtggataggcgaggcacagcggaaccccaagggcagaagctggttatctgttgtgagggaaacgcgggcttctatgaggttggttgtgtgtccacgcctcttgaggcaggctactctgtcctgggctggaatcaccctggcttcgccggctccactggcgtgccatttccacagaatgaggcgaacgcgatggatgttgtcgtacagttcgccattcatcgattgggatttcagccccaggacataattatttacgcctggagtatcggaggatttacagcgacttgggccgccatgtcgtacccggacgtgagcgcaatgatcctggatgcaagcttcgatgacctcgtgccactggccttgaaggtcatgcctgatagctggagggggctggttacccgaaccgtcagacagcacctgaatctcaacaatgcagagcaattgtgtcgctaccagggccccgtccttctcatcagaagaaccaaagatgaaattatcactacgaccgtacctgaggatatcatgagcaatcgggggaacgatctgttgctgaaacttctgcaacatcgctaccctcgtgtcatggcagaggaggggctaagggtggtgagacagtggctggaggccagctctcagttggaagaggcttctatctattcacgttgggaagtagaggaagactggtgtctgagtgtgcttcgcagctaccaggcagagcatggacctgattttccatggagcgttggagaggatatgtcagctgatggcagaagacaactcgcactgtttctcgctcgaaagcatctgcacaacttcgaggccacccattgcacccccctgcccgcccaaaatttccagatgccctggcatctgtag

SEQ ID NO: 207993 - DNA, 1677 bp, Artificial Sequence
  derived and/or modified sequence
atggccaagctgctgagctgcgtgctgggcccccggctgtacaagatatacagagagcgggactccgaacgtgccccagcgtcagtacccgagacacccactgcagtgacagctccgcactcgtctagttgggacacctactaccaaccgagggcgttagagaaacatgcagatagcatcctcgcgttggccagtgtgttttggtcgatttcttattacagcagtccgttcgccttcttctacttatacagaaaaggatacctgtccctttcaaaagtagtgccgttctcgcactatgccggaactctgctgctgttgctggctggtgttgcgtgtcttcgggggattggccggtggaccaacccacagtaccggcagttcatcaccattctggaagcgactcaccgcaatcagagttcagagaacaagcgtcagctcgccaactacaattttgacttcagatcatggcccgtggacttccattgggaggagcccagttcgagaaaggaatcgcggggcggaccatcccgaaggggcgttgccctgctcagacctgagccacttcacaggggcactgctgatacactactcaatagggttaaaaagctgccttgccaaatcacttcttacctggtggctcacaccctcggacggaggatgctttatcccggttcagtctacttgttgcaaaaggctctgatgcccgtactcctgcaaggccaggctagactcgtcgaggaatgcaatggacggagggccaagctgctcgcctgcgatggcaatgagattgacaccatgttcgttgatcggagaggtacagcagaaccccagggtcagaagctggtcatctgttgcgaggggaacgctgggttttatgaggtagggtgtgttagcactccccttgaagccggctatagcgtgctgggatggaatcatcccggtttcgcaggatcaacgggcgtgcccttcccccagaacgaggccaatgctatggatgtggttgtgcagttcgccattcaccgactggggttccaaccacaagatattattatctacgcttggagcatcgggggttttacagctacctgggccgccatgtcttacccagacgtgtcggcaatgatcttggatgctagcttcgacgatctggtgcctcttgcgctgaaagtgatgccagactcatggagagggctggtgactcggacggtccgtcaacacttaaatctgaacaatgcagagcagctgtgtcgttatcaagggcctgttctcctcatacgtcgaaccaaagatgagatcattactactactgtgccagaagatatcatgtcgaaccggggaaacgatctgctactgaaactcctgcagcatagataccctcgcgttatggccgaggagggcttacgtgtagtcagacagtggctagaggcgtccagccagctcgaagaggctagtatctacagtcgatgggaggtcgaggaagactggtgtctgtcagtactgcgatcttaccaggcagagcatggtccggatttcccctggagcgtaggagaggacatgagcgcagacgggaggcgtcagctggcgttgtttctcgctagaaagcatctccacaattttgaagctacgcactgcacgccacttcccgctcaaaattttcaaatgccttggcatttatag

SEQ ID NO: 207994 - DNA, 1677 bp, Artificial Sequence
  derived and/or modified sequence
atggccaagctgctgagctgcgtgctgggcccccggctgtacaagatctacagggaacgcgattctgagagagctccggcgtccgtccctgagactccgacggctgtgacagccccacatagttcttcatgggatacctactaccagcctagagcactcgaaaaacacgcggattccattcttgccctcgccagtgtgttttggtcaatcagctattactcgagtccattcgcgttcttctatctctaccgaaaaggatatttgtcactgtctaaagtcgtgccattcagtcactacgcagggactctcctactgcttctggcgggcgtcgcctgcctcagaggcattggaagatggaccaatccccaatatcgtcagttcataactatacttgaggcaactcatcggaatcagtctagcgagaataaacgtcagcttgctaactacaattttgacttccgatcctggcccgttgattttcattgggaagagccgtccagccggaaggagagccggggaggaccttcacgccggggggttgcccttcttaggcctgaacctctccaccgtgggactgccgacacactcttgaacagagtgaaaaaactgccttgccaaatcaccagctacctggtagcccataccctgggacggaggatgttatatccagggtcagtctatcttctacagaaagccctgatgcccgttctcctgcaaggacaagcccggctggtggaggagtgcaacggccggagggccaagctcctcgcatgtgacgggaacgaaatcgatactatgttcgtagatagacgtgggactgcggagcctcaagggcagaagcttgtgatatgttgcgaaggaaacgctggtttttacgaggttggatgtgtctcgacaccattggaggcgggatattccgtcctggggtggaaccatccgggtttcgcagggtccactggggtgccattccctcaaaacgaggcaaacgccatggatgttgtggtccaattcgctattcacagattgggttttcaaccacaggatattattatctacgcatggtctattggtggctttaccgccacatgggctgccatgagctatcctgacgtatcagccatgatcttggacgcttcctttgacgatctggtccccctcgcacttaaagtaatgccagattcttggcgcggtctggtaacacgaaccgtgcgccaacacctgaacctgaataatgccgagcagctctgtcggtaccagggtcctgtcctgctgattagacgcaccaaagacgaaataattactacaactgttccagaagatatcatgagtaataggggcaatgacttactcctaaagttgctacagcatcgctatccacgggtcatggccgaggaggggctgcgtgtggtgaggcagtggctggaagcatcttcacagctagaagaagcaagcatctactccagatgggaagtggaagaggactggtgtctgagtgtgctgagatcctatcaggcagagcatggccctgattttccatggagcgtaggagaggacatgtcagcagatgggaggcgccagttagccttattcctggctaggaagcacttgcacaacttcgaggcaactcattgcacccctctgcccgctcagaatttccaaatgccttggcatctgtag

SEQ ID NO: 207995 - DNA, 1677 bp, Artificial Sequence
  derived and/or modified sequence
atggctaaactgctgtcatgcgtgctgggccctcggctgtataagatctaccgcgaaagagatagtgaacgggctcctgcaagtgtacctgagactcccaccgctgtcacggccccacacagttctagctgggatacgtattaccagccacgtgcgcttgagaaacatgccgattcgattctggcgctcgcaagcgtgttttggtccattagttactactcttccccattcgccttcttttacctgtacaggaaaggctacctttctctgtctaaagtcgttcccttttcgcattatgcaggcaccctgttactcctcctggccggtgtggcttgtctgcgaggcatagggaggtggacaaacccgcagtacaggcagtttatcaccatccttgaggctactcacagaaatcagagctctgagaacaaacggcagttagccaattataattttgacttccgaagctggcccgtggatttccattgggaagagccttcttctagaaaggaatctcggggtggcccaagtcgtcgtggagtcgcacttctcagaccagaaccattgcacaggggaacagccgataccctgctgaatcgagtgaagaagctcccatgccagatcactagttatctcgtagcacataccctcgggagacggatgttgtacccaggcagcgtttacctgctccaaaaagctctgatgccggtcttgctgcaggggcaggcaagactcgtggaagagtgtaatggcaggcgagctaaacttctggcttgcgatggcaatgagatcgacacaatgtttgtagaccggagggggactgcagaaccccaaggacaaaaactcgtcatttgttgcgaaggaaatgccggattctatgaggtcgggtgcgtaagtacgccactcgaagccggttacagcgtgcttggctggaatcacccgggtttcgccggttctacaggggtaccgtttccgcaaaacgaagctaacgctatggacgtagttgtgcagttcgcgatccacaggctgggttttcagccccaggatattatcatctatgcctggtccattgggggtttcacagcaacgtgggctgcaatgtcctatcctgatgtgagcgccatgatactggatgcctcctttgatgacctggtgccacttgctctcaaagtgatgcccgactcgtggagaggactcgtgacccgaaccgttcgacagcacctgaatcttaacaacgctgaacagctctgccgctaccaaggacctgttctgctcattagacggaccaaggacgagattatcactacaaccgtgccagaggatatcatgtccaatagaggcaatgatctgctgctcaaattgctgcagcaccggtaccccagagtgatggccgaggagggactgcgggttgtgagacagtggctcgaggcatcctctcaactggaagaggcttcaatctattctcgctgggaggttgaggaggactggtgcctcagcgtgctccgatcctatcaggcagagcatggtcctgattttccttggtctgtgggcgaggatatgtccgccgatgggcgtaggcagcttgctctgtttctggcgcgaaaacatttacacaacttcgaagccacgcattgtacgcccttgcctgcccagaacttccagatgccttggcatctgtag

SEQ ID NO: 207996 - DNA, 1806 bp, Artificial Sequence
  derived and/or modified sequence
atgagtcagcttgctcgcaggaggtcccgctatggattgacgagcagggcgcacaatacctccgaggctgggagagcaggccctgccggtggccctgcagcgggacgcgcagctgcgcgtgcaggagctatggcaaagctgcttagctgcgttctaggtccaaggctctacaagatctatagagagagggactcagaaagagctcctgcttccgttccagagacaccaaccgctgtcactgcacctcattcctcctcatgggatacatactatcagccccgagccttagaaaaacatgctgactctatcttagccctagcgagcgtcttctggtctatttcttactattcttctccatttgcatttttctacttgtaccgcaagggctatctctctctgtccaaagtcgttcctttctcgcactacgccggaacattactcttactccttgctggggtcgcctgtctccggggaattggaaggtggactaacccacagtaccggcagttcattactattctggaagcaacgcaccgcaaccagtcatctgaaaataagaggcagcttgccaactataacttcgactttagatcgtggcctgttgattttcattgggaggagcctagttctaggaaggagtccagagggggaccttcaagacgcggagtggccttactacgaccagaaccactgcaccgaggcaccgccgatacgctcctcaaccgggtgaagaaactcccctgccagataactagctacctcgtggctcacacactgggaagacgcatgttgtacccgggatccgtgtatctcttgcagaaagcactcatgcctgtgctacttcaagggcaggcacggctagtggaggagtgtaatggacgcagagctaaactgctcgcctgtgacggtaatgaaattgacactatgttcgtggacaggcgaggcactgctgaacctcagggacagaagttagtgatatgttgtgaggggaacgctggcttctatgaggtggggtgtgtgtctacaccactggaggctggctactccgttctgggctggaatcatccgggatttgcaggatctacaggtgtgccctttcctcagaatgaagcgaacgcgatggatgttgttgttcagtttgcaatccatcgactcggcttccagccccaggacattatcatttacgcgtggagcataggcggattcactgccacctgggccgctatgtcctaccctgatgtatccgctatgatcttggacgcgagctttgacgacctggtgccgctggctttgaaagtcatgcccgactcatggcgcggactggtgactaggacagtgcgtcagcatttaaacctgaacaacgctgagcaactgtgcaggtaccaggggccagtgctgctcatcaggcgcaccaaagatgagattattacgacaacagtgcctgaagacatcatgtcaaaccgcggaaacgacttgctgctgaagttactgcaacaccgatatcctagggtgatggctgaagaaggcctaagagtggtgcgccaatggctggaagcgagttcacagctggaggaagctagtatctattccagatgggaggtggaggaagattggtgtttaagcgtgctgagaagttatcaagcggagcacggtccagacttcccttggtcggtaggggaagacatgagtgccgacggcaggcggcaactggcattgttcctcgcgagaaagcacctccacaatttcgaagctacgcactgtacacccctgccagctcagaatttccaaatgccatggcacctctag

SEQ ID NO: 207997 - DNA, 1806 bp, Artificial Sequence
  derived and/or modified sequence
atgagtcagttggccagaagaagatcacgctacggcctgacgagtagagctcacaacactagcgaagcgggacgtgctggtccagccggtggtcccgcagccggtagagccgctgctagagccggagcgatggccaaattgttatcctgtgtgctgggacctcgactttacaaaatttacagggagcgagattccgagcgggctcctgcctcagttcctgaaacacccacagccgtgacagccccacatagctcatcatgggacacctattaccagccgagagctctcgaaaaacacgcagactctattctggcactcgcgagcgtattttggagcatcagttattattcatccccattcgccttcttctacttgtaccggaagggatatctttctctgtcaaaggtcgtgcctttctcacactacgccggtacgctcctgctactgttagccggtgtggcatgcttgagggggatcggtaggtggaccaatccccagtaccgccagtttattacaattcttgaagccactcacagaaaccaatcttcagaaaacaagcggcagctcgctaactataattttgatttcagatcctggccagtggatttccattgggaagagcctagttccagaaaagaaagtagagggggtcccagccgaagaggcgtggctctcctgcggcctgagcctctgcatagaggtacagccgacaccttgttgaatagggtcaagaagcttccatgccagataacgtcctacctggttgcccacacactaggacggagaatgctgtaccctggctcagtgtacctgctgcagaaagccttgatgccggttctgctgcaggggcaggcacggctggtcgaagagtgcaatggaaggcgagccaaattgctagcctgcgatggcaatgagatagatactatgttcgtggatagaagagggacagcagaaccccagggacagaaattagtcatttgttgtgaaggtaacgcaggcttttatgaggtgggatgcgtgtccacccccctggaggccggatattccgtcctcggctggaaccaccccggttttgccggaagtactggcgttccctttccccagaacgaggcaaacgcgatggatgtggtggtccagttcgcaatccacagactgggtttccagccacaggacattataatttatgcttggagcatcgggggtttcaccgcgacatgggcggctatgtcttaccctgacgttagtgcgatgattctggatgccagctttgacgatctggtcccccttgccctgaaagtaatgcccgactcctggagaggcctggtgacccggactgtcaggcagcatctaaatcttaacaacgccgagcagctgtgccgataccaggggcctgtgctcctgatccgacgaaccaaggacgagatcatcaccactactgtaccagaggacatcatgagcaaccgaggcaatgatcttctcttgaaactcttgcagcaccgctacccccgagtgatggccgaggagggactcagggtggttaggcaatggttagaggccagctctcagctcgaagaggcatcgatttactctcgttgggaagtggaggaagactggtgcctgagcgtcctgcgctcatatcaagctgagcatgggccagacttcccctggtccgtaggggaagacatgagtgccgacgggaggcgccaattggctctctttctcgctcgtaagcacttacacaatttcgaagccacccactgtactccgctgcctgcccagaatttccagatgccatggcacctatag

SEQ ID NO: 207998 - DNA, 1806 bp, Artificial Sequence
  derived and/or modified sequence
atgtcccagctcgcccgtcgtaggtcaagatacggactgacgagccgggctcacaatacatccgaagccggacgggcaggtcctgccggaggtcccgcagctggtcgtgcagccgctagggcaggggcaatggcaaagctcctgtcctgtgtgttgggccctcgcctatataagatctaccgggaaagagacagcgagagggcgcctgctagcgttccagaaacccccaccgctgtcacagcacctcatagcagctcctgggacacatattaccaacctcgtgcactggagaaacatgcggattccatcctggcgctggcctctgtgttctggagcatctcgtattactcctcaccatttgccttcttctatttatatcggaaaggctacctgagcctgagtaaggtggtgcccttctcccactacgccggaacccttctgttgctgctggccggagtggcatgtttgcgtggcataggcaggtggaccaaccctcagtatagacagttcatcaccatcctcgaagccactcaccgcaaccagtccagcgagaacaagcgtcagcttgcaaattacaacttcgattttaggagttggccagtggacttccattgggaggaaccaagcagcagaaaagagagtagaggaggccctagccggaggggggtggcattacttcggccagaacctttacaccgagggactgcggatacactgctgaatagagtcaagaagcttccgtgccaaattacctcttacctcgtcgcgcacactctcggacgcaggatgctgtacccgggatccgtgtacttattgcaaaaagctctgatgcccgtgttgttgcagggtcaagcgcgtctcgttgaggaatgcaacggccgacgggcaaaattattggcctgtgatggtaacgaaattgacacaatgttcgttgacagacggggtaccgcagagcctcaggggcaaaaactggtgatatgttgtgaagggaatgcagggttttatgaagtgggctgtgtttcgacacctctggaggccggatacagcgtgcttgggtggaaccatcccggatttgcaggcagtacaggggtccccttccctcaaaatgaagcaaatgccatggacgtggtggtacaattcgctattcatcgcctgggcttccaaccacaggatattataatttacgcatggagcattggaggttttacagccacctgggcagcaatgtcttatccagacgtgagtgcgatgatcctcgacgccagctttgacgatttggtgccactcgccctgaaggtgatgccagacagctggcgcggtcttgttacccgcactgtgagacagcacctgaatctaaataatgcggagcaactgtgcaggtatcagggccctgtcttgctcattagaagaaccaaagacgaaatcataacaacaaccgtgccagaggacataatgtccaatcggggaaacgacttgctgctgaaactcttgcaacaccgttacccacgggtgatggctgaagagggcctgcgtgtggtgaggcagtggttggaggcatcctcccagctagaggaagcttctatatactctcgatgggaggttgaagaggactggtgccttagcgtgttaagaagttaccaagccgagcacggtcccgatttcccttggagcgtcggagaggacatgtctgccgacgggagacggcagctggctttgtttctggcccgaaagcatctgcacaacttcgaagccacccactgtacacccttgccggcacaaaacttccagatgccatggcatctgtag

SEQ ID NO: 207999 - DNA, 1806 bp, Artificial Sequence
  derived and/or modified sequence
atgagtcagcttgcacgccgacgatctaggtacgggctcactagcagggcacacaacacaagcgaagcagggagagccggacccgcaggtgggcctgctgctgggcgtgcagccgcaagagctggcgcaatggctaaactgctgtcctgtgtgctcggacctcgcttgtacaagatctacagagagcgagattcggagcgggctcccgcttccgtgcccgagacaccaactgcagtgacagccccacacagcagttcatgggacacttactaccagccaagagcacttgaaaagcacgccgatagcattcttgctctcgcgtccgtcttctggagcatttcttattactcctcacctttcgcatttttttacctgtaccgcaagggttacctttccctgtcaaaggtcgttcctttctcacactatgctggcactctgctcctgttgctggccggtgtggcctgtcttcgcggaattggacgttggacaaacccacagtataggcagttcattacaatcctggaggctacccatcgaaaccaatcttccgaaaacaaaaggcagctcgccaactataatttcgattttcgctcctggccagttgactttcattgggaggagccgtctagccggaaagagagtcgaggaggcccttcccgtcgtggcgtggccttgctgcgacctgaacctctgcatagaggcaccgccgatacactgttgaatcgcgtgaagaagttaccgtgtcagatcaccagctacctcgtagcccataccttggggaggagaatgttgtaccccggttctgtgtatctgctgcagaaggcccttatgcccgtgctgctgcagggccaagctagactggtggaggagtgtaacgggagacgtgcaaaactgctggcttgtgatggaaacgagatcgatacaatgtttgtggacaggagaggcacagccgagcctcaggggcagaaacttgtcatatgttgcgagggtaatgcgggtttttatgaagtgggctgcgtgtccacaccattagaagcagggtatagcgtcctggggtggaatcatccagggtttgctggaagcactggggtaccattcccacagaatgaagcaaatgccatggacgtagtagtccagttcgccattcaccgcctgggatttcagcctcaggacataatcatctacgcatggtctatcggaggcttcacggccacatgggctgctatgtcttatccagacgtgagtgcaatgattctcgacgcatcatttgacgatctggttcctctcgctcttaaagtgatgcccgacagctggcgcggtctggttacacgcaccgtgcgccagcatctgaacctgaataacgccgagcagctgtgtaggtatcaaggcccagtactgctgatccgtcgcaccaaggacgagatcatcaccaccactgtgcccgaggacattatgagtaacaggggcaatgatctgttgctcaagttactccaacatagatacccaagagtcatggcggaggaaggactgcgcgtggtgaggcagtggttagaggcttcctctcagttagaggaagctagcatctactccagatgggaggtggaagaagattggtgcctgagtgtgctccggtcgtaccaggctgaacatggacccgactttccatggagcgtcggagaagatatgagtgctgatgggcgacggcagctggctctgttcctcgcccgaaagcacctgcacaactttgaagccactcactgcaccccactgcctgcacagaatttccaaatgccttggcatctttag

SEQ ID NO: 208000 - DNA, 1677 bp, Artificial Sequence
  derived and/or modified sequence
atggcaaaactgttatcatgtgtcctcggacccagactttacaagatctatagagagcgggattcggagcgcgctccggctagtgtccccgaaacccccaccgcagttacagctccgcacagctctagctgggatacttactatcagccgcgagctcttgaaaagcacgcagattcgatacttgctctggcttctgtgttctggagtatctcatattacagtagtccattcgccttcttttacctatacagaaagggctatctctcgctgtctaaggttgtcccgttttcccattacgccggtacactgttgttgctattggccggtgtggcctgtctcaggggaatcggtcgttggacgaatccacagtaccggcaattcatcacgatactggaggcaacgcaccgcaatcagtcgtctgagaacaagcgccagctagcaaactacaacttcgacttcagatcctggcccgtggactttcactgggaagaacctagcagcagaaaggaatccagagggggaccctctcggaggggagtggcactgctgagaccagaacccttgcataggggtacagccgacacgctcctgaatcgagtgaagaagcttccctgccagataacgtcttacctggtggcacacacattgggcagacgcatgctttaccccggtagcgtctacctcctgcagaaagccctgatgcctgttttgctgcaaggacaagctaggcttgtggaagagtgtaatggtcggcgagctaaactcctagcgtgtgacggcaatgagattgacaccatgttcgtggatagaagagggactgccgagccccaagggcagaaactagtgatttgttgcgaggggaatgccggattttacgaagtggggtgcgtgagtacgccgcttgaggccggatatagcgtcttgggatggaatcatccaggattcgcaggaagtactggtgtccctttccctcagaatgaagccaacgccatggatgtcgtggttcagttcgcaattcatcggttgggctttcaaccacaggacattatcatctatgcctggagcattggcggattcacagcaacatgggccgcaatgtcctatccagacgtttcagcaatgattctggacgcctctttcgatgacttagtgcccctagctctgaaagtcatgccagatagctggagaggcctggttacccgtaccgtccggcaacacttgaaccttaataacgcagagcagctctgccgctaccagggccctgtgttgctcatccgtagaactaaagacgaaattattactactaccgtccctgaggacattatgagtaatagggggaatgatttgctgttgaaactgctacagcatcgctaccccagggtcatggctgaggaaggcttgcgagtcgttaggcagtggctcgaagcgtcctctcaactggaagaggcaagcatttattccagatgggaggtggaagaagattggtgcttaagcgtgctgcgatcctaccaggccgagcacggcccagacttcccttggagcgtgggcgaagatatgagtgcggacggacgacggcagctagctctgttcttggcaaggaagcatctgcacaattttgaagccacacattgcacacctttgcccgcacagaatttccaaatgccttggcacttgtag

SEQ ID NO: 208001 - DNA, 1806 bp, Artificial Sequence
  derived and/or modified sequence
atgagtcaactggcacggagaagatctcgatatggcctgacatcaagagcacataatacaagtgaagccggtcgcgctgggcctgcaggcggacccgcagcaggcagagctgccgctcgagccggtgccatggctaagttgctgtcttgtgtgctgggaccgaggctctataagatctaccgagaaagggattccgagagggcccctgcgtcagtccctgagacacctaccgctgtgaccgcacctcattcctcctcttgggatacttactaccagcctagagcattagagaaacacgctgacagtatattagccttagcgagcgtgttttggtccattagctactatagctcccctttcgccttcttctacctctaccgcaagggatacctgagcttatcaaaagtggtgccattctcccactatgccggtactctgctgctgcttctcgccggtgtggcatgtcttcgagggatcgggagatggactaacccacagtatagacaattcatcactatactggaagccactcatcgcaaccagtcatccgaaaataaaagacagctagccaactacaattttgactttcgcagctggccggtagactttcactgggaggaacccagcagccgaaaggagtctcggggtgggccaagcaggaggggcgttgcactgctcaggccggaaccgttacaccgtgggacggctgatacactgttaaacagggtaaaaaaacttccatgccaaattaccagctatcttgtggcacataccctgggcagaaggatgttatacccagggagcgtatacctgctgcaaaaggccttaatgccagtgttgttacaggggcaagccaggttggttgaagaatgcaacggtcgtcgagccaaactgttggcttgtgacggaaacgagatcgacacaatgttcgtagataggcggggaacagccgagccccaaggtcaaaaactggtgatttgttgtgagggcaacgccggattttacgaggtgggatgtgtgagtacacctttggaggctggttacagtgtcctgggctggaatcatcctggcttcgccggtagcaccggagtgcccttcccccagaatgaggccaatgccatggatgtggttgtccagtttgccattcatcgtctcgggttccaacctcaggatatcatcatttacgcttggtcaattggcggttttaccgctacatgggctgcaatgtcatacccagacgtgtccgctatgatcttagacgctagctttgatgatcttgtgccactggccttgaaggttatgccagactcctggcggggactcgttactcggacggtaagacagcatctgaacttgaacaacgcagaacagctctgcagataccaggggccagttctgctgattcgcagaaccaaggatgaaataataaccacaaccgtgccagaggatatcatgagtaacaggggcaatgatctgctcttgaagttgctgcaacaccgataccccagggttatggcagaggaggggttgcgggttgtgcgacagtggttagaagcctcctctcagctagaagaggcttccatctatagccggtgggaggtagaagaggactggtgcctgtcagtcctgagatcatatcaggccgagcacggccctgacttcccatggtctgtaggcgaagatatgagtgcagatggtcggcgtcagctcgccctgttcctagcgaggaaacatctacacaacttcgaagcgactcattgtacgcccctgcctgctcaaaattttcagatgccctggcatttatag

SEQ ID NO: 208002 - DNA, 1677 bp, Artificial Sequence
  derived and/or modified sequence
atggccaagctgctgagctgtgtcctgggtcccaggctgtacaaaatctatagggaaagggattctgaacgggctccagccagcgtgcccgaaacacccaccgcggtgacagcaccgcatagcagttcatgggacacctattaccagccaagagcattggaaaagcatgctgatagcattctggcactggcgtccgtgttttggagtatctcctattacagctctcccttcgcctttttttatttgtatagaaaggggtatctctcactgagtaaggtagtgcctttctcacactatgccggtacactgctgttactcctggccggagttgcctgccttcggggaatcggtcgttggaccaacccacagtacagacagtttattaccatcttagaggctacacaccgcaatcagagctccgagaacaaacgtcagttagccaactacaacttcgatttccgatcctggccagttgactttcattgggaggaaccgagctcccggaaggaaagccggggaggccctagtcgcagaggagtggctctgctcagacctgagcccttgcatcgcggtacggccgatacccttcttaatcgagttaaaaagctgccatgccagatcacctcctatttagtcgcccacacactagggcgtcgaatgctgtaccccggatccgtgtacctgctgcagaaagctttgatgcctgtactgttacaggggcaagccagattagtggaggaatgcaatggccgtagggctaagctgctcgcctgcgatggaaacgagattgacacgatgttcgttgacagaaggggtaccgcggaaccccagggccagaaactggtgatctgttgcgaaggtaacgcagggttctatgaagtaggatgcgtttctacccccctagaggctggatactctgtcctcggctggaatcacccagggtttgccggttccacaggcgtcccttttccccagaatgaggcaaatgccatggacgtagtggtccagtttgcaatacatcgactggggtttcagcctcaagacattatcatctacgcatggtcgattggcggattcactgctacttgggctgcaatgagctacccagacgtttccgcaatgattctcgatgcctccttcgacgacttagtccccctagctctaaaggtgatgccggattcttggcggggacttgtgactcggaccgtgcgtcagcacctgaatctcaacaatgccgagcagctttgtcgctatcaaggaccagtcctgctgatcaggcgtacaaaagatgagatcattaccactacagtccctgaagatatcatgagtaaccgtgggaacgatctgttgctcaagctcttgcagcacagatatccaagggtgatggctgaggagggccttagagtggtgagacagtggctagaagcgtcaagtcagctcgaggaagcctctatctactctcgctgggaggtggaagaagattggtgtctcagcgttctgcgcagctaccaggctgaacacggacctgatttcccctggtccgtaggagaagacatgtctgctgacggacgcagacaactggcactcttccttgctcggaaacaccttcataacttcgaggcaacacactgcacacctctgcccgcacagaacttccagatgccttggcatctgtag

SEQ ID NO: 208003 - DNA, 1677 bp, Artificial Sequence
  derived and/or modified sequence
atggctaagctgctctcatgtgtcctcggaccacgcctgtacaaaatctacagagaaagggattccgaaagggcccctgctagcgtccccgagacacccacggccgttactgcccctcattcaagctcctgggatacatactaccagccaagggcccttgaaaagcacgctgacagtattctcgctctggccagtgtcttctggtcaatatcatattactcttctcccttcgcatttttttacctctatcgcaaggggtacctgtctctcagcaaggtggtgcccttttctcactacgcaggtaccctgctgctgctgctcgccggtgtggcatgtctgaggggaataggcagatggaccaatccacagtatcgacagttcataacgatacttgaggccacacatcgaaaccagagttctgagaataaacggcagttggctaattataattttgatttcagatcttggccggtggacttccactgggaggaaccgtcctccaggaaagaaagcaggggcggaccctccaggcggggagtggctctcctgaggcctgaaccattgcaccggggtacagccgacactctgctgaacagagtgaaaaagctgccttgtcaaattacatcatatttagtggcacatacattgggcaggaggatgctttatcctgggtctgtttatttgctgcagaaagccctcatgcccgttctccttcagggacaggctcgacttgtggaagagtgtaatggcagaagagccaaactgctcgcttgcgacggtaatgaaattgatacaatgttcgttgaccgtagaggtactgccgagcctcaggggcagaaactcgtgatttgttgcgaaggaaacgcagggttctacgaggtcggttgcgtcagcactccattggaagctggttactcagtcttgggctggaatcaccccggattcgccggttccactggcgtccccttccctcagaacgaagctaacgctatggatgtggtagtccagttcgcaatccaccgactgggatttcagcctcaggatattatcatctatgcttggtcgatcggcggttttaccgccacatgggctgccatgtcgtatcctgacgtgtcagccatgatcttggacgcaagtttcgatgacctcgtgcctctagccttgaaggtgatgccagattcatggcggggattagtgaccaggaccgtccgtcaacatctgaatctcaataacgcagagcagctgtgccggtatcagggtcctgtgctgttaatccgccgaacaaaggacgaaataattaccaccaccgtgcctgaagacatcatgagcaaccgcggtaacgaccttctcctgaagttactccagcacaggtatccaagagtgatggccgaggagggacttcgggttgtccgccaatggctggaagccagctcccaactggaagaggcgagcatttactctcgttgggaggttgaggaggactggtgcctctctgttctcaggtcgtaccaagccgaacacggtccagacttcccctggagtgttggagaggatatgtctgcggatgggagacggcagctggctctgtttttggccagaaagcaccttcacaatttcgaagccactcattgtactcctttacccgcacaaaacttccagatgccttggcatctgtag

SEQ ID NO: 208004 - DNA, 1677 bp, Artificial Sequence
  derived and/or modified sequence
atggcaaaattattgagctgcgttctgggccctaggttatacaaaatttatagagaacgagatagcgaaagggctcccgcttcggtgcccgaaaccccaaccgcagtgacagcgccacactccagtagctgggatacatactatcaacccagggccctagaaaagcacgccgatagtatcttggccctggcgtcagtattttggagcatttcgtattactcctccccctttgcattcttttacctctataggaaaggatacctctcactcagcaaggtcgtgccgttctcgcattacgccggtaccctgctgctgctactggcaggcgtcgcttgcctgcgaggaataggtcgctggaccaaccctcagtaccgccaatttataactattctggaagcaacccaccgtaaccagtcttccgagaacaaacggcagctcgccaattacaacttcgacttccgatcctggcccgtcgacttccattgggaggagcctagctccagaaaagagagccgaggcggaccctcacgccgtggagtcgctctcctgaggcctgagcctctgcataggggaacagctgacaccctcctgaatagagttaaaaaactcccctgtcagatcacctcatatctcgtggcacacactctgggtagacgcatgctgtaccctgggtctgtgtacctgctccagaaggccctgatgcccgtgctgctccagggacaggccagattagtggaggagtgcaatggcaggagagcaaagctattagcttgcgacggtaacgagatagacacgatgttcgttgaccgccgtggcactgcagagcctcagggtcaaaaactggtcatctgctgtgaggggaatgccggattttacgaagtgggttgtgtgagtaccccactggaggcaggctacagcgttttgggatggaatcaccccggtttcgctgggtctaccggggtccctttcccccagaatgaagctaatgctatggatgtggttgtgcaattcgcaattcacaggctgggcttccagccacaggatatcattatttacgcttggagcattgggggattcaccgcaacatgggctgctatgtcctaccctgacgtttcagctatgatcctcgacgctagctttgacgatctagtacccctggcactaaaggtgatgcctgatagctggaggggtctagtgacgagaacagtgcgtcaacacctaaacctgaataatgctgaacaactttgtcgttaccagggcccagtgctgttgatcagaaggacaaaggacgagattattacaacgactgttcctgaggacatcatgagtaataggggaaacgacctgctcctgaagcttctccaacacagatacccccgagtgatggccgaggagggcttgagagtcgtgcgtcaatggttggaggccagcagccagctcgaggaagcttccatttactccaggtgggaagtggaggaggactggtgcctgtctgttcttcgtagctaccaggctgagcacggccctgacttcccctggtccgtcggggaggacatgagcgccgacgggcgtagacagttggctctatttcttgccagaaagcatctgcacaactttgaagcaacgcactgcacccctctcccagctcagaatttccagatgccgtggcacctttag

SEQ ID NO: 208005 - DNA, 1677 bp, Artificial Sequence
  derived and/or modified sequence
atggcaaaattactgagctgtgtgctcggaccaaggctgtataagatctaccgagagcgggactctgagagggccccagctagcgttcctgaaacgccaacagccgtgactgctccacatagctcttcttgggatacctactaccagccccgagccctagaaaagcacgccgattctattctggctttagcctccgtgttctggagcattagctattatagcagccctttcgctttcttctatctgtacagaaaaggatacctcagcctgtctaaagtagtgccgttttcgcactacgctgggactctacttctgctactggccggagtcgcatgcttaagaggcatcggcaggtggacaaatccacagtataggcagttcatcacaatcctggaggctacccatagaaatcagtccagcgagaacaagcggcagctggccaattataactttgatttccggagttggccagtggacttccactgggaagagccaagcagccgtaaagagagccgtggcggaccttcccggaggggcgttgctctgctcaggccagagccactgcacaggggtaccgccgatacactgctgaatagggtcaagaagctgccctgtcagatcacatcctacctcgtcgctcacaccttggggagacgtatgctgtatcccggttctgtgtacctgttacagaaagcactcatgcctgtgcttctccagggacaggctcgcctcgtggaagaatgcaatggacgcagggccaagcttctcgcctgcgatggaaatgaaatagatacaatgtttgtggatcgccgtggcacagccgaaccacaaggacagaagctagtaatttgttgcgaaggcaacgcaggattttatgaagtcggatgtgtcagcactccccttgaagccggttactctgttctcggctggaatcacccaggctttgccggttctaccggcgttccctttccccagaacgaagccaatgcaatggatgttgtcgttcaatttgccatccatcgtcttggctttcagccacaggacatcatcatttatgcctggtcgattggagggtttacagccacatgggctgctatgagctaccccgacgtgtctgcaatgatccttgatgcttccttcgacgatctcgtgcccctggctctgaaagtgatgcccgacagttggagaggcttagtgactcgcacagtacgccagcacttaaacttgaacaatgccgaacagctgtgccgctaccagggccctgtgctgctgattcgacggacgaaggatgaaatcatcactaccactgtcccagaagacattatgagcaacagaggtaatgatttactgttgaagctgctccagcataggtatccgagggttatggccgaagagggcctgagagtggtcagacaatggctcgaggccagttcccagctggaagaggctagcatatactccaggtgggaggtggaggaggattggtgtctctctgtgctccgctcttaccaggccgaacatggtccagactttccatggtccgtcggggaggatatgtccgcggacggtagacggcaactggcactattcctagcgagaaagcatctgcataactttgaggccacccactgtaccccactcccagctcagaatttccagatgccctggcacctatag

SEQ ID NO: 208006 - DNA, 1677 bp, Artificial Sequence
  derived and/or modified sequence
atggctaaactgctgtcttgtgttctcggacccagactgtacaaaatctacagagaacgagactcagagcgggctccggctagcgtcccggaaaccccgactgcggtgactgcccctcatagttctagttgggacacttactaccagccacgggcattggagaaacacgctgactcaatcctagcgctcgcttctgtgttctggtccatcagctattattctagcccctttgcattcttctacctgtacagaaaaggatacctatccctgagcaaggtggtacccttctcccattatgctggcactctgctgttattgctcgccggagttgcctgcctacgcggaatcggtcggtggactaaccctcagtataggcagttcataacaattctcgaggccacacaccgaaaccagtcgtcagaaaataagcgccagcttgccaattacaactttgacttcaggagctggcctgtcgacttccactgggaggaaccttcctctagaaaggaaagcagggggggaccttcccggagaggggtcgcactgctgcgcccagagcccctccacaggggaactgcagatacattgctcaaccgagtgaaaaagctaccctgtcaaattacaagctacctagttgcccatacgcttggcaggagaatgctctaccccggtagtgtgtatttacttcaaaaggctctcatgcctgtactgttacagggacaggcccgactcgtcgaagaatgcaatggtcgcagggccaagctgcttgcatgcgatgggaatgaaatcgatacaatgttcgtggatcggagagggactgccgaaccccagggccaaaaactcgtcatttgctgtgagggtaacgccggattttatgaggttgggtgcgtgtctacaccactggaagccggatactctgtcctaggatggaaccacccaggatttgcaggctctacaggggtcccgtttccacagaatgaagcaaatgctatggatgtggttgtgcaattcgccatacacagactggggttccagccccaagacataattatttacgcctggtctattggaggatttacagccacatgggccgcaatgtcatatcctgacgtttctgcaatgatcctagatgcctcttttgatgacctggtgccgctggctctgaaggtcatgcccgacagctggaggggcttggttacacggaccgtcagacagcacctaaacctcaataatgctgaacagctgtgcagataccaggggcctgttctccttatacggaggacaaaagacgagattatcactacgacagtgccggaggacattatgtctaatcggggtaacgacttgctgctaaagttgctgcagcatcgctacccacgggttatggccgaggaagggctgcgcgttgtccggcaatggcttgaggccagctcacaactcgaagaagccagcatttactctagatgggaagttgaagaggactggtgcctcagtgtactgaggtcttatcaggccgagcacggccctgacttcccatggtcagttggcgaggatatgtccgcagacggccgtaggcaactcgcgctttttctggctagaaaacacctccacaattttgaggccactcattgtacacccctgccagcccagaatttccagatgccctggcacttatag

SEQ ID NO: 208007 - DNA, 2260 bp, Artificial Sequence
  derived and/or modified sequence
cataatgggaaataaggggagcctgcttgtcaagccagttatccgcaaaatctgcgctctgtgtgcttcctgagttaaagtcacgcctacggactggccgcctcctttctttttcgctctttaccgctttctcattccgactgccactctttgttctttcctctccgcgtccccccgaccctgtgtgtcgtggttcgtgccggtcccagttgagtcttgagtcccgggaagagaccctgcgcggactggggagccgttgaattttgctgtcagactcccagtttcctcttcttcagtgcctcttcatgcctcccccggctctgtttttatcttccctttaccctcgccttgaatttcagaatgacttttacagatcctgtatccgtcggtcctcccctcaacccccgcccaacctagcctggagacccgagtcattgtattctggagagctggcgggtggtggatacgtactatcagccccgtgccctggagaaacatgctgacagcatcctggcactggcttcagtattctggtccatctcttattactcctctcccttcgccttcttctacttgtacaggaaaggttacttgagtttgtccaaagtggtgccgttttctcactatgctgggacattgctgctacttctggcaggtgtggcctgcctccgaggcattggccgctggaccaacccccagtaccggcagttcatcaccatcttggaagcaacacatcggaaccagtcttcagaaaacaagaggcagcttgccaactacaactttgacttccggagctggccagtcgacttccactgggaagaacccagcagccggaaggagtctcgagggggcccttcccgccggggtgtggccctgcttcgcccagagcccctgcaccgggggacagcagacaccctcctcaaccgggttaagaagctgccttgtcagatcaccagctacctggtggcgcacaccctagggcgccggatgctgtatccaggctctgtgtacctgctgcagaaggccctcatgcctgtgctgctgcagggccaggcccgactggtggaagagtgtaatgggcgccgggcaaagctgctggcctgtgatggcaatgagattgacaccatgtttgtggaccggcgggggacagctgagccccagggacagaagctggtgatctgctgtgaggggaatgctgggttttatgaggtgggctgcgtctccacgcccctggaagctggatattcagtcctgggctggaatcatccaggctttgctggaagcacgggggtgccattcccgcagaatgaggctaatgccatggatgtggtggtccagtttgccatccaccgcctaggcttccagccccaggacatcatcatctacgcctggtccatcggcggcttcactgccacgtgggcagccatgtcctacccagatgttagtgccatgatcctggatgcctcctttgatgacctggtgcccttggccttgaaggtcatgccagacagctggaggggcctggtgaccaggaccgtgaggcagcatctcaatctaaacaacgcggagcagctgtgcagataccagggtcctgtactgctgatccggagaaccaaggatgagatcatcaccaccacggttcctgaggacatcatgtccaaccgaggcaatgacctcctgctgaagctcctgcagcatcggtatccccgggtgatggcagaggagggtcttcgagtggtgaggcagtggttggaggcctcctcacagctggaggaagcctcaatttatagccgatgggaggtggaagaggactggtgtctgtctgtcctccgctcctaccaggcagaacacgggcccgacttcccctggagcgtgggggaggacatgagtgcagatggacggcggcagctggctttgtttctggctcggaagcatctgcacaactttgaggccactcactgcaccccactcccagcccagaacttccagatgccctggcacctctagggaccaactgggactcattatggaagaatggggtgagaggagacatgaggaaagaccctcttatttgtgattctctgtgttcatgttgctgtttatagtttgtggaaagtgggggaccatcccccttctcaccactgttcctcttgcacgtttcccctcattcatgtggctgtacttaaccttctccaacatacatcctgcattacatgaatggattattcctaataattaataaaaaggtattttttctact

SEQ ID NO: 208008 - DNA, 2103 bp, Artificial Sequence
  derived and/or modified sequence
aactgcgcgaaactcttctcaggaagcactgaaaatgtcgcaactcgcccggaggcggagccggtacgggctgacgtcaagggcacacaacacctcagaggcagggagggcggggccggcagggggacctgctgctggaagagcagcggcccgagccggggccatggcgaagctgctgagctgcgtcctaggcccccggctctacaaaatctaccgggagagggactctgaaagggccccggccagcgtccctgagacgccaacggcagtcactgccccccattccagctcctgggatacgtactatcagccccgtgccctggagaaacatgctgacagcatcctggcactggcttcagtattctggtccatctcttattactcctctcccttcgccttcttctacttgtacaggaaaggttacttgagtttgtccaaagtggtgccgttttctcactatgctgggacattgctgctacttctggcaggtgtggcctgcctccgaggcattggccgctggaccaacccccagtaccggcagttcatcaccatcttggaagcaacacatcggaaccagtcttcagaaaacaagaggcagcttgccaactacaactttgacttccggagctggccagtcgacttccactgggaagaacccagcagccggaaggagtctcgagggggcccttcccgccggggtgtggccctgcttcgcccagagcccctgcaccgggggacagcagacaccctcctcaaccgggttaagaagctgccttgtcagatcaccagctacctggtggcgcacaccctagggcgccggatgctgtatccaggctctgtgtacctgctgcagaaggccctcatgcctgtgctgctgcagggccaggcccgactggtggaagagtgtaatgggcgccgggcaaagctgctggcctgtgatggcaatgagattgacaccatgtttgtggaccggcgggggacagctgagccccagggacagaagctggtgatctgctgtgaggggaatgctgggttttatgaggtgggctgcgtctccacgcccctggaagctggatattcagtcctgggctggaatcatccaggctttgctggaagcacgggggtgccattcccgcagaatgaggctaatgccatggatgtggtggtccagtttgccatccaccgcctaggcttccagccccaggacatcatcatctacgcctggtccatcggcggcttcactgccacgtgggcagccatgtcctacccagatgttagtgccatgatcctggatgcctcctttgatgacctggtgcccttggccttgaaggtcatgccagacagctggaggggcctggtgaccaggaccgtgaggcagcatctcaatctaaacaacgcggagcagctgtgcagataccagggtcctgtactgctgatccggagaaccaaggatgagatcatcaccaccacggttcctgaggacatcatgtccaaccgaggcaatgacctcctgctgaagctcctgcagcatcggtatccccgggtgatggcagaggagggtcttcgagtggtgaggcagtggttggaggcctcctcacagctggaggaagcctcaatttatagccgatgggaggtggaagaggactggtgtctgtctgtcctccgctcctaccaggcagaacacgggcccgacttcccctggagcgtgggggaggacatgagtgcagatggacggcggcagctggctttgtttctggctcggaagcatctgcacaactttgaggccactcactgcaccccactcccagcccagaacttccagatgccctggcacctctagggaccaactgggactcattatggaagaatggggtgagaggagacatgaggaaagaccctcttatttgtgattctctgtgttcatgttgctgtttatagtttgtggaaagtgggggaccatcccccttctcaccactgttcctcttgcacgtttcccctcattcatgtggctgtacttaaccttctccaacatacatcctgcattacatgaatggattattcctaataattaataaaaaggtattttttctactatcaggctaa

SEQ ID NO: 208009 - DNA, 2069 bp, Artificial Sequence
  derived and/or modified sequence
ctgaaaatgtcgcaactcgcccggaggcggagccggtacgggctgacgtcaagggcacacaacacctcagaggcagggagggcggggccggcagggggacctgctgctggaagagcagcggcccgagccggggccatggcgaagctgctgagctgcgtcctaggcccccggctctacaaaatctaccgggagagggactctgaaagggccccggccagcgtccctgagacgccaacggcagtcactgccccccattccagctcctgggatacgtactatcagccccgtgccctggagaaacatgctgacagcatcctggcactggcttcagtattctggtccatctcttattactcctctcccttcgccttcttctacttgtacaggaaaggttacttgagtttgtccaaagtggtgccgttttctcactatgctgggacattgctgctacttctggcaggtgtggcctgcctccgaggcattggccgctggaccaacccccagtaccggcagttcatcaccatcttggaagcaacacatcggaaccagtcttcagaaaacaagaggcagcttgccaactacaactttgacttccggagctggccagtcgacttccactgggaagaacccagcagccggaaggagtctcgagggggcccttcccgccggggtgtggccctgcttcgcccagagcccctgcaccgggggacagcagacaccctcctcaaccgggttaagaagctgccttgtcagatcaccagctacctggtggcgcacaccctagggcgccggatgctgtatccaggctctgtgtacctgctgcagaaggccctcatgcctgtgctgctgcagggccaggcccgactggtggaagagtgtaatgggcgccgggcaaagctgctggcctgtgatggcaatgagattgacaccatgtttgtggaccggcgggggacagctgagccccagggacagaagctggtgatctgctgtgaggggaatgctgggttttatgaggtgggctgcgtctccacgcccctggaagctggatattcagtcctgggctggaatcatccaggctttgctggaagcacgggggtgccattcccgcagaatgaggctaatgccatggatgtggtggtccagtttgccatccaccgcctgggcttccagccccaggacatcatcatctacgcctggtccatcggcggcttcactgccacgtgggcagccatgtcctacccagatgttagtgccatgatcctggatgcctcctttgatgacctggtgcccttggccttgaaggtcatgccagacagctggaggggcctggtgaccaggaccgtgaggcagcatctcaatctaaacaacgcggagcagctgtgcagataccagggtcctgtactgctgatccggagaaccaaggatgagatcatcaccaccacggttcctgaggacatcatgtccaaccgaggcaatgacctcctgctgaagctcctgcagcatcggtatccccgggtgatggcagaggagggtcttcgagtggtgaggcagtggttggaggcctcctcacagctggaggaagcctcaatttatagccgatgggaggtggaagaggactggtgtctgtctgtcctccgctcctaccaggcagaacacgggcccgacttcccctggagcgtgggggaggacatgagtgcagatggacggcggcagctggctttgtttctggctcggaagcatctgcacaactttgaggccactcactgcaccccactcccagcccagaacttccagatgccctggcacctctagggaccaactgggactcattatggaagaatggggtgagaggagacatgaggaaagaccctcttatttgtgattctctgtgttcatgttgctgtttatagtttgtggaaagtgggggaccatcccccttctcaccactgttcctcttgcacgtttcccctcattcatgtggctgtacttaaccttctccaacatacatcctgcattacatgaatggattattcctaataattaataaaaaggtattttttctactatca

SEQ ID NO: 208010 - DNA, 2069 bp, Artificial Sequence
  derived and/or modified sequence
ctgaaaatgtcgcaactcgcccggaggcggagccggtacgggctgacgtcaagggcacacaacacctcagaggcagggagggcggggccggcagggggacctgctgctggaagagcagcggcccgagccggggccatggcgaagctgctgagctgcgtcctaggcccccggctctacaaaatctaccgggagagggactctgaaagggccccggccagcgtccctgagacgccaacggcagtcactgccccccattccagctcctgggatacgtactatcagccccgtgccctggagaaacatgctgacagcatcctggcactggcttcagtattctggtccatctcttattactcctctcccttcgccttcttctacttgtacaggaaaggttacttgagtttgtccaaagtggtgccgttttctcactatgctgggacattgctgctacttctggcaggtgtggcctgcctccgaggcattggccgctggaccaacccccagtaccggcagttcatcaccatcttggaagcaacacatcggaaccagtcttcagaaaacaagaggcagcttgccaactacaactttgacttccggagctggccagtcgacttccactgggaagaacccagcagccggaaggagtctcgagggggcccttcccgccggggtgtggccctgcttcgcccagagcccctgcaccgggggacagcagacaccctcctcaaccgggttaagaagctgccttgtcagatcaccagctacctggtggcgcacaccctagggcgccggatgctgtatccaggctctgtgtacctgctgcagaaggccctcatgcctgtgctgctgcagggccaggcccgactggtggaagagtgtaatgggcgccgggcaaagctgctggcctgtgatggcaatgagattgacaccatgtttgtggaccggcgggggacagctgagccccagggacagaagctggtgatctgctgtgaggggaatgctgggttttatgaggtgggctgcgtctccacgcccctggaagctggatattcagtcctgggctggaatcatccaggctttgctggaagcacgggggtgccattcccgcagaatgaggctaatgccatggatgtggtggtccagtttgccatccaccgcctaggcttccagccccaggacatcatcatctacgcctggtccatcggcggcttcactgccacgtgggcagccatgtcctacccagatgttagtgccatgatcctggatgcctcctttgatgacctggtgcccttggccttgaaggtcatgccagacagctggaggggcctggtgaccaggaccgtgaggcagcatctcaatctaaacaacgcggagcagctgtgcagataccagggtcctgtactgctgatccggagaaccaaggatgagatcatcaccaccacggttcctgaggacatcatgtccaaccgaggcaatgacctcctgctgaagctcctgcagcatcggtatccccgggtgatggcagaggagggtcttcgagtggtgaggcagtggttggaggcctcctcacagctggaggaagcctcaatttatagccgatgggaggtggaagaggactggtgtctgtctgtcctccgctcctaccaggcagaacacgggcccgacttcccctggagcgtgggggaggacatgagtgcagatggacggcggcagctggctttgtttctggctcggaagcatctgcacaactttgaggccactcactgcaccccactcccagcccagaacttccagatgccctggcacctctagggaccaactgggactcattatggaagaatggggtgagaggagacatgaggaaagaccctcttatttgtgattctctgtgttcatgttgctgtttatagtttgtggaaagtgggggaccatcccccttctcaccactgttcctcttgcacgtttcccctcattcatgtggctgtacttaaccttctccaacatacatcctgcattacatgaatggattattcctaataattaataaaaaggtattttttctactatca

SEQ ID NO: 208011 - DNA, 2068 bp, Artificial Sequence
  derived and/or modified sequence
ctgaaaatgtcgcaactcgcccggaggcggagccggtacgggctgacgtcaagggcacacaacacctcagaggcagggagggcggggccggcagggggacctgctgctggaagagcagcggcccgagccggggccatggcgaagctgctgagctgcgtcctaggcccccggctctacaaaatctaccgggagagggactctgaaagggccccggccagcgtccctgagacgccaacggcagtcactgccccccattccagctcctgggatacgtactatcagccccgtgccctggagaaacatgctgacagcatcctggcactggcttcagtattctggtccatctcttattactcctctcccttcgccttcttctacttgtacaggaaaggttacttgagtttgtccaaagtggtgccgttttctcactatgctgggacattgctgctacttctggcaggtgtggcctgcctccgaggcattggccgctggaccaacccccagtaccggcagttcatcaccatcttggaagcaacacatcggaaccagtcttcagaaaacaagaggcagcttgccaactacaactttgacttccggagctggccagtcgacttccactgggaagaacccagcagccggaaggagtctcgagggggcccttcccgccggggtgtggccctgcttcgcccagagcccctgcaccgggggacagcagacaccctcctcaaccgggttaagaagctgccttgtcagatcaccagctacctggtggcgcacaccctagggcgccggatgctgtatccaggctctgtgtacctgctgcagaaggccctcatgcctgtgctgctgcagggccaggcccgactggtggaagagtgtaatgggcgccgggcaaagctgctggcctgtgatggcaatgagattgacaccatgtttgtggaccggcgggggacagctgagccccagggacagaagctggtgatctgctgtgaggggaatgctgggttttatgaggtgggctgcgtctccacgcccctggaagctggatattcagtcctgggctggaatcatccaggctttgctggaagcacgggggtgccattcccgcagaatgaggctaatgccatggatgtggtggtccagtttgccatccaccgcctgggcttccagccccaggacatcatcatctacgcctggtccatcggcggcttcactgccacgtgggcagccatgtcctacccagatgttagtgccatgatcctggatgcctcctttgatgacctggtgcccttggccttgaaggtcatgccagacagctggaggggcctggtgaccaggaccgtgaggcagcatctcaatctaaacaacgcggagcagctgtgcagataccagggtcctgtactgctgatccggagaaccaaggatgagatcatcaccaccacggttcctgaggacatcatgtccaaccgaggcaatgacctcctgctgaagctcctgcagcatcggtatccccgggtgatggcagaggagggtcttcgagtggtgaggcagtggttggaggcctcctcacagctggaggaagcctcaatttatagccgatgggaggtggaagaggactggtgtctgtctgtcctccgctcctaccaggcagaacacgggcctgacttcccctggagcgtgggggaggacatgagtgcagatggacggcggcagctggctttgtttctggctcggaagcatctgcacaactttgaggccactcactgcaccccactcccagcccagaacttccagatgccctggcacctctagggaccaactgggactcattatggaagaatggggtgagaggagacatgaggaaagaccctcttatttgtgattctctgtgttcatgttgctgtttatagtttgtggaaagtgggggaccatcccccttctcaccactgttcctcttgcacgtttcccctcattcatgtggctgtacttaaccttctccaacatacatcctgcattacatgaatggattattcctaataattaataaaaaggtattttttctactatc

SEQ ID NO: 208012 - DNA, 864 bp, Artificial Sequence
  derived and/or modified sequence
gctggaagagcagcggcccgagccggggccatggcgaagctgctgagctgcgtcctaggcccccggctctacaaaatctaccgggagagggactctgaaagggccccggccagcgtccctgagacgccaacggcagtcactgccccccattccagctcctgggatacgtactatcagccccgtgccctggagaaacatgctgacagcatcctggcactggttacttgagtttgtccaaagtggtgccgttttctcactatgctgggacattgctgctacttctggcaggtgtggcctgcctccgaggcattggccgctggaccaacccccagtaccggcagttcatcaccatcttggaagcaacacatcggaaccagtcttcagaaaacaagaggcagcttgccaactacaactttgacttccggagctggccagtcgacttccactgggaagaacccagcagccggaaggagtctcgagggggcccttcccgccggggtgtggccctgcttcgcccagagcccctgcaccgggggacagcagacaccctcctcaaccgggttaagaagctgccttgtcagatcaccaggtgggaaacagcagcgaggagaggcccactggggtggaggggccatttcaggagtgctctgggagtgggcgctccattgtaaaatagctgtcactcattgggcctagtgctgtatggtttgtgtagatcatttatggcaaagtcatttttatccatatttatgtttgaagaaaagaggctcagagaggtctggagtctcaaatgtagtaagtaaagaactgggatatgaacaaaagctccttcagtgaggctgaaaaggagcagtgggggtgggg

SEQ ID NO: 208013 - DNA, 2019 bp, Artificial Sequence
  derived and/or modified sequence
acacaacacctcagaggcagggagggcggggccggcagggggacctgctgctggaagagcagcggcccgagccggggccatggcgaagctgctgagctgcgtcctaggcccccggctctacaaaatctaccgggagagggactctgaaagggccccggccagcgtccctgagacgccaacggcagtcactgccccccattccagctcctgggatacgtactatcagccccgtgccctggagaaacatgctgacagcatcctggcactggcttcagtattctggtccatctcttattactcctctcccttcgccttcttctacttgtacaggaaaggttacttgagtttgtccaaagtggtgccgttttctcactatgctgggacattgctgctacttctggcaggtgtggcctgcctccgaggcattggccgctggaccaacccccagtaccggcagttcatcaccatcttggaagcaacacatcggaaccagtcttcagaaaacaagaggcagcttgccaactacaactttgacttccggagctggccagtcgacttccactgggaagaacccagcagccggaaggagtctcgagggggcccttcccgccggggtgtggccctgcttcgcccagagcccctgcaccgggggacagcagacaccctcctcaaccgggttaagaagctgccttgtcagatcaccagctacctggtggcgcacaccctagggcgccggatgctgtatccaggctctgtgtacctgctgcagaaggccctcatgcctgtgctgctgcagggccaggcccgactggtggaagagtgtaatgggcgccgggcaaagctgctggcctgtgatggcaatgagattgacaccatgtttgtggaccggcgggggacagctgagccccagggacagaagctggtgatctgctgtgaggggaatgctgggttttatgaggtgggctgcgtctccacgcccctggaagctggatattcagtcctgggctggaatcatccaggctttgctggaagcacgggggtgccattcccgcagaatgaggctaatgccatggatgtggtggtccagtttgccatccaccgcctaggcttccagccccaggacatcatcatctacgcctggtccatcggcggcttcactgccacgtgggcagccatgtcctacccagatgttagtgccatgatcctggatgcctcctttgatgacctggtgcccttggccttgaaggtcatgccagacagctggaggggcctggtgaccaggaccgtgaggcagcatctcaatctaaacaacgcggagcagctgtgcagataccagggtcctgtactgctgatccggagaaccaaggatgagatcatcaccaccacggttcctgaggacatcatgtccaaccgaggcaatgacctcctgctgaagctcctgcagcatcggtatccccgggtgatggcagaggagggtcttcgagtggtgaggcagtggttggaggcctcctcacagctggaggaagcctcaatttatagccgatgggaggtggaagaggactggtgtctgtctgtcctccgctcctaccaggcagaacacgggcccgacttcccctggagcgtgggggaggacatgagtgcagatggacggcggcagctggctttgtttctggctcggaagcatctgcacaactttgaggccactcactgcaccccactcccagcccagaacttccagatgccctggcacctctagggaccaactgggactcattatggaagaatggggtgagaggagacatgaggaaagaccctcttatttgtgattctctgtgttcatgttgctgtttatagtttgtggaaagtgggggaccatcccccttctcaccactgttcctcttgcacgtttcccctcattcatgtggctgtacttaaccttctccaacatacatcctgcattacatgaatggattattcctaataattaataaaaaggtattttttctactatcaggctaa

SEQ ID NO: 208014 - DNA, 2019 bp, Artificial Sequence
  derived and/or modified sequence
acacaacacctcagaggcagggagggcggggccggcagggggacctgctgctggaagagcagcggcccgagccggggccatggcgaagctgctgagctgcgtcctaggcccccggctctacaaaatctaccgggagagggactctgaaagggccccggccagcgtccctgagacgccaacggcagtcactgccccccattccagctcctgggatacgtactatcagccccgtgccctggagaaacatgctgacagcatcctggcactggcttcagtattctggtccatctcttattactcctctcccttcgccttcttctacttgtacaggaaaggttacttgagtttgtccaaagtggtgccgttttctcactatgctgggacattgctgctacttctggcaggtgtggcctgcctccgaggcattggccgctggaccaacccccagtaccggcagttcatcaccatcttggaagcaacacatcggaaccagtcttcagaaaacaagaggcagcttgccaactacaactttgacttccggagctggccagtcgacttccactgggaagaacccagcagccggaaggagtctcgagggggcccttcccgccggggtgtggccctgcttcgcccagagcccctgcaccgggggacagcagacaccctcctcaaccgggttaagaagctgccttgtcagatcaccagctacctggtggcgcacaccctagggcgccggatgctgtatccaggctctgtgtacctgctgcagaaggccctcatgcctgtgctgctgcagggccaggcccgactggtggaagagtgtaatgggcgccgggcaaagctgctggcctgtgatggcaatgagattgacaccatgtttgtggaccggcgggggacagctgagccccagggacagaagctggtgatctgctgtgaggggaatgctgggttttatgaggtgggctgcgtctccacgcccctggaagctggatattcagtcctgggctggaatcatccaggctttgctggaagcacgggggtgccattcccgcagaatgaggctaatgccatggatgtggtggtccagtttgccatccaccgcctgggcttccagccccaggacatcatcatctacgcctggtccatcggcggcttcactgccacgtgggcagccatgtcctacccagatgttagtgccatgatcctggatgcctcctttgatgacctggtgcccttggccttgaaggtcatgccagacagctggaggggcctggtgaccaggaccgtgaggcagcatctcaatctaaacaacgcggagcagctgtgcagataccagggtcctgtactgctgatccggagaaccaaggatgagatcatcaccaccacggttcctgaggacatcatgtccaaccgaggcaatgacctcctgctgaagctcctgcagcatcggtatccccgggtgatggcagaggagggtcttcgagtggtgaggcagtggttggaggcctcctcacagctggaggaagcctcaatttatagccgatgggaggtggaagaggactggtgtctgtctgtcctccgctcctaccaggcagaacacgggcccgacttcccctggagcgtgggggaggacatgagtgcagatggacggcggcagctggctttgtttctggctcggaagcatctgcacaactttgaggccactcactgcaccccactcccagcccagaacttccagatgccctggcacctctagggaccaactgggactcattatggaagaatggggtgagaggagacatgaggaaagaccctcttatttgtgattctctgtgttcatgttgctgtttatagtttgtggaaagtgggggaccatcccccttctcaccactgttcctcttgcacgtttcccctcattcatgtggctgtacttaaccttctccaacatacatcctgcattacatgaatggattattcctaataattaataaaaaggtattttttctactatcaggctaa

SEQ ID NO: 208015 - DNA, 2019 bp, Artificial Sequence
  derived and/or modified sequence
acacaacacctcagaggcagggagggcggggccggcagggggacctgctgctggaagagcagcggcccgagccggggccatggcgaagctgctgagctgcgtcctaggcccccggctctacaaaatctaccgggagagggactctgaaagggccccggccagcgtccctgagacgccaacggcagtcactgccccccattccagctcctgggatacgtactatcagccccgtgccctggagaaacatgctgacagcatcctggcactggcttcagtattctggtccatctcttattactcctctcccttcgccttcttctacttgtacaggaaaggttacttgagtttgtccaaagtggtgccgttttctcactatgctgggacattgctgctacttctggcaggtgtggcctgcctccgaggcattggccgctggaccaacccccagtaccggcagttcatcaccatcttggaagcaacacatcggaaccagtcttcagaaaacaagaggcagcttgccaactacaactttgacttccggagctggccagtcgacttccactgggaagaacccagcagccggaaggagtctcgagggggcccttcccgccggggtgtggccctgcttcgcccagagcccctgcaccgggggacagcagacaccctcctcaaccgggttaagaagctgccttgtcagatcaccagctacctggtggcgcacaccctagggcgccggatgctgtatccaggctctgtgtacctgctgcagaaggccctcatgcctgtgctgctgcagggccaggcccgactggtggaagagtgtaatgggcgccgggcaaagctgctggcctgtgatggcaatgagattgacaccatgtttgtggaccggcgggggacagctgagccccagggacagaagctggtgatctgctgtgaggggaatgctgggttttatgaggtgggctgcgtctccacgcccctggaagctggatattcagtcctgggctggaatcatccaggctttgctggaagcacgggggtgccattcccgcagaatgaggctaatgccatggatgtggtggtccagtttgccatccaccgcctgggcttccagccccaggacatcatcatctacgcctggtccatcggcggcttcactgccacgtgggcagccatgtcctacccagatgttagtgccatgatcctggatgcctcctttgatgacctggtgcccttggccttgaaggtcatgccagacagctggaggggcctggtgaccaggaccgtgaggcagcatctcaatctaaacaacgcggagcagctgtgcagataccagggtcctgtactgctgatccggagaaccaaggatgagatcatcaccaccacggttcctgaggacatcatgtccaaccgaggcaatgacctcctgctgaagctcctgcagcatcggtatccccgggtgatggcagaggagggtcttcgagtggtgaggcagtggttggaggcctcctcacagctggaggaagcctcaatttatagccgatgggaggtggaagaggactggtgtctgtctgtcctccgctcctaccaggcagaacacgggcctgacttcccctggagcgtgggggaggacatgagtgcagatggacggcggcagctggctttgtttctggctcggaagcatctgcacaactttgaggccactcactgcaccccactcccagcccagaacttccagatgccctggcacctctagggaccaactgggactcattatggaagaatggggtgagaggagacatgaggaaagaccctcttatttgtgattctctgtgttcatgttgctgtttatagtttgtggaaagtgggggaccatcccccttctcaccactgttcctcttgcacgtttcccctcattcatgtggctgtacttaaccttctccaacatacatcctgcattacatgaatggattattcctaataattaataaaaaggtattttttctactatctggctaa

SEQ ID NO: 208016 - DNA, 1677 bp, Artificial Sequence
  derived and/or modified sequence
atggccaagctgctgagctgcgtgctgggccccagactgtacaagatctacagagagagagacagcgagagagcccccgccagcgtgcccgagacccccaccgccgtgaccgccccccacagcagcagctgggacacctactaccagcccagagccctggagaagcacgccgacagcatcctggccctggccagcgtgttctggagcatcagctactacagcagccccttcgccttcttctacctgtacagaaagggctacctgagcctgagcaaggtggtgcccttcagccactacgccggcaccctgctgctgctgctggccggcgtggcctgcctgagaggcatcggcagatggaccaacccccagtacagacagttcatcaccatcctggaggccacccacagaaaccagagcagcgagaacaagagacagctggccaactacaacttcgacttcagaagctggcccgtggacttccactgggaggagcccagcagcagaaaggagagcagaggcggccccagcagaagaggcgtggccctgctgagacccgagcccctgcacagaggcaccgccgacaccctgctgaacagagtgaagaagctgccctgccagatcaccagctacctggtggcccacaccctgggcagaagaatgctgtaccccggcagcgtgtacctgctgcagaaggccctgatgcccgtgctgctgcagggccaggccagactggtggaggagtgcaacggcagaagagccaagctgctggcctgcgacggcaacgagatcgacaccatgttcgtggacagaagaggcaccgccgagccccagggccagaagctggtgatctgctgcgagggcaacgccggcttctacgaggtgggctgcgtgagcacccccctggaggccggctacagcgtgctgggctggaaccaccccggcttcgccggcagcaccggcgtgcccttcccccagaacgaggccaacgccatggacgtggtggtgcagttcgccatccacagactgggcttccagccccaggacatcatcatctacgcctggagcatcggcggcttcaccgccacctgggccgccatgagctaccccgacgtgagcgccatgatcctggacgccagcttcgacgacctggtgcccctggccctgaaggtgatgcccgacagctggagaggcctggtgaccagaaccgtgagacagcacctgaacctgaacaacgccgagcagctgtgcagataccagggccccgtgctgctgatcagaagaaccaaggacgagatcatcaccaccaccgtgcccgaggacatcatgagcaacagaggcaacgacctgctgctgaagctgctgcagcacagataccccagagtgatggccgaggagggcctgagagtggtgagacagtggctggaggccagcagccagctggaggaggccagcatctacagcagatgggaggtggaggaggactggtgcctgagcgtgctgagaagctaccaggccgagcacggccccgacttcccctggagcgtgggcgaggacatgagcgccgacggcagaagacagctggccctgttcctggccagaaagcacctgcacaacttcgaggccacccactgcacccccctgcccgcccagaacttccagatgccctggcacctgtag

SEQ ID NO: 208017 - DNA, 1806 bp, Artificial Sequence
  derived and/or modified sequence
atgagccagctggccagaagaagaagcagatacggcctgaccagcagagcccacaacaccagcgaggccggcagagccggccccgccggcggccccgccgccggcagagccgccgccagagccggcgccatggccaagctgctgagctgcgtgctgggccccagactgtacaagatctacagagagagagacagcgagagagcccccgccagcgtgcccgagacccccaccgccgtgaccgccccccacagcagcagctgggacacctactaccagcccagagccctggagaagcacgccgacagcatcctggccctggccagcgtgttctggagcatcagctactacagcagccccttcgccttcttctacctgtacagaaagggctacctgagcctgagcaaggtggtgcccttcagccactacgccggcaccctgctgctgctgctggccggcgtggcctgcctgagaggcatcggcagatggaccaacccccagtacagacagttcatcaccatcctggaggccacccacagaaaccagagcagcgagaacaagagacagctggccaactacaacttcgacttcagaagctggcccgtggacttccactgggaggagcccagcagcagaaaggagagcagaggcggccccagcagaagaggcgtggccctgctgagacccgagcccctgcacagaggcaccgccgacaccctgctgaacagagtgaagaagctgccctgccagatcaccagctacctggtggcccacaccctgggcagaagaatgctgtaccccggcagcgtgtacctgctgcagaaggccctgatgcccgtgctgctgcagggccaggccagactggtggaggagtgcaacggcagaagagccaagctgctggcctgcgacggcaacgagatcgacaccatgttcgtggacagaagaggcaccgccgagccccagggccagaagctggtgatctgctgcgagggcaacgccggcttctacgaggtgggctgcgtgagcacccccctggaggccggctacagcgtgctgggctggaaccaccccggcttcgccggcagcaccggcgtgcccttcccccagaacgaggccaacgccatggacgtggtggtgcagttcgccatccacagactgggcttccagccccaggacatcatcatctacgcctggagcatcggcggcttcaccgccacctgggccgccatgagctaccccgacgtgagcgccatgatcctggacgccagcttcgacgacctggtgcccctggccctgaaggtgatgcccgacagctggagaggcctggtgaccagaaccgtgagacagcacctgaacctgaacaacgccgagcagctgtgcagataccagggccccgtgctgctgatcagaagaaccaaggacgagatcatcaccaccaccgtgcccgaggacatcatgagcaacagaggcaacgacctgctgctgaagctgctgcagcacagataccccagagtgatggccgaggagggcctgagagtggtgagacagtggctggaggccagcagccagctggaggaggccagcatctacagcagatgggaggtggaggaggactggtgcctgagcgtgctgagaagctaccaggccgagcacggccccgacttcccctggagcgtgggcgaggacatgagcgccgacggcagaagacagctggccctgttcctggccagaaagcacctgcacaacttcgaggccacccactgcacccccctgcccgcccagaacttccagatgccctggcacctgtag

SEQ ID NO: 208018 - protein, 538 aa, Artificial Sequence
  derived and/or modified sequence
MFFLYTDFFLSLVAVPAAAPVCQPKSATNGQPPAPAPTPTPRLSISSRATVVARMEGTSQGGLQTVMKWKTVVAIFVVVVVYLVTGGLVFRALEQPFESSQKNTIALEKAEFLRDHVCVSPQELETLIQHALDADNAGVSPIGNSSNNSSHWDLGSAFFFAGTVITTIGYGNIAPSTEGGKIFCILYAIFGIPLFGFLLAGIGDQLGTIFGKSIARVEKVFRKKQVSQTKIRVISTILFILAGCIVFVTIPAVIFKYIEGWTALESIYFVVVTLTTVGFGDFVAGGNAGINYREWYKPLVWFWILVGLAYFAAVLSMIGDWLRVLSKKTKEEVGEIKAHAAEWKANVTAEFRETRRRLSVEIHDKLQRAATIRSMERRRLGLDQRAHSLDMLSPEKRSVFAALDTGRFKASSQESINNRPNNLRLKGPEQLNKHGQGASEDNIINKFGSTSRLTKRKNKDLKKTLPEDVQKIYKTFRNYSLDEEKKEEETEKMCNSDNSSTAMLTDCIQQHAELENGMIPTDTKDREPENNSLLEDRN

SEQ ID NO: 208019 - DNA, 1617 bp, Artificial Sequence
  derived and/or modified sequence
atgtttttcctgtatactgatttttttttgtcccttgtggccgttcctgcagcagccccggtatgccagccaaaatcagccactaatgggcagcctcccgctcccgcccctaccccaaccccccgcttgtctatttctagcagggcgacggtggttgccagaatggaaggaaccagccaagggggtctgcagactgtgatgaagtggaagactgtggtagccatttttgtggtcgtggtggtgtatctggtcacgggaggccttgtgttccgtgccctcgaacagccgttcgaatcctcccaaaaaaacaccatagctctagagaaggcagaattcctgagagatcatgtctgtgtttccccacaggaattggagacactgattcagcacgcactggacgccgataatgctggggtcagtcccattggcaacagttccaacaatagttcacactgggacctggggtccgccttcttctttgcggggacagtgatcacaaccatcggttatggaaatatcgccccgtctaccgagggaggcaagattttctgtattctatacgccatatttggtattcccctgtttgggttcctcctggcgggcattggggatcagctaggcacgatcttcggcaagtctatcgcacgagttgagaaggtgtttagaaaaaagcaggtgagccagaccaagattcgcgtgatctccaccattctgtttatcctggcaggctgcatcgtattcgtgactattcccgccgtgatctttaaatatattgaaggctggacagcgctcgagtcaatctacttcgtcgttgtgaccctaaccaccgtgggctttggggacttcgtagcggggggcaatgcaggcatcaattatagggagtggtacaaaccactcgtttggttttggattctagtagggctggcatacttcgcagccgtactatctatgatcggcgactggttgagagtcctgtccaaaaaaacaaaggaggaagttggtgagataaaggcccacgccgccgaatggaaagctaatgttactgctgagtttagagagacacggaggcgcctctcagtcgaaatccacgacaaactgcagcgcgctgccacaatcaggtcaatggaacgcagaaggctggggcttgatcagcgggctcactcgctggacatgttgtctccggagaagcggtcagttttcgcagctctggacaccgggaggttcaaagcttccagtcaagagtcgataaacaataggccgaataacctgcgcctgaagggtccagaacagctgaataaacacggccagggggcatctgaggataatatcataaataaatttgggagcacgagtcgcctcacgaaacggaagaacaaggatttgaagaagacactgcccgaggacgtgcagaagatttacaagaccttccggaattactctctcgatgaagaaaagaaggaagaggagacagagaaaatgtgtaactccgataacagttccaccgccatgttgaccgactgcatccagcagcatgctgagcttgaaaatggcatgatcccaactgatactaaggaccgtgaacccgagaataattcactgctggaggataggaactag

SEQ ID NO: 208020 - DNA, 1617 bp, Artificial Sequence
  derived and/or modified sequence
atgttcttcctgtacacagacttcttcctgagcctggtggccgtgcctgctgctgcccctgtgtgccagcccaagagcgccaccaacggccagcccccagccccagcccccacccccaccccccggctgagcatcagcagccgggccaccgtggtggccaggatggagggcaccagccagggcggcctgcagacagtgatgaagtggaagacagtggtggccatctttgtggtggtggtggtgtacctggtgactggaggcctggtgttccgggccctggagcagccctttgagagcagccagaagaacaccatcgccctggagaaggccgagttcctgcgggaccacgtgtgtgtgagcccccaggagctggagaccctcatccagcacgccctggatgctgacaatgccggcgtgagccccatcggcaacagcagcaacaacagcagccactgggacctgggcagcgccttcttctttgctggcaccgtcatcaccaccatcggctacggcaacatcgcccccagcacagaaggaggcaagatcttctgcatcctgtatgccatcttcggcatccccctgtttggcttcctgctggccggcatcggggaccagctgggcaccatctttgggaagagcatcgcccgggtggagaaggtgttcaggaagaagcaggtgtcccagaccaagatccgggtcatcagcaccatcctcttcatcctggccggctgcatcgtgtttgtgaccatcccagctgtgatcttcaagtacatcgagggctggacagccctggagagcatctactttgtggtggtgaccctgaccaccgtgggctttggagactttgtggccggcggcaatgccggcatcaactaccgggagtggtacaagcccctggtgtggttctggatcctggtgggcctggcctactttgctgctgtgctgtccatgattggagactggctgcgggtgctgagcaagaagaccaaggaggaggtgggggagatcaaggcccacgccgctgagtggaaggccaacgtgacagctgagttccgggagacccggcggcggctgtctgtggagatccatgacaagctgcagagagctgccaccatccgctccatggagcggcggcggctgggcctggaccagagggcccacagcctggacatgctgagccctgagaagaggtctgtgtttgctgccctggacaccggccgcttcaaggccagcagccaggagagcatcaacaaccggcccaacaacctgcggctgaagggccctgagcagctgaacaagcacggccagggcgccagcgaggacaacatcatcaacaagtttggcagcaccagccggctgaccaagaggaagaacaaggacctgaagaagaccctgcctgaagatgtgcagaagatctacaagaccttcaggaactacagcctggatgaggagaagaaggaggaggagacagagaagatgtgcaacagcgacaacagcagcacagccatgctgacagactgcatccagcagcacgccgagctggagaatggcatgatccccacagacaccaaggaccgggagcctgagaacaacagcctgctggaggacagaaattag

SEQ ID NO: 208021 - DNA, 1617 bp, Artificial Sequence
  derived and/or modified sequence
atgttcttcctgtacaccgacttcttcctgagcctggtggccgtgccagccgccgcccccgtgtgccaaccgaagagtgccactaacggacaaccacccgcacctgcacctacccctacaccacgcctgtccattagttccagggctacggtagtagctaggatggagggcacctcccagggaggcctgcagaccgttatgaagtggaaaaccgttgtggcaattttcgtggtggttgtggtctatctcgtgaccgggggcctagtttttcgggctctcgagcagccctttgaaagctctcagaagaacacaatagcgctcgaaaaggccgaattcctgcgggaccatgtgtgcgtgtcccctcaagagctggaaactttgattcaacacgcacttgatgctgataatgcaggggttagtccaatcggcaacagctccaataactctagccattgggacctggggtccgcattcttttttgctggaacagtgataaccacaattggatacggcaatattgctccttcaacagagggggggaagatcttctgtattctttacgccattttcggcatcccattatttgggtttttactcgcagggatcggagaccagctcgggaccatctttggaaagagcatcgccagggttgaaaaggtgttccgcaagaaacaagtgtctcagacgaagatccgggtgatcagtacaatcctttttatcctcgctggttgcatcgtgtttgtcacaattcctgccgtaatcttcaaatacatcgaaggatggacggcattagaaagcatttattttgtcgtggtcactctgacgaccgtggggtttggggacttcgtggccggaggcaacgccggcattaactaccgtgaatggtataagcccctagtctggttctggattctcgtcggacttgcctactttgctgctgtgctgagcatgattggggactggttgcgtgtgctgtccaagaagacaaaggaagaagtaggtgaaatcaaggcgcatgccgcagaatggaaggcaaatgttacagcggagtttcgcgagacccggcgacggctgtctgtagaaattcatgacaaactgcaacgcgcggcaaccattcgaagcatggagagacggagactcggacttgaccagagggcccacagcctggacatgctgagccctgaaaaaaggagcgtgtttgccgcactcgacaccggacggttcaaggcctcctctcaggagagtataaataataggcccaataatctgaggcttaagggccctgagcagctgaacaagcatggccaaggagcaagtgaagacaacattattaataagttcggatccacctcaaggttaactaaaaggaagaacaaggatttgaaaaaaacactacccgaagatgtgcagaaaatctataagacattcagaaactatagcttggacgaggaaaaaaaagaggaagagacagagaaaatgtgcaattcagacaatagctccacagctatgcttaccgactgcatccagcagcatgccgaactggagaacggaatgatacccacagacaccaaggatagggaacctgagaataacagtctgcttgaagaccgcaactag

SEQ ID NO: 208022 - DNA, 4835 bp, Artificial Sequence
  derived and/or modified sequence
gcaggcatcgtctcctccggtctcacagctaccccgggctggagcgtggggagggggtaagggagccagccaactcggggaaacttcgttgccagagatgactggggttttcgggctttcccagccttcccatgccgggccacacggcattcattaaagtggtggggcaactattggtgcgctccagccgggcaggttttgagctgcagagacccgtgcccggtagcagcgctttgccaccgagtgcacccaggacgcagtggccgccagcccgggtctcctgctgggggccggcgagtgcagggagactttgcgccacgatgttttgttttcctgccgcaggaacgctaggcagtctctttccaccagacttaacccgcctgaagcaatagccatggaagttgcggcggcacagagggagacagaaccgcttggagcggcatctttcttggatgttttttctctacacagacttctttctttccttggtggccgttcccgcagcagcaccggtgtgccagcccaagagcgccactaacgggcaacccccggctccggctccgactccaactccgcgcctgtccatttcctcccgagccacagtggtagccaggatggaaggcacctcccaagggggcttgcagaccgtcatgaagtggaagacggtggttgccatctttgtggttgtggtggtctaccttgtcactggcggtcttgtcttccgggcattggagcagccctttgagagcagccagaagaataccatcgccttggagaaggcggaattcctgcgggatcatgtctgtgtgagcccccaggagctggagacgttgatccagcatgctcttgatgctgacaatgcgggagtcagtccaataggaaactcttccaacaacagcagccactgggacctcggcagtgcctttttctttgctggaactgtcattacgaccatagggtatgggaatattgctccgagcactgaaggaggcaaaatcttttgtattttatatgccatctttggaattccactctttggtttcttattggctggaattggagaccaacttggaaccatctttgggaaaagcattgcaagagtggagaaggtctttcgaaaaaagcaagtgagtcagaccaagatccgggtcatctcaaccatcctgttcatcttggccggctgcattgtgtttgtgacgatccctgctgtcatctttaagtacatcgagggctggacggccttggagtccatttactttgtggtggtcactctgaccacggtgggctttggtgattttgtggcagggggaaacgctggcatcaattatcgggagtggtataagcccctagtgtggttttggatccttgttggccttgcctactttgcagctgtcctcagtatgatcggagattggctacgggttctgtccaaaaagacaaaagaagaggtgggtgaaatcaaggcccatgcggcagagtggaaggccaatgtcacggctgagttccgggagacacggcgaaggctcagcgtggagatccacgataagctgcagcgggcggccaccatccgcagcatggagcgccggcggctgggcctggaccagcgggcccactcactggacatgctgtcccccgagaagcgctctgtctttgctgccctggacaccggccgcttcaaggcctcatcccaggagagcatcaacaaccggcccaacaacctgcgcctgaaggggccggagcagctgaacaagcatgggcagggtgcgtccgaggacaacatcatcaacaagttcgggtccacctccagactcaccaagaggaaaaacaaggacctcaaaaagaccttgcccgaggacgttcagaaaatctacaagaccttccggaattactccctggacgaggagaagaaagaggaggagacggaaaagatgtgtaactcagacaactccagcacagccatgctgacggactgtatccagcagcacgctgagttggagaacggaatgatacccacggacaccaaagaccgggagccggagaacaactcattacttgaagacagaaactaaatgtgaaggacattggtcttggactgagcgttgtgtgtgtgtgtgtgtgtgtttttaatattcacactgagacatgtgccttaaacagactttttagtccaaaattacatagcattgaagaatatatttcactgtgccataaacaactgaaagcttgctctgccaaaaggaatcagagaacaagaacttcatttcagatagcaaacgcaggacacaccaagagtgtccgtgcacgtagccggttctggccgtacatgttaagggcatttcagtggcagtgctgtacccctgggcagtgctacctgggcacacacgtagacaagggcagctattccttagaccagcctcctgaaagaaacaggtgtgtctttttagtggagtcgtagtaatatgtgcacacacagaaggggacctgattgggtgggagctggttatgtgtaactagcgttggagttgacattttggcatgtgctctgagcttgaattttgataccaaccattcagtgcatcatacctagtctttctatgctccaaatgaatgtctgtggggacctgagagcacctggaatttgttggaagcagatcagagcacacgtacgaaaaggtgcaattgcttttctcatgacaaaagaaaaaaaataatcacaaacacatcacactgtggatatcaccttaaccaatgacagaagcctgctgagtttggtctttctcacaggggtaggtagtccacatgaactggcgagcagtggtgaaaacatgacatcaactgctgcgtggttaaaggccaatcatgcattttcctcagtgggtgcaatggtgacaataaactgatttggaaatgtccatgtactttggttataacttgttttgataagaggggtagaaataccaaaacaattgccttgcatgatgccagtggcttgctgttctgtctagctgatcctacatttttacaaaagtagacatcctgcatttctgagacacactgaggaggaccatggcatctttccatctcagggctttttgtcccttgggtgtcttagggtagacatagtgataagatccaatctcgctatctccaaacaaaaagaaaatgtaccccttgtacagtaagcttgaaatgtttttattgcttgcagcgtaagtgccattaattccatttaacaatgatacttagaaatatttaaaatatttcattttacttttatgtttgggcattcctttattctgaaaaagtcaccactgctccttgcttgtttctacatctcacatcggttactcactaaaactggaacaccctagactgattgttcccaggcaaacgataagctaacacatcataattatgattggtctgtgaggctagaacatcccgcagaggaaagtcggggaatggctagtcataggttgcatgatgattttaaatgggtttgtatcagaaaggggaaaatacatactcctgtgtatgcctcagtctttatcataattggctggttcacagctagctctttgggccacacgtgaaagcatttggacctggcaacaccaggcagttgctggttatgggtgttctaggctcactgctaccttttacagagttcacgggattttacgtaactaacccgcagtgtggatttaccaaaagatcacagcactagcggagacttccagaaactgtctcatgctttctgacctccagggaaagttgtacccacgacatcctcaaccactggtaccatggaagacctgtccctgcccatttctcaaaaatgcacagctcttccctgcctggagcacatgaagtcccatctccctgtccccagacctttaggctctgttgaagttctggcattgcttatgagacccttcctgtccaaggaaggtctaagtcaactcctccattggactggagatgaggctcactggtgacatcctgtgtcgactcagtaataaatagtcacttgggaggcgatgtttatgcaggtgtggatgttgagttttactatgggaatcattccagcctgacaaaatgtgttttaaggaataggtagataactgggacttcctctgttattctaacaagtcgaagcttcctaattaaactgtccatggatctcacttatttggtttccactctgtgttatctggtacgttctttgtagcagtgtgttaaaattccaggccctacggccaaatctggcagaggcttccctctcatttatccagtgccttctgtgggccaggcacaggattaggcactttatgaacgtcagctcattgaaacttcacgacactatgtgggaagtatttgcaaacccattatatacacaaggacacagaggctcagggaagctatgttatttatccaatggcacacagcaagaaagtggtagagctggtattcaaagtctgaccaaagtctgctttcaacttcactacagtgtctgtgtcatgcatccttgtgattgtgtgtgtttgtgtgtatgtgtgtctttctagcttcatggacacagcttacagatgtggggagcagatatggtggaatctccaccaccaagagggcacaaggtctttgtgtaaacatggctcaaagggttgcccctgcagacacctactgtacatttatttggttttggaaattttgtatgtggcaccctttaaaaaatgccctttgaaagcactcttttgcactttacttgctaactttgtagaaactctgcatacagcaggaataaaatagttcaaagcactaagctgcatactcta

SEQ ID NO: 208023 - DNA, 1617 bp, Artificial Sequence
  derived and/or modified sequence
atgttctttctgtataccgacttctttctttccttagttgccgtccctgctgctgccccagtttgtcagcctaagtccgctacaaatggtcaaccacccgcacctgccccaacccctacaccgaggctttccattagttcacgggctacagtcgtcgctagaatggagggaacaagtcagggaggcctccagactgtgatgaaatggaaaactgttgtcgctatattcgttgtcgtggtggtttatttagtaaccggtggtctcgtctttcgggctttggagcagccgtttgagtcaagtcaaaagaataccatcgcccttgaaaaagcagagtttctgcgagaccacgtgtgcgtgtctccgcaggagctcgagacattgatccagcacgcgttggatgccgataatgccggagtatctccaataggtaattctagcaataattcttcccattgggaccttggatccgcctttttcttcgccggaactgtgattacaactattggctatgggaacatcgcgccttctaccgagggtggcaagatcttctgtattctctacgccatcttcggcattccgttgtttggctttctcttggctggcatcggcgatcaactgggcactatctttggaaaaagtattgcacgtgtggagaaggtatttaggaaaaaacaggtgtcccagactaagataagagtgatctcaaccatcctgtttattctggctggctgtatcgtctttgtgaccattccagcagtgattttcaagtatattgagggatggacagcacttgagtccatttactttgtggtggtcaccctcaccacagtcggcttcggcgatttcgtagccggaggaaatgccggaataaattacagagagtggtataaaccactggtatggttctggatcctagtggggctcgcttatttcgccgctgtgctgtcaatgatcggtgactggttacgggtactgtcaaaaaagacgaaggaggaggtgggcgagatcaaagcccacgctgctgagtggaaggctaacgtaaccgccgagttcagggagactaggaggcgcctgtcagtagagatacatgacaaactgcagcgcgctgccactatcagaagtatggaaaggagacggctcggcctcgatcagagggctcatagcttggacatgttgtccccagaaaagcgcagcgtgttcgcagccttagatacgggacgtttcaaggcttctagtcaggaaagtatcaacaacagacccaataacttgcgcttaaaaggcccagagcagctcaacaaacatggccagggagcaagcgaggacaatatcatcaataagttcgggagtacgagcaggctgaccaagagaaaaaataaggatctgaagaagaccctgcctgaggatgtccagaagatttataaaacctttcggaactattcccttgacgaagagaaaaaggaggaagaaaccgagaaaatgtgtaattccgataattcctccaccgcgatgctgaccgactgtatccagcagcacgctgaactggaaaatggtatgatccccaccgacacaaaggaccgcgaaccggaaaacaatagtctattggaggaccggaactag

SEQ ID NO: 208024 - DNA, 1617 bp, Artificial Sequence
  derived and/or modified sequence
atgttcttcctgtacaccgacttcttcctgagcctggtggccgtgcccgccgccgcccccgtgtgccagcccaagagcgccaccaacggccagccccccgcccccgcccccacccccacccccagactgagcatcagcagcagagccaccgtggtggccagaatggagggcaccagccagggcggcctgcagaccgtgatgaagtggaagaccgtggtggccatcttcgtggtggtggtggtgtacctggtgaccggcggcctggtgttcagagccctggagcagcccttcgagagcagccagaagaacaccatcgccctggagaaggccgagttcctgagagaccacgtgtgcgtgagcccccaggagctggagaccctgatccagcacgccctggacgccgacaacgccggcgtgagccccatcggcaacagcagcaacaacagcagccactgggacctgggcagcgccttcttcttcgccggcaccgtgatcaccaccatcggctacggcaacatcgcccccagcaccgagggcggcaagatcttctgcatcctgtacgccatcttcggcatccccctgttcggcttcctgctggccggcatcggcgaccagctgggcaccatcttcggcaagagcatcgccagagtggagaaggtgttcagaaagaagcaggtgagccagaccaagatcagagtgatcagcaccatcctgttcatcctggccggctgcatcgtgttcgtgaccatccccgccgtgatcttcaagtacatcgagggctggaccgccctggagagcatctacttcgtggtggtgaccctgaccaccgtgggcttcggcgacttcgtggccggcggcaacgccggcatcaactacagagagtggtacaagcccctggtgtggttctggatcctggtgggcctggcctacttcgccgccgtgctgagcatgatcggcgactggctgagagtgctgagcaagaagaccaaggaggaggtgggcgagatcaaggcccacgccgccgagtggaaggccaacgtgaccgccgagttcagagagaccagaagaagactgagcgtggagatccacgacaagctgcagagagccgccaccatcagaagcatggagagaagaagactgggcctggaccagagagcccacagcctggacatgctgagccccgagaagagaagcgtgttcgccgccctggacaccggcagattcaaggccagcagccaggagagcatcaacaacagacccaacaacctgagactgaagggccccgagcagctgaacaagcacggccagggcgccagcgaggacaacatcatcaacaagttcggcagcaccagcagactgaccaagagaaagaacaaggacctgaagaagaccctgcccgaggacgtgcagaagatctacaagaccttcagaaactacagcctggacgaggagaagaaggaggaggagaccgagaagatgtgcaacagcgacaacagcagcaccgccatgctgaccgactgcatccagcagcacgccgagctggagaacggcatgatccccaccgacaccaaggacagagagcccgagaacaacagcctgctggaggacagaaactag

SEQ ID NO: 208025 - protein, 714 aa, Artificial Sequence
  derived and/or modified sequence
MNTLQGPVSFKDVAVDFTQEEWQQLDPDEKITYRDVMLENYSHLVSVGYDTTKPNVIIKLEQGEEPWIMGGEFPCQHSPEAWRVDDLIERIQENEDKHSRQAACINSKTLTEEKENTFSQIYMETSLVPSSIIAHNCVSCGKNLESISQLISSDGSYARTKPDECNECGKTYHGEKMCEFNQNGDTYSHNEENILQKISILEKPFEYNECMEALDNEAVFIAHKRAYIGEKPYEWNDSGPDFIQMSNFNAYQRSQMEMKPFECSECGKSFCKKSKFIIHQRAHTGEKPYECNVCGKSFSQKGTLTVHRRSHLEEKPYKCNECGKTFCQKLHLTQHLRTHSGEKPYECSECGKTFCQKTHLTLHQRNHSGERPYPCNECGKSFSRKSALSDHQRTHTGEKLYKCNECGKSYYRKSTLITHQRTHTGEKPYQCSECGKFFSRVSYLTIHYRSHLEEKPYECNECGKTFNLNSAFIRHRKVHTEEKSHECSECGKFSQLYLTDHHTAHLEEKPYECNECGKTFLVNSAFDGHQPLPKGEKSYECNVCGKLFNELSYYTEHYRSHSEEKPYGCSECGKTFSHNSSLFRHQRVHTGEKPYECYECGKFFSQKSYLTIHHRIHSGEKPYECSKCGKVFSRMSNLTVHYRSHSGEKPYECNECGKVFSQKSYLTVHYRTHSGEKPYECNECGKKFHHRSAFNSHQRIHRRGNMNVLDVENL

SEQ ID NO: 208026 - protein, 243 aa, Artificial Sequence
  derived and/or modified sequence
MNTLQGPVSFKDVAVDFTQEEWQQLDPDEKITYRDVMLENYSHLVSVGYDTTKPNVIIKLEQGEEPWIMGGEFPCQHSPEAWRVDDLIERIQENEDKHSSRPARRPCGPRCCCCCCCSRPPRSPPPKPLPTRMLTPRKAFRTCSKESGLAETESCGQTHTWPRALAVLMGLWWPRDQKAGEEDLRFRERRPGLQATATGSGEHGAFPVHSQGVWASTHWQGTAVCPLQTPPPDAFIRNNKVLS

SEQ ID NO: 208027 - DNA, 6551 bp, Artificial Sequence
  derived and/or modified sequence
ccagtggacgagaatcgcggagcctgcggggctggaggttgagcgcccgggccagcacctaggcgggcgcgggggtgtgcaggccagggttcgcgcgggccgggtggaggcttgagcggggacccccgagcttgagccccggagccggcggcgctggggccagaggggccggacgggaggtggcggaggtggcggcggaggcgaaggggcggcgggacgcgggcctggcccgtgtgtgtcctggcggcctggcccaggctgccgctgtacggtgagcccgagggaggcggatctgggtcccgggaaggacacccgcctggatttgccccttaggcccggcccgggcccctcgggagcagaacaaccttagtgaggtggacaggaggggacctcgcgagcagacgcgcgccagcgacagcagccccgccccggcctctcgggagccgtggggcagaggctgcggagccccagaagggtctaccagccacagtctctgcacgtttccaagagcagcagaaaatgaacacattgcaggggccagtgtcattcaaagatgtggctgtggatttcacccaggaggagtggcagcagctggaccctgatgagaagataacttacagggatgtgatgttggagaactatagccatctagtttctgtgggatatgataccaccaagccaaacgtcatcattaagttggagcagggagaggagccgtggataatgggaggtgaatttccatgtcaacatagtccagaagcctggagagttgatgacctgatagagagaatccaagaaaacgaagacaaacattcaaggcaagctgcttgtatcaatagcaaaaccctgactgaagagaaagagaatacatttagtcaaatttacatggaaacaagccttgttccttcaagcataatagctcataattgtgtctcatgtggaaagaatttagaatctatttcgcaattaattagtagtgatggaagctatgctaggacaaaacctgatgagtgtaatgaatgtgggaaaacatatcatggagagaaaatgtgtgaatttaatcaaaatggggatacctattctcacaatgaagaaaatattcttcagaaaattagtattttggagaaaccctttgaatataatgaatgcatggaagccttagacaatgaggctgtttttattgctcataagagagcttacataggggagaagccctatgagtggaatgattctggaccagacttcatacagatgtcaaattttaatgcatatcagagatcacaaatggaaatgaagccctttgaatgcagtgaatgtggaaaatccttctgtaaaaagtcaaaattcatcatccaccagagggctcacacaggagagaaaccttatgaatgtaatgtatgtgggaaatccttcagccaaaagggaaccctcactgtacatcggagatcacacttagaggagaagccctataaatgtaatgaatgtgggaaaaccttttgtcagaagttacacctcactcaacacctaagaactcattcaggagagaaaccctacgaatgtagcgaatgtgggaaaaccttctgccaaaagacacatctcaccctgcaccagaggaatcattcaggagagaggccctatccatgtaacgaatgtgggaaatccttctcccgcaagtctgctctcagtgaccatcagagaactcacacgggagagaagctttataaatgtaatgaatgtgggaaatcctactaccgaaagtctactctgattacacatcagagaacacacacgggagagaagccctatcagtgtagcgagtgtgggaaattcttttctcgggtgtcatacctcactatacattatagaagtcatttagaagagaaaccctatgaatgtaatgaatgtggcaaaaccttcaatttaaattcagccttcattagacatcggaaagtacacacagaagagaaatcccatgaatgtagtgaatgtggaaagttctctcagttgtatctcaccgaccatcatacagctcatttagaagagaaaccctatgaatgtaatgaatgtgggaaaaccttccttgtaaattcagccttcgatgggcaccagccacttccaaaaggggagaaatcctatgaatgtaatgtatgtggaaagttattcaatgagttgtcatactatactgaacattatagaagtcattcagaagagaaaccttatggatgtagcgaatgtgggaaaaccttttcccataattcatccctcttcagacatcaaagagtacacacaggcgagaaaccctatgaatgttacgaatgtggaaaattcttctctcagaaatcatatctcactatacatcatcgaattcattcaggagagaaaccctatgaatgtagtaaatgtggaaaagtcttctctcggatgtcaaacctcactgtccactacagaagccattcaggagagaaaccctatgaatgtaatgaatgtgggaaagtcttttctcagaagtcatacctcactgtacactatagaactcattcaggagagaaaccctatgaatgtaacgagtgtgggaaaaaattccaccacagatcagccttcaatagccatcagagaattcatagaagaggaaatatgaacgtacttgatgtggaaaatctctgaagtcagatctcaatttttagaaaactctctgaatataatgaatatggggaatccaataggaagtcaaagcgtttatctgagagttcgtgttcctgaacggtgagaagcatttaggcattagagtcattttaatccaaattttcacagagaagaatcccgaagaatgtaacaagaagcaaagccttcagcaagatcatacgactcatcggacactaatttatataggagtgaagttttataaatatttaatatttattttggattcaaattgtatttacatatcagggaatcatacaaaggcaaaatctgtcaatatggtgaatgtggaaaatatattgtcttggaaatttgttgtaaaagccatatttctaatggaaaatcaggtgtttacaggaaagatctcagaggctatgagctctgaataaatcttcattgtataaaatgaagtttttaaattgtcaggagttgatcatgaggacagtagcattaaataagtatatggccgttttttatcatgtcttaaaaatgcaatctaatggtaattctatgcaagtttggaattggatgacttgtgaagaggcagttttcttatttgagtattaggatggcaaaatgtattaagacaggacatattgttggtgagataatatttaataggtataaaatggtaaaatacctagttttctatttagaggaatttacaaatgggtttttaacaaatgcctcattagtacaggaggcagtcgttttgtaaagttttcaactgcatctgagtaagataagattttctaaaagactattttgataaactatacatacataatttggaattgtttaagtctatttcagtgaaagagaacaagcatactgcccatactctaaaatatccccagctctcacaccacccttgttttttaacccataggtttgagtgtgcctagtgccaatattttgtaatttagaaattttattcacaaacttctgtttggtacaaatacagtgtcattgttttgtgcattctcctttttcccagtatttcagaacaaattgattcaagtttctagcagatattttttgatcaattaacttaatgtcctcgctccatttcttgctggaacagtttaggtacctaccacttcttcacatgacacaggggaatcctgattagtcaaaataataatgatttcattctctttgccagtaacttgttttatagtggtcatatgacctgatactgggtaaacaaaacaaagatggacttgttctgggaaaaggtaaaatggtaatcaaatagattgtgttccaggaatgcaaaggtggcttaatattcacaagtcagttgctattatacaccacctgtagaaaagtaatctggcatgcagaacattcttgtggtacaattaatgttcgtttatgatcttagcaaatgatggattgaaagggacttacttaactgcataaagagacttaaactacaacaaacaatatgcttaatgatgaaatagtgaacatttctcctaagattataaaaataagacaaggatatctgctgtcaatgattttattcggcattgttcagaaggacctaaccagaaaactaatgcaaggaagagaaacaaaaggcatagagattagaaaagaagtaaaactttaaaaacgaaaaagaatataaatctctatttgcagatgccatgagtaaatttggtaagttccctgcataaaagttatgcaaaaagcattttatgatataccagcaaaaaacatggaaaatgaaattttgaaaagcaatgccacttcaaagatccctcaagtgcctagagggagaaaatgagttaatatgctttgaagaactgtatccagaaaataaaattacaaaggaggagagggataggattccaggacaatctcaaaactattgctttttcctaaattcattgcaaccttaaaatcctagcaagttctttaatgtaaattaacaagctaattctagaattcatatgcatattcaaaagtcgaataattgtcaaggctatcctgtagaatggacagagaggattgaaatttctaaatatcaagacctgttataaagccatagaaataatgaaggtgttaatttggcacaaggatgaaaaaactgactagtggaacagcatacagattcaaaagtagacccacgtgtataccatcacctgagttttgagaaaggtgacattgaagtgtagtgggggaaagggtgttctttccagtaaatgtactttgccaataaaattttgtaatttgataaaaagttatttggaggtggattgcagatctgaatatgaaatgtgaaagctttacaaagaaatcttaggacagtttgtaatcttggagtaagcaaaggtttattgagacccaaaaagcattaacccataaaattagaacttaatattaaatttgagaacttctatttatcagaaagaccaccagtaagaaaatgaacaggaaatcatggggaggagaagatatttgcagttcatgtatgtgacaacagcaccgagtatagcagaagtgttggcaaactttataaagcaaggcaccagatggtgaaaattttcagctttgtcacaactgctcatctttgctattgtgtgaaagcatccatacaccatgcattaaaaaaaaaatgagcatggctgcttcccagtaaaaccattcacaatcccaggtggcagtctggatttggtctgcactcatagttttctggtccctgatctcgaatatgtaaagagcacctacaaatcaacaagggggaaactggaaaaggcaaaagactttagaggatatccactcactttagaggatatccagacggccaataagcatgaaaagatgtgttagctttattagtaatcagggaaatgcaaacttaaaacatgtagcactgctacccatccatggaaatggttaaaatgaaaagcatgaaaaagcatcacgttttggcaaggatgtaagcaagaggaactgtacactactggtggaattgctcatcgataaaaccattttgaaagctggcactaaaagccaagcatatgtatactgttttacccaaacccagcaaaaatgcatgtgtctgtccaccaaaggacatgcactagaatatttatagcctaaaactgcacaaaacagaactatcttaaggcacatgtgcaatggaatgaataaagaagtggcatatgtccatggaatactgtaaaacagtgagcatgaatgaactagaagtccgtgtaataacgcagctgaatttaacaaaccttgctgaatgaaagactccagacacaaaagccaacatgctgtatgattccttctatataaattataaagacgggcaaaacttgtatacgtggtttaaaattagggtagcagttagccttggccaaggctgaaagggggcatttatctggtgctgggaataatctgtttctaaacctaggtgctaagtatttgagtgtgttttgagctgtgcacttaagatatgtgtatttttctgcatgtgtgttaaactttccataaaagttttctaaaatcacaaatggctaacatttgtgtcgctcatcactctaatcatatttttctagatgtgtatgaatatgctgcacaacaggaattaaatggcagattttgcataattctgtgcaggaaatacatatttatagtaattttgatggcaactactaagatttcctacgctgtccttaaagcttagcataatgtatattttaagtgaaatatttgagaaggttaaagaatcattacatactttgtcatcctatacttttgcatatataaataggtctgagctgcctcttcaataaagaagctaatgtgtaacatttcatatttccctaaac

SEQ ID NO: 208028 - DNA, 2145 bp, Artificial Sequence
  derived and/or modified sequence
atgaatacgcttcagggaccggtctcttttaaggatgtggccgttgacttcacacaggaggaatggcagcagttagatcccgatgagaagattacctaccgcgacgtgatgctcgaaaattacagccatctggtgtcagttggctatgataccacaaagccaaacgttattatcaaactggagcagggtgaagagccttggataatggggggggagtttccctgtcaacattccccggaagcctggcgtgtggatgatcttatcgaacggatccaggagaacgaagataagcacagtcgacaggccgcatgcatcaacagtaagactctaaccgaggaaaaagagaatactttcagccagatttacatggaaacctccttggtgcctagctctataattgcacataactgcgtctcctgtggcaaaaacttggaatccatcagccagctgatctccagtgacgggtcatatgcccggacaaagcctgacgaatgtaatgaatgtggtaagacctaccatggcgaaaagatgtgtgagttcaaccagaacggcgatacatattctcacaatgaggaaaacatcctgcaaaaaatatctatactcgagaagccgttcgagtacaacgagtgcatggaggcgctggacaatgaagctgtctttatcgcccataagagggcgtacattggcgagaagccatacgagtggaacgacagcggtcccgactttattcagatgtccaacttcaacgcttatcagaggtctcagatggagatgaaaccctttgaatgcagcgagtgtggaaaatctttctgcaaaaagtcaaagtttattatccaccagagggctcacaccggcgagaaaccttacgagtgtaatgtatgcgggaaatctttcagtcaaaaaggcacactcaccgtgcatagaaggtcgcacctcgaagagaagccctataaatgtaatgagtgcggcaagacgttttgtcagaagttacatctcacccagcatctgcgcactcattctggcgagaagccttacgagtgcagtgagtgcggaaaaaccttttgtcaaaagacacatctgaccttgcatcagagaaaccattcaggggagcgcccctatccctgcaatgaatgcggtaagtcctttagtaggaaaagtgcactgagtgaccatcagcgtacccacacaggagagaagctttataagtgcaatgaatgtggaaaatcatactatcggaagagcacactgataacccatcagaggacacacacgggggaaaagccctaccaatgtagcgagtgtggcaagttcttctcacgggtgtcataccttaccatacactatcgctctcatctcgaagagaagccttatgagtgcaatgagtgcgggaagaccttcaatctgaattcggcttttataaggcaccggaaagttcacacggaggagaaaagtcacgaatgtagcgaatgtggtaagttttctcagctgtatctgaccgatcaccatacggcccacctggaggagaagccatacgaatgcaacgagtgtgggaagaccttcctagtcaatagcgcctttgatgggcatcaaccactgcctaaaggtgaaaaatcctacgagtgcaacgtgtgtgggaagttgttcaacgagctctcatattacacggagcattatcgtagccacagtgaggaaaagccctatggctgctctgaatgtggtaaaacattctctcataactctagtctgtttcgccatcagcgagttcatactggcgagaaaccctatgagtgctacgagtgcggaaagtttttttcccagaagagctacctgactattcatcatagaatacacagtggggagaagccgtacgagtgttctaagtgcggaaaggtgtttagtaggatgagcaacctgacggtgcactatcgttcccattctggggagaagccgtacgaatgcaacgagtgtggcaaggtcttttctcaaaagagctacctgacagtgcattaccgaacacactccggcgagaagccctacgagtgcaatgagtgtggcaagaaattccatcacaggtcagccttcaacagccatcagaggatacaccggaggggcaatatgaacgtgctcgacgtagaaaacctatag

SEQ ID NO: 208029 - DNA, 2145 bp, Artificial Sequence
  derived and/or modified sequence
atgaataccttgcagggaccggtgtccttcaaagatgttgctgtggacttcactcaggaagaatggcagcagctggaccctgatgagaagattacctatcgggacgtgatgctggaaaactacagccacctcgtctctgtgggttacgacactactaagcccaatgtcataataaaactagaacagggggaggagccttggataatggggggggagtttccttgtcagcacagtccagaagcttggagggtagacgatctgatagagaggatccaggaaaacgaagacaagcacagccgccaggcggcgtgtattaactccaaaacccttacggaagagaaagagaataccttctcccagatttatatggagacaagcctggtgccttcatctatcatagctcacaattgtgtatcctgcgggaaaaaccttgaatcgataagccaactcatttcttctgatggctcctacgctcggaccaaaccagatgagtgcaacgagtgcgggaagacttatcacggcgagaagatgtgtgagtttaaccaaaatggggacacctatagtcacaatgaagagaacatcctccaaaagatatccattctcgagaagccattcgagtataatgaatgtatggaagcactcgataacgaagcggtgttcatcgcgcataaaagggcatacatcggtgaaaaaccgtatgaatggaacgacagtggtccggactttatccagatgtctaacttcaacgcttaccaacgtagccagatggaaatgaaaccctttgagtgcagcgagtgcgggaaatccttttgtaaaaaatcaaagtttataattcatcagcgcgcccacaccggcgagaagccgtacgaatgcaatgtatgtggtaagagcttttctcagaaaggtacactgactgtgcatagaaggtcccacctcgaggagaagccctacaaatgcaacgaatgcggcaagacattctgtcagaaactccatctgactcaacatttgaggacgcactctggcgaaaagccctatgaatgcagcgagtgcggaaaaacattctgtcagaagacacacctgaccttgcaccagcgcaatcactctggcgagcgaccctacccgtgcaatgagtgtggtaagtccttttccaggaagtctgccttgagtgatcaccaaagaacccacactggtgaaaagctgtacaaatgcaacgagtgcgggaaatcatactacagaaaaagcactctgataacacaccagcgcacccataccggtgagaaaccataccagtgtagtgagtgtgggaaattcttttcacgtgtttcttacctcaccatacactatcgtagccaccttgaggaaaaaccctatgaatgcaatgaatgtggaaaaacgttcaatctcaattcagctttcatccgacatcgaaaggtccacactgaagagaaatcccacgagtgttccgagtgtgggaaattcagtcagttatatctaacagatcatcataccgcccacttggaggagaagccgtacgagtgtaatgagtgcggcaaaactttcctggtcaattctgcctttgacgggcatcagcctctgcctaagggtgagaaaagctatgagtgcaatgtgtgcgggaaactatttaacgagctctcttactatacagagcattacagaagccatagcgaggaaaagccttatggatgtagcgagtgcggcaagacatttagtcataacagcagtctattccggcatcagagggtccacacaggggagaagccgtacgagtgttacgagtgtggcaagttcttttctcagaagtcctacctgaccattcaccaccgtattcactccggagagaagccctatgagtgttcaaaatgtggtaaagtgttttctcgtatgagtaatctcaccgtgcactaccgctcacactccggagaaaagccttacgagtgtaacgaatgtggcaaagtgttttctcagaaaagctacttgacagttcactatagaacccactcaggagagaagccttacgagtgcaacgaatgcggcaagaagttccaccatcgaagcgcatttaattctcatcagagaattcaccgaagaggtaatatgaatgtcctagatgttgaaaatctgtag

SEQ ID NO: 208030 - DNA, 732 bp, Artificial Sequence
  derived and/or modified sequence
atgaacacactgcaagggcccgtctcctttaaagatgtggccgttgatttcacccaggaggagtggcagcagctggacccagatgaaaagatcacttaccgtgatgttatgctggaaaattactctcacctggtttccgtcggatacgacacgacaaaacctaacgttatcattaagctggagcagggcgaagaaccctggatcatgggcggcgagttcccgtgtcagcactcccccgaggcatggagggtggatgacctgatcgagcgaatccaggaaaacgaggacaagcacagcagtcggcctgcccgacgaccttgtggtcctagatgctgctgctgctgttgttgctctagacctcctaggtctcctcctcctaaaccgctgcctaccagaatgctcacgccacgaaaagccttccgtacctgcagtaaagaatccggcttagcagaaactgagagttgtgggcagacacatacctggccccgcgcgctggccgtgctaatgggactttggtggccgcgcgatcagaaggcgggagaagaggatctgcgctttcgcgaaaggcgccctgggctgcaagccaccgccaccggctccggagagcacggcgcatttccggtgcatagccagggagtctgggcttcaacacactggcaaggaaccgcagtttgtcctctgcagacaccacctcctgatgcattcataagaaataataaagtcctgagctag

SEQ ID NO: 208031 - DNA, 2145 bp, Artificial Sequence
  derived and/or modified sequence
atgaacaccctgcagggccctgtgtccttcaaggatgtggccgtggacttcacccaggaggagtggcagcagctggaccctgatgagaagatcacctacagagatgtgatgctggagaactacagccacctggtgtctgtgggctatgacaccaccaagcccaacgtcatcatcaagctggagcagggcgaggagccctggatcatgggcggggagttcccctgccagcacagccctgaggcctggagggtggatgacctgattgaaagaatccaggagaatgaagacaagcacagccggcaggccgcctgcatcaacagcaagaccctgacagaggagaaggagaacaccttcagccagatctacatggagaccagcctggtgcccagcagcatcatcgcccacaactgtgtgtcctgtgggaagaacctggagagcatcagccagctgatcagcagtgatggcagctatgcccggaccaagccagatgagtgcaatgaatgtgggaagacctaccatggagagaagatgtgtgagttcaaccagaatggagacacctacagccacaatgaggagaacatcctgcagaagatcagcatcctggagaagccctttgagtacaatgaatgcatggaggccctggacaatgaggccgtgttcatcgcccacaagagggcctacatcggggagaagccctatgagtggaatgacagcggccctgacttcatccagatgagcaacttcaatgcctaccagaggagccagatggagatgaagccctttgagtgcagtgaatgtgggaagagcttctgcaagaagagcaagttcatcatccaccagagggcccacactggagagaagccctatgagtgcaatgtgtgtgggaagagcttcagccagaagggcaccctgactgtgcaccggcgcagccacctggaggagaagccctacaagtgcaatgaatgtgggaagaccttctgccagaagctgcacctgacccagcacctgcggacccacagcggggagaagccctatgagtgcagtgaatgtgggaagaccttctgccagaagacccacctgaccctgcaccagaggaaccacagcggggagcggccctacccctgcaatgaatgtgggaagagcttcagcaggaagagcgccctgagtgaccaccagaggacccacactggagagaagctgtacaagtgcaatgaatgtgggaagagctactacaggaagagcaccctcatcacccaccagaggacccacactggagagaagccctaccagtgcagtgaatgtgggaagttcttcagccgggtgtcctacctgaccatccactaccgcagccacctggaggagaagccctatgagtgcaatgaatgtgggaagaccttcaacctgaacagcgccttcatccgccacaggaaggtgcacacagaggagaagagccatgagtgcagtgaatgtgggaagttcagccagctgtacctgacagaccaccacacagcccacctggaggagaagccctatgagtgcaatgaatgtgggaagaccttcctggtgaacagcgcctttgatggccaccagcccctgcccaagggggagaagagctatgagtgcaatgtgtgtgggaagctgttcaatgagctgagctactacacagagcactaccgcagccacagcgaggagaagccctacggctgcagtgaatgtgggaagaccttcagccacaacagcagcctcttccgccaccagagggtgcacactggagagaagccctatgagtgctatgaatgtgggaagttcttcagccagaagagctacctgaccatccaccaccgcatccacagcggggagaagccctatgagtgcagcaaatgtgggaaggtgttcagcaggatgagcaacctgactgtgcactaccgcagccacagcggggagaagccctatgagtgcaatgaatgtgggaaggtgttcagccagaagagctacctgactgtgcactaccgcacccacagcggggagaagccctatgagtgcaatgaatgtgggaagaagttccaccacaggtctgccttcaacagccaccagaggatccaccggcggggcaacatgaatgtgctggatgtggagaacctgtag

SEQ ID NO: 208032 - DNA, 732 bp, Artificial Sequence
  derived and/or modified sequence
atgaacaccctgcagggccctgtgtccttcaaggatgtggccgtggacttcacccaggaggagtggcagcagctggaccctgatgagaagatcacctacagagatgtgatgctggagaactacagccacctggtgtctgtgggctatgacaccaccaagcccaacgtcatcatcaagctggagcagggcgaggagccctggatcatgggcggggagttcccctgccagcacagccctgaggcctggagggtggatgacctgattgaaagaatccaggagaatgaagacaagcacagcagcaggcctgcccggcggccctgtggcccccgctgctgctgctgctgctgctgcagccggccccccaggagccccccacccaagcccctgcccaccaggatgctgacccccaggaaggccttccgcacctgcagcaaggagagcggcctggccgagacagagagctgtggccagacccacacctggccccgggccctggccgtgctgatgggcctgtggtggccccgggaccagaaggccggggaggaggacctgcgcttccgggagaggaggcctggcctgcaggccacagccaccggcagcggggagcacggggccttccctgtgcacagccagggcgtgtgggccagcacccactggcagggcacagctgtgtgccccctgcagaccccacctccagatgccttcatccggaacaacaaggtgctgtcctag

SEQ ID NO: 208033 - DNA, 4125 bp, Artificial Sequence
  derived and/or modified sequence
ctctctgtgtgcgtgttcgcgcatgcgcgccgccgctgcactgccctcgcttcctgtgcgtcctcaggtcaccgcttgctctagttcccaggctttggcctccagtggacgagaatcgcggagcctgcggggctggaggcccggcccgggcccctcgggagcagaacaaccttagtgaggtggacaggaggggacctcgcgagcagacgcgcgccagcgacagcagccccgccccggcctctcgggagccgtggggcagaggctgcggagccccagaagggtctaccagccacagtctctgcacgtttccaagagcagcagaaaatgaacacattgcaggggccagtgtcattcaaagatgtggctgtggatttcacccaggaggagtggcagcagctggaccctgatgagaagataacttacagggatgtgatgttggagaactatagccatctagtttctgtgggatatgataccaccaagccaaacgtcatcattaagttggagcagggagaggagccgtggataatgggaggtgaatttccatgtcaacatagtccagaagcctggagagttgatgacctgatagagagaatccaagaaaacgaagacaaacattcaaggcaagctgcttgtatcaatagcaaaaccctgactgaagagaaagagaatacatttagtcaaatttacatggaaacaagccttgttccttcaagcataatagctcataattgtgtctcatgtggaaagaatttagaatctatttcgcaattaattagtagtgatggaagctatgctaggacaaaacctgatgagtgtaatgaatgtgggaaaacatatcatggagagaaaatgtgtgaatttaatcaaaatggggatacctattctcacaatgaagaaaatattcttcagaaaattagtattttggagaaaccctttgaatataatgaatgcatggaagccttagacaatgaggctgtttttattgctcataagagagcttacataggggagaagccctatgagtggaatgattctggaccagacttcatacagatgtcaaattttaatgcatatcagagatcacaaatggaaatgaagccctttgaatgcagtgaatgtggaaaatccttctgtaaaaagtcaaaattcatcatccaccagagggctcacacaggagagaaaccttatgaatgtaatgtatgtgggaaatccttcagccaaaagggaaccctcactgtacatcggagatcacacttagaggagaagccctataaatgtaatgaatgtgggaaaaccttttgtcagaagttacacctcactcaacacctaagaactcattcaggagagaaaccctacgaatgtagcgaatgtgggaaaaccttctgccaaaagacacatctcaccctgcaccagaggaatcattcaggagagaggccctatccatgtaacgaatgtgggaaatccttctcccgcaagtctgctctcagtgaccatcagagaactcacacgggagagaagctttataaatgtaatgaatgtgggaaatcctactaccgaaagtctactctgattacacatcagagaacacacacgggagagaagccctatcagtgtagcgagtgtgggaaattcttttctcgggtgtcatacctcactatacattatagaagtcatttagaagagaaaccctatgaatgtaatgaatgtggcaaaaccttcaatttaaattcagccttcattagacatcggaaagtacacacagaagagaaatcccatgaatgtagtgaatgtggaaagttctctcagttgtatctcaccgaccatcatacagctcatttagaagagaaaccctatgaatgtaatgaatgtgggaaaaccttccttgtaaattcagccttcgatgggcaccagccacttccaaaaggggagaaatcctatgaatgtaatgtatgtggaaagttattcaatgagttgtcatactatactgaacattatagaagtcattcagaagagaaaccttatggatgtagcgaatgtgggaaaaccttttcccataattcatccctcttcagacatcaaagagtacacacaggcgagaaaccctatgaatgttacgaatgtggaaaattcttctctcagaaatcatatctcactatacatcatcgaattcattcaggagagaaaccctatgaatgtagtaaatgtggaaaagtcttctctcggatgtcaaacctcactgtccactacagaagccattcaggagagaaaccctatgaatgtaatgaatgtgggaaagtcttttctcagaagtcatacctcactgtacactatagaactcattcaggagagaaaccctatgaatgtaacgagtgtgggaaaaaattccaccacagatcagccttcaatagccatcagagaattcatagaagaggaaatatgaacgtacttgatgtggaaaatctctgaagtcagatctcaatttttagaaaactctctgaatataatgaatatggggaatccaataggaagtcaaagcgtttatctgagagttcgtgttcctgaacggtgagaagcatttaggcattagagtcattttaatccaaattttcacagagaagaatcccgaagaatgtaacaagaagcaaagccttcagcaagatcatacgactcatcggacactaatttatataggagtgaagttttataaatatttaatatttattttggattcaaattgtatttacatatcagggaatcatacaaaggcaaaatctgtcaatatggtgaatgtggaaaatatattgtcttggaaatttgttgtaaaagccatatttctaatggaaaatcaggtgtttacaggaaagatctcagaggctatgagctctgaataaatcttcattgtataaaatgaagtttttaaattgtcaggagttgatcatgaggacagtagcattaaataagtatatggccgttttttatcatgtcttaaaaatgcaatctaatggtaattctatgcaagtttggaattggatgacttgtgaagaggcagttttcttatttgagtattaggatggcaaaatgtattaagacaggacatattgttggtgagataatatttaataggtataaaatggtaaaatacctagttttctatttagaggaatttacaaatgggtttttaacaaatgcctcattagtacaggaggcagtcgttttgtaaagttttcaactgcatctgagtaagataagattttctaaaagactattttgataaactatacatacataatttggaattgtttaagtctatttcagtgaaagagaacaagcatactgcccatactctaaaatatccccagctctcacaccacccttgttttttaacccataggtttgagtgtgcctagtgccaatattttgtaatttagaaattttattcacaaacttctgtttggtacaaatacagtgtcattgttttgtgcattctcctttttcccagtatttcagaacaaattgattcaagtttctagcagatattttttgatcaattaacttaatgtcctcgctccatttcttgctggaacagtttaggtacctaccacttcttcacatgacacaggggaatcctgattagtcaaaataataatgatttcattctctttgccagtaacttgttttatagtggtcatatgacctgatactgggtaaacaaaacaaagatggacttgttctgggaaaaggtaaaatggtaatcaaatagattgtgttccaggaatgcaaaggtggcttaatattcacaagtcagttgctattatacaccacctgtagaaaagtaatctggcatgcagaacattcttgtggtacaattaatgttcgtttatgatcttagcaaatgatggattgaaagggacttacttaactgcataaagagacttaaactacaacaaacaatatgcttaatgatgaaatagtgaacatttctcctaagattataaaaataagacaaggatatctgctgtcaatgattttattcggcattgttcagaaggacctaaccagaaaactaatgcaaggaagagaaacaaaaggcatagagattagaaaagaagtaaaactttaaaa

SEQ ID NO: 208034 - DNA, 1001 bp, Artificial Sequence
  derived and/or modified sequence
acagaatcattataaatcccagtagcagtctgctggccagccaagatgagacaaagttgcctaaaataagacttttttgactattctaaattgactcctcttgaccagcactgcttcatccaagctgctgacctcctcatggccgacttcaaagtgctcagtagtcaggacatcatgtgggccctgcacgagctcaaaggacactatgcaatcacccgaaaggtctaccagccacagtctctgcacgtttccaagagcagcagaaaatgaacacattgcaggggccagtgtcattcaaagatgtggctgtggatttcacccaggaggagtggcagcagctggaccctgatgagaagataacttacagggatgtgatgttggagaactatagccatctagtttctgtgggatatgataccaccaagccaaacgtcatcattaagttggagcagggagaggagccgtggataatgggaggtgaatttccatgtcaacatagtccagaagcctggagagttgatgacctgatagagagaatccaagaaaacgaagacaaacattcaagccgccctgcccgcaggccatgtggcccccgctgttgctgctgctgctgctgctcccggccgccccggtccccaccgccaaagccgctccccacccggatgctaacacccaggaaggccttcagaacctgctccaaggagtcggggctggcggagacggagagctgcgggcagactcacacctggccccgggctctggctgtattgatggggctgtggtggccacgcgaccagaaagccggggaggaagacctgcggttccgtgagaggcgtccagggctgcaggccacggcgacaggctccggggaacatggggctttccctgtccactcccaaggagtgtgggcctcaacgcattggcaggggacggccgtgtgccctctccagaccccacccccagatgcatttattagaaataataaagttctttcttagcta

SEQ ID NO: 208035 - DNA, 2145 bp, Artificial Sequence
  derived and/or modified sequence
atgaacaccctgcagggccccgtgagcttcaaggacgtggccgtggacttcacccaagaagaatggcagcagctggatcctgacgaaaagatcacctatcgcgatgtcatgttagagaactactcacatttggtgtctgtcgggtacgacacgactaagcctaacgtgattattaaattagaacagggcgaagagccttggattatgggcggcgaatttccatgccaacacagtcccgaggcttggcgagtggatgatctcatcgagcggatccaggagaatgaggacaagcatagccgacaggcagcctgtatcaacagcaaaaccttaacagaagaaaaagagaacacctttagtcagatatacatggagacctctctcgttccgtcctctattatcgcacataactgcgtctcctgtggaaaaaatttggagtctatcagccagctgattagctccgacggatcttacgcccggacaaagcctgatgagtgtaatgagtgtggtaaaacctatcatggcgagaaaatgtgtgaattcaatcagaacggggacacttacagccacaacgaggagaatatcctgcagaaaattagtatactggaaaaaccatttgagtataatgagtgtatggaggcattagacaatgaagcagtttttatagcccacaagcgcgcctatattggtgagaagccttacgagtggaatgatagtgggccagatttcatccaaatgagcaactttaacgcttaccaacgaagccagatggaaatgaagccgtttgagtgcagcgagtgtggcaagtccttttgcaagaaatccaagtttatcattcaccagagggcgcatactggagagaaaccttacgagtgtaacgtgtgtggaaagagcttctctcaaaagggaacgctgaccgtgcaccgccggtcacatctggaagagaaaccttacaaatgcaatgaatgtggaaaaacgttctgtcagaagcttcacctgactcagcacctaagaacccattctggtgagaaaccatatgaatgtagcgagtgcgggaagaccttctgtcagaagactcacctcacactccaccagcggaaccactctggcgagaggccatatccctgtaacgagtgtggtaaaagtttctcgagaaagtccgcattatctgatcaccaacgaacgcatactggggagaagttgtacaagtgcaacgaatgtgggaagtcctactaccgtaaatcaacattgatcacacaccaacgaacccacacaggggaaaaaccttatcagtgcagcgaatgcggcaaattcttcagccgcgtgtcttacctgacgattcactacagaagccacctcgaggaaaaaccctacgaatgcaacgaatgtgggaagaccttcaatctcaactccgctttcatacggcataggaaggtgcatacagaagagaagtcccacgagtgttcagagtgtgggaagtttagtcagctgtatcttactgatcaccacacggcccaccttgaggagaagccctatgaatgcaatgagtgcggtaaaacctttctggttaattcggccttcgatgggcaccagccactccccaagggggaaaaatcctatgaatgtaacgtctgcggcaagctctttaatgagctgtcctattatactgagcattaccgctctcactccgaggagaagccgtatggatgctccgaatgcgggaagactttttctcacaacagctccctgttccgacaccaaagagtgcatactggagaaaaaccctacgagtgctatgagtgtggcaagttcttttcccagaaatcatacctcacgattcatcacaggatccattcaggcgagaagccgtacgaatgctcaaagtgtggtaaagtctttagcaggatgtcgaatttaacagttcattaccgctcacatagtggcgagaaaccttacgagtgtaatgagtgcgggaaggtattttcccagaagagctatctgaccgtgcactaccgcacccactcaggcgagaaaccctatgaatgtaatgaatgcggaaagaaatttcatcatagaagcgcctttaactcccaccagcggattcacaggcgggggaatatgaatgtgttggacgtggaaaatctgtag

SEQ ID NO: 208036 - DNA, 2145 bp, Artificial Sequence
  derived and/or modified sequence
atgaacaccctgcagggccccgtgagcttcaaggacgtggccgtggactttacgcaggaagaatggcagcagctagacccagatgagaagattacttaccgagatgtaatgctagagaattatagtcacctagtatcggttggctacgatacaacaaaacccaacgttatcatcaagctagaacaaggggaggaaccctggattatgggtggtgaattcccctgtcagcactcacctgaagcctggagggttgacgacctgattgaacggatccaggaaaatgaagataagcactcccgccaggcagcttgtatcaatagcaagaccctgaccgaagagaaggagaacaccttttctcagatatacatggagacttccctagttccaagcagcattattgcccacaactgtgtgtcctgcggtaaaaacctcgaatcaattagccagcttatctcgtccgacggttcctacgccaggactaagcccgacgagtgtaatgagtgtggcaagacttaccacggagaaaaaatgtgtgagttcaaccagaatggcgatacatatagccataatgaagagaatatcctccagaagatatctatcctggagaaaccgttcgaatacaatgaatgtatggaagctcttgacaatgaggccgtgttcatcgcacacaagcgcgcctatatcggtgagaagccttatgagtggaatgactctggccctgactttatccagatgtccaattttaatgcgtatcagaggtcccagatggaaatgaaacccttcgagtgtagtgagtgcgggaaaagtttttgcaagaagtctaaattcatcatccatcagagagcccacaccggcgaaaagccttatgaatgcaacgtgtgtggaaagtccttctcccagaaaggtaccctcaccgttcacaggcggagccatttggaagagaaaccatacaaatgtaatgagtgtgggaaaaccttttgtcaaaaactgcatctcacacagcacctgcgaacccattctggcgagaagccctacgagtgtagtgagtgcggaaagaccttctgccagaagacacatttgacactccatcagcgcaatcactccggagaacgaccttacccttgtaatgaatgtgggaaaagcttttctagaaaatctgctttgtcagaccaccagcggacacataccggcgagaagctgtacaagtgtaatgagtgcggtaaatcgtactacaggaagtccactttgatcacacaccagaggacacacacgggagaaaaaccataccagtgcagtgaatgtggcaaattcttttcacgtgtttcttacttaaccatccattatagatcgcacttagaggaaaagccatacgaatgtaatgagtgcggtaaaacttttaatttaaactccgcttttattcggcatcgcaaagttcacacagaggaaaagtcacacgaatgtagcgagtgtggaaaattttcacagctgtatttgaccgaccatcacactgctcatctcgaagaaaaaccctacgaatgtaatgaatgtggaaagaccttcctcgtgaacagtgccttcgatggccatcagcccttgcccaaaggggagaaaagctatgaatgtaacgtctgcggcaaactcttcaatgagctgagctactataccgagcactatcgaagccactctgaagagaagccttatggatgttccgagtgtgggaagaccttcagccacaacagttctttgtttcggcatcagcgcgtgcatactggggagaagccctacgagtgctacgagtgtggtaagtttttttcccagaaatcctatttaactatccatcatcggattcactctggagaaaagccctatgagtgctcaaaatgcggaaaagtcttttccagaatgtcaaatctgactgtgcattaccggtcccactctggggagaagccttacgagtgtaatgaatgtggaaaggttttcagccagaagtcatacctcaccgtgcattatcggacccatagtggtgaaaagccttacgaatgcaacgagtgcgggaagaagttccaccacaggtctgccttcaactcccatcagcggattcatagacggggaaacatgaatgtactcgatgtagagaatctatag

SEQ ID NO: 208037 - DNA, 732 bp, Artificial Sequence
  derived and/or modified sequence
atgaacaccctgcagggccccgtgagcttcaaggacgtggccgtggatttcacgcaggaagagtggcaacagctggaccctgatgagaaaattacctatcgggacgtgatgttggagaattacagccacttggtgtcagtaggttatgacaccactaagcctaacgttatcattaaactggaacaaggggaggagccatggatcatgggcggagagttcccatgccagcattcacccgaggcctggcgcgtggatgacctgattgaaaggatacaggagaatgaagataaacattcatcacggcctgcaagacggccttgcggaccccggtgctgctgttgctgttgttgcagccggccccctagaagcccccctcccaaaccccttccaaccagaatgctgaccccaagaaaggctttcaggacctgctctaaagagtccgggctggccgagacggagtcctgtggccaaacgcatacttggccccgagccctggctgttcttatgggtttatggtggccccgcgaccagaaagcaggggaggaggaccttaggttccgcgaaaggagaccaggtctgcaggctacggctactgggtcaggcgagcatggcgctttccctgtacacagccaaggggtctgggcaagcacacattggcagggtactgccgtctgccccttacaaacaccaccaccggacgcttttatccgcaacaacaaggtgctgtcatag

SEQ ID NO: 208038 - DNA, 2145 bp, Artificial Sequence
  derived and/or modified sequence
atgaatactctgcagggacccgtgagtttcaaggacgtcgcagtcgattttacccaagaggagtggcagcaactggaccccgatgaaaaaattacgtatagagatgtcatgcttgagaattactcccatttggtgtcagttggctacgacacgaccaagccaaacgtcatcataaagctggaacagggagaagagccttggattatgggtggagagtttccctgtcagcatagccccgaagcgtggcgcgtcgacgaccttattgagcggatacaggagaacgaagataaacactcccggcaggcagcctgcatcaactcaaagacactcactgaggagaaagagaacacattctcccagatttacatggaaacttcccttgttccatcttccatcattgcgcacaattgtgtctcttgtggcaagaacctggagtcaatttctcagctcatctccagtgacggtagctacgctcgcaccaaaccggatgagtgtaatgagtgcggcaagacttatcatggagagaaaatgtgcgaatttaaccagaatggagatacatattcacacaacgaggagaacatcctgcagaaaatctcgatattagaaaaaccatttgaatataacgagtgtatggaagctctggacaacgaggcagtttttattgctcataaacgcgcatatataggggagaagccttatgaatggaacgacagtggacctgactttattcaaatgagcaattttaatgcctatcagcgcagccagatggagatgaagccgtttgagtgttccgaatgtgggaaatcattctgtaagaagtccaagtttattattcaccagcgcgctcacacgggggaaaaaccctacgaatgtaatgtgtgcggcaagagcttcagtcaaaaaggcactctcacagttcataggaggagccatctcgaggaaaagccttataagtgcaacgaatgtgggaaaactttctgccagaaattacatctgacccagcacttgagaacccattcaggcgagaaaccatacgagtgttccgaatgtgggaagaccttctgtcagaaaacccatctgactttgcatcagcgcaatcatagtggcgaacgcccttacccatgcaatgagtgcggcaagtctttcagtaggaagagtgccctgtccgaccaccaacggacccataccggagagaagctgtataaatgtaatgagtgcgggaaaagctactatcgcaaatctacattaatcacgcaccagcggacgcacactggcgaaaaaccctaccagtgctccgaatgtggtaaatttttttcaagggtctcctacctgacaatccactatcgttcccaccttgaagagaaaccgtacgaatgtaatgagtgcgggaagaccttcaatctgaactccgcattcatcaggcatcgcaaagtgcacactgaagagaagtctcacgaatgctcagagtgcggtaaattttcacagctttacctaacagatcatcataccgcacacctggaagagaagccttacgaatgcaacgagtgcggtaagacattcctggttaacagcgcttttgacgggcaccagccattgcctaagggagagaagagttacgagtgcaacgtgtgcggaaagctattcaacgagttgagttactacaccgagcactataggtcacactccgaagagaagccgtacggatgtagcgagtgcggcaaaactttcagtcacaactcctctctcttccgccatcagagagtacataccggcgagaagccttacgagtgttatgaatgcgggaaattcttttcccaaaaaagttacctgaccattcaccaccggatccactccggagagaagccttatgaatgtagcaagtgcgggaaagtatttagcagaatgtcgaatctgactgttcattacagatcccatagcggcgaaaagccttatgagtgcaacgagtgcggaaaggtattttctcagaagtcttacctaaccgtccactatcgcacacactcaggagaaaagccctacgaatgtaacgagtgcggcaagaaatttcatcatagatctgcatttaactcacaccagagaatccatagaaggggaaatatgaacgttctcgacgtggagaacctgtag

SEQ ID NO: 208039 - DNA, 2145 bp, Artificial Sequence
  derived and/or modified sequence
atgaacacattgcagggcccagtttcttttaaagacgtggccgtcgatttcactcaggaagaatggcagcagcttgatcccgacgagaaaattacttatagggatgttatgcttgaaaattatagccatctggtttcggtgggctacgatactacaaagcccaacgttatcatcaaactcgagcagggagaagagccatggattatgggcggagagttcccttgccagcatagccccgaggcctggagagtggacgaccttattgaacgaattcaagagaacgaggacaagcattcacggcaggcggcttgcatcaattccaaaacactgactgaagagaaggagaacacgtttagccaaatttatatggaaaccagcctagtgccttcgtctattattgctcacaactgtgtctcatgcggaaagaatctggagtccatctcacagctcatcagcagcgatggaagctatgctcggaccaagcccgacgagtgtaacgaatgtggcaaaacttaccatggagaaaagatgtgcgagttcaatcagaacggagacacctacagccataacgaggaaaatatactccagaagatttcaattctcgaaaaaccttttgagtacaacgaatgcatggaggcgttagacaatgaagcagtctttatcgctcacaagcgtgcgtatatcggagagaagccatatgaatggaacgactctgggcctgacttcattcagatgagcaattttaacgcttaccagcgctcacagatggaaatgaagccgtttgagtgttcagagtgcgggaagagcttctgtaaaaagtccaaatttattattcaccaacgggcacacactggcgaaaagccgtatgagtgcaacgtctgcggtaaatctttcagccagaaagggactctaactgtgcatcgcaggagtcatcttgaggaaaagccttacaaatgcaacgaatgtggaaaaaccttttgtcagaagctgcacctcacccagcacctgcggactcactcaggcgagaaaccttatgagtgctctgagtgtgggaagaccttctgccagaaaacccacctgaccctccatcaacggaaccattctggtgagcgaccttatccatgcaatgagtgcggaaagagcttcagtcgtaagagcgccctcagcgatcaccagaggacccatactggagaaaaactgtacaaatgcaacgagtgtggaaagagctactatcggaagtcaaccttgattacccaccagcggacccacaccggcgagaagccttaccagtgttcagagtgcggcaagtttttcagtagggtctcgtatctcaccatccattacaggtcacacttagaggagaaaccatatgaatgtaatgagtgcggcaaaacctttaatctcaactctgccttcattcgacacaggaaagttcatactgaggaaaagagccacgagtgtagcgaatgtggcaagttctcgcagctttatctcacggatcaccacacagcacacttggaagagaaaccctatgagtgcaatgagtgcggcaagacgtttttggtgaattctgcctttgatgggcaccagcccctgcccaaaggtgaaaagagctatgagtgcaatgtttgcggtaaactcttcaacgaactgtcatattacactgaacactaccgtagtcactctgaggaaaagccttatggctgcagtgagtgcggcaagacattttctcataacagcagtcttttcaggcaccaacgtgtccatacaggcgaaaagccttatgagtgctacgaatgcgggaagttcttttctcagaaatcctaccttaccatccaccacaggatccacagtggtgagaaaccttacgaatgttcaaagtgcggcaaggtctttagtcgcatgtccaatctgactgtgcactatagatcccactctggagaaaaaccttatgagtgcaatgagtgtgggaaggtgttttcgcagaaatcatatctgaccgtccattacaggacccactccggtgaaaagccctacgagtgtaacgaatgcggtaaaaaattccaccatagatctgcgttcaactcccatcagagaattcacaggagagggaatatgaatgttttagacgtcgaaaatctgtag

SEQ ID NO: 208040 - DNA, 732 bp, Artificial Sequence
  derived and/or modified sequence
atgaatacccttcagggcccagtgtctttcaaggatgtggccgtcgactttacacaagaggagtggcagcagctggacccggacgaaaaaattacctatagggacgtaatgctggagaattacagtcatctcgtctctgtggggtatgatacaactaagccgaacgtaattatcaagctcgaacagggggaagaaccgtggattatggggggagaatttccttgccaacattccccagaggcctggcgtgtagatgatctcatagaaaggatccaggaaaatgaggataaacatagcagcaggccagccagaagaccatgcggccctagatgctgttgttgctgttgttgctctaggcccccaaggagtcccccacccaagcccctccccacacggatgctgacacctaggaaggcttttcgcacatgttccaaggagtccggtctggccgagaccgaatcatgcggccagacacacacatggccacgtgccctggctgttctcatgggcctttggtggcccagggaccagaaggcgggagaggaggacctgcggttcagagagaggagaccaggtttacaggcgacggcgaccggaagcggagaacacggagctttcccagtgcacagccagggcgtttgggcgtctacccattggcaggggactgccgtgtgtccacttcagactccaccccctgacgctttcattaggaataacaaggttctgagttag

SEQ ID NO: 208041 - DNA, 2145 bp, Artificial Sequence
  derived and/or modified sequence
atgaacaccctgcagggccccgtgagcttcaaggacgtggccgtggacttcacccaggaggagtggcagcagctggaccccgacgagaagatcacctacagagacgtgatgctggagaactacagccacctggtgagcgtgggctacgacaccaccaagcccaacgtgatcatcaagctggagcagggcgaggagccctggatcatgggcggcgagttcccctgccagcacagccccgaggcctggagagtggacgacctgatcgagagaatccaggagaacgaggacaagcacagcagacaggccgcctgcatcaacagcaagaccctgaccgaggagaaggagaacaccttcagccagatctacatggagaccagcctggtgcccagcagcatcatcgcccacaactgcgtgagctgcggcaagaacctggagagcatcagccagctgatcagcagcgacggcagctacgccagaaccaagcccgacgagtgcaacgagtgcggcaagacctaccacggcgagaagatgtgcgagttcaaccagaacggcgacacctacagccacaacgaggagaacatcctgcagaagatcagcatcctggagaagcccttcgagtacaacgagtgcatggaggccctggacaacgaggccgtgttcatcgcccacaagagagcctacatcggcgagaagccctacgagtggaacgacagcggccccgacttcatccagatgagcaacttcaacgcctaccagagaagccagatggagatgaagcccttcgagtgcagcgagtgcggcaagagcttctgcaagaagagcaagttcatcatccaccagagagcccacaccggcgagaagccctacgagtgcaacgtgtgcggcaagagcttcagccagaagggcaccctgaccgtgcacagaagaagccacctggaggagaagccctacaagtgcaacgagtgcggcaagaccttctgccagaagctgcacctgacccagcacctgagaacccacagcggcgagaagccctacgagtgcagcgagtgcggcaagaccttctgccagaagacccacctgaccctgcaccagagaaaccacagcggcgagagaccctacccctgcaacgagtgcggcaagagcttcagcagaaagagcgccctgagcgaccaccagagaacccacaccggcgagaagctgtacaagtgcaacgagtgcggcaagagctactacagaaagagcaccctgatcacccaccagagaacccacaccggcgagaagccctaccagtgcagcgagtgcggcaagttcttcagcagagtgagctacctgaccatccactacagaagccacctggaggagaagccctacgagtgcaacgagtgcggcaagaccttcaacctgaacagcgccttcatcagacacagaaaggtgcacaccgaggagaagagccacgagtgcagcgagtgcggcaagttcagccagctgtacctgaccgaccaccacaccgcccacctggaggagaagccctacgagtgcaacgagtgcggcaagaccttcctggtgaacagcgccttcgacggccaccagcccctgcccaagggcgagaagagctacgagtgcaacgtgtgcggcaagctgttcaacgagctgagctactacaccgagcactacagaagccacagcgaggagaagccctacggctgcagcgagtgcggcaagaccttcagccacaacagcagcctgttcagacaccagagagtgcacaccggcgagaagccctacgagtgctacgagtgcggcaagttcttcagccagaagagctacctgaccatccaccacagaatccacagcggcgagaagccctacgagtgcagcaagtgcggcaaggtgttcagcagaatgagcaacctgaccgtgcactacagaagccacagcggcgagaagccctacgagtgcaacgagtgcggcaaggtgttcagccagaagagctacctgaccgtgcactacagaacccacagcggcgagaagccctacgagtgcaacgagtgcggcaagaagttccaccacagaagcgccttcaacagccaccagagaatccacagaagaggcaacatgaacgtgctggacgtggagaacctgtag

SEQ ID NO: 208042 - DNA, 732 bp, Artificial Sequence
  derived and/or modified sequence
atgaacaccctgcagggccccgtgagcttcaaggacgtggccgtggacttcacccaggaggagtggcagcagctggaccccgacgagaagatcacctacagagacgtgatgctggagaactacagccacctggtgagcgtgggctacgacaccaccaagcccaacgtgatcatcaagctggagcagggcgaggagccctggatcatgggcggcgagttcccctgccagcacagccccgaggcctggagagtggacgacctgatcgagagaatccaggagaacgaggacaagcacagcagcagacccgccagaagaccctgcggccccagatgctgctgctgctgctgctgcagcagaccccccagaagccccccccccaagcccctgcccaccagaatgctgacccccagaaaggccttcagaacctgcagcaaggagagcggcctggccgagaccgagagctgcggccagacccacacctggcccagagccctggccgtgctgatgggcctgtggtggcccagagaccagaaggccggcgaggaggacctgagattcagagagagaagacccggcctgcaggccaccgccaccggcagcggcgagcacggcgccttccccgtgcacagccagggcgtgtgggccagcacccactggcagggcaccgccgtgtgccccctgcagacccccccccccgacgccttcatcagaaacaacaaggtgctgagctag

SEQ ID NO: 208043 - protein, 783 aa, Artificial Sequence
  derived and/or modified sequence
MRWQCGTRFRGLRPAVAPWTALLALGLPGWVLAVSATAAAVVPEQHASVAGQHPLDWLLTDRGPFHRAQEYADFMERYRQGFTTRYRIYREFARWKVNNLALERKDFFSLPLPLAPEFIRNIRLLGRRPNLQQVTENLIKKYGTHFLLSATLGGEESLTIFVDKQKLGRKTETTGGASIIGGSGNSTAVSLETLHQLAASYFIDRESTLRRLHHIQIATGAIKVTETRTGPLGCSNYDNLDSVSSVLVQSPENKVQLLGLQVLLPEYLRERFVAAALSYITCSSEGELVCKENDCWCKCSPTFPECNCPDADIQAMEDSLLQIQDSWATHNRQFEESEEFQALLKRLPDDRFLNSTAISQFWAMDTSLQHRYQQLGAGLKVLFKKTHRILRRLFNLCKRCHRQPRFRLPKERSLSYWWNRIQSLLYCGESTFPGTFLEQSHSCTCPYDQSSCQGPIPCALGEGPACAHCAPDNSTRCGSCNPGYVLAQGLCRPEVAESLENFLGLETDLQDLELKYLLQKQDSRIEVHSIFISNDMRLGSWFDPSWRKRMLLTLKSNKYKPGLVHVMLALSLQICLTKNSTLEPVMAIYVNPFGGSHSESWFMPVNEGSFPDWERTNVDAAAQCQNWTITLGNRWKTFFETVHVYLRSRIKSLDDSSNETIYYEPLEMTDPSKNLGYMKINTLQVFGYSLPFDPDAIRDLILQLDYPYTQGSQDSALLQLIELRDRVNQLSPPGKVRLDLFSCLLRHRLKLANNEVGRIQSSLRAFNSKLPNPVEYETGKLCS

SEQ ID NO: 208044 - protein, 536 aa, Artificial Sequence
  derived and/or modified sequence
MPTLCSSFGLQVLLPEYLRERFVAAALSYITCSSEGELVCKENDCWCKCSPTFPECNCPDADIQAMEDSLLQIQDSWATHNRQFEESEEFQALLKRLPDDRFLNSTAISQFWAMDTSLQHRYQQLGAGLKVLFKKTHRILRRLFNLCKRCHRQPRFRLPKESSPRSLSYWWNRIQSLLYCGESTFPGTFLEQSHSCTCPYDQSSCQGPIPCALGEGPACAHCAPDNSTRCGSCNPGYVLAQGLCRPEVAESLENFLGLETDLQDLELKYLLQKQDSRIEVHSIFISNDMRLGSWFDPSWRKRMLLTLKSNKYKPGLVHVMLALSLQICLTKNSTLEPVMAIYVNPFGGSHSESWFMPVNEGSFPDWERTNVDAAAQCQNWTITLGNRWKTFFETVHVYLRSRIKSLDDSSNETIYYEPLEMTDPSKNLGYMKINTLQVFGYSLPFDPDAIRDLILQLDYPYTQGSQDSALLQLIELRDRVNQLSPPGKVRLDLFSCLLRHRLKLANNEVGRIQSSLRAFNSKLPNPVEYETGKLCS

SEQ ID NO: 208045 - DNA, 2352 bp, Artificial Sequence
  derived and/or modified sequence
atgcgttggcagtgcggaacacgcttcagaggtctaagaccagcagtggccccatggacggccctgctggctctaggtcttcccggatgggtccttgccgtctctgccaccgccgcagccgtggtgccggagcagcacgctagcgtggctggccagcaccccctggactggctgttaactgaccgcggacctttccacagggcccaagaatatgcggacttcatggaaaggtaccggcagggattcactactcgctacaggatctaccgcgagttcgcacgatggaaggtaaacaacctggctcttgaaaggaaagacttcttctctcttccgttgccactggcccctgagttcatccgtaacatcaggttactggggcgaagacctaacctgcaacaagttactgagaacttgatcaagaaatatggaacccacttcctcctgagcgccacactggggggtgaagagtcgctgacgatcttcgtggataaacagaaactgggacgtaagacggaaacaaccggcggagcttcaattattggaggcagcggcaatagtactgctgtgtcgctggagacactgcaccaattggccgcaagctactttattgatagagaatccacattaaggcgactccatcacattcaaattgccaccggcgcaattaaggtgaccgagacacgtactggcccattgggctgttctaactacgacaacctcgattccgtttcatccgtcctagtacagtctcccgaaaataaagtgcaactgctgggcctccaggtgctacttccagagtacctgagagagcgatttgtagcagctgcacttagttatatcacatgcagttctgagggagagctggtgtgtaaagaaaacgattgttggtgtaagtgctctcccactttccccgaatgtaattgtcctgacgccgatatacaggctatggaggatagcctcctccaaatacaggatagttgggccacccataataggcagtttgaggagagcgaagaattccaggccctgcttaagaggttgcctgacgatagatttctcaacagcaccgcaatcagccagttttgggccatggacactagcctgcaacaccgctaccagcaactgggcgctggcctgaaggttctgttcaagaaaactcaccggatcctgcggaggttgttcaacctgtgtaaaagatgtcacagacagccacggtttaggcttcctaaggagcgatcacttagttactggtggaatagaatccagagtctgttgtactgtggagagtctacattccctggcacatttctggagcagagccacagttgtacctgtccgtatgatcaaagtagctgtcagggcccaatcccgtgcgccctgggggagggtccggcttgtgcacattgcgcccctgacaattcgacacggtgcgggtcatgcaacccgggatacgtgttggctcagggactgtgccgacctgaggtggccgaatctctggagaattttctaggtcttgagacggacctgcaggatttggaactcaaatatctgctgcagaaacaggattcacggatagaagttcactctatcttcattagcaatgatatgaggcttggctcctggtttgatcccagttggcgtaagagaatgctgctcacgcttaagagcaataaatataagcctgggctcgttcacgttatgctcgctttgtcccttcagatatgtcttactaaaaactctacgctcgaaccggtcatggccatctacgtaaacccgttcgggggtagtcactctgaatcctggttcatgcctgtgaacgagggctctttccccgattgggagaggactaacgtggatgccgcagcccaatgccagaactggacgattaccctagggaatcgttggaagacgtttttcgaaaccgtccacgtgtatttgcggtcccgaattaagtccttggacgattcttcaaacgagaccatctactatgaacctctagagatgaccgacccgagcaagaacctcggctacatgaaaattaatactttgcaagtcttcggctatagcctgccttttgatccagatgctatcagggatcttatcctccagctcgattacccttatacacagggtagtcaggatagtgctctcctgcagcttatcgagctgcgcgatcgggtaaatcagctgtcaccaccagggaaagtcaggctggatctctttagttgcttgttgcgacacagactgaagttggctaacaacgaggtcggtcgaatccagagctccctgcgggctttcaactcaaaactgccaaatcccgtggaatacgaaaccggaaagctgtgttcatag

SEQ ID NO: 208046 - DNA, 1611 bp, Artificial Sequence
  derived and/or modified sequence
atgcccactctgtgttctagcttcggtctacaggtgctcctgcctgaatacctgagggagcggtttgtcgcagccgcactcagttacatcacctgttctagcgaaggcgaactggtgtgcaaagaaaacgattgttggtgcaaatgtagtcccaccttccctgaatgcaattgccccgatgcagacatacaggccatggaagatagcttgttgcagattcaggactcttgggcaacgcataatcggcagtttgaagaaagcgaagagttccaggcattgctgaagcgtttgcctgacgatcggtttctgaactctactgcaatatcccagttctgggcaatggatacctcattgcagcaccgctaccagcagcttggcgcaggcttgaaggtcttattcaaaaaaacccatagaatcttgaggcgcttgttcaatctgtgtaagcggtgtcacagacagccacggtttaggcttcctaaagagagcagcccaagaagcctctcatactggtggaacaggatccaaagtctgctttactgtggagaatctactttcccgggaacattccttgagcaaagccactcctgcacctgtccatacgatcagagttcttgccagggacctatcccatgcgcactgggtgagggaccagcatgtgcgcattgcgctccagacaacagcacgcggtgtggttcatgtaacccagggtacgtcctcgcacagggtctgtgccggccagaagtcgccgagagtcttgagaacttcttaggcctggagacggacctgcaggatctggaactgaagtacctgctgcagaaacaggactcaaggattgaagtccattcaatctttatctccaacgatatgagacttggaagttggttcgatccctcctggcggaaaaggatgctgctcaccctaaagtccaacaagtacaaaccgggacttgtgcacgtgatgctggccctttcattgcagatatgcctcacgaagaacagcacactggaacccgtcatggcaatttatgtgaacccctttggtggctcgcactcggaatcctggttcatgccggtcaacgagggctcttttcccgactgggaaaggacaaatgtcgacgcagccgctcaatgccagaattggacaatcaccttgggtaaccggtggaaaacgttcttcgagacagtccacgtatacctgcgctctcgtattaagtcccttgacgattcaagtaatgaaactatctattacgagccacttgagatgacggacccctcgaagaatttggggtatatgaagattaacaccttgcaagtgttcgggtattccctgccttttgaccctgacgcaattagggatttgattctccagctggattatccttatacccaagggtcacaagactcagccctcttgcagctgattgagctaagagatcgagttaaccagctcagtcctccaggcaaggtcaggttggacctattctcttgcttactgcggcacaggctgaaactcgccaataatgaagtggggaggattcaaagttccttgagagcttttaactcgaagttgccgaatccggtggaatatgagacagggaaactctgcagctag

SEQ ID NO: 208047 - DNA, 2352 bp, Artificial Sequence
  derived and/or modified sequence
atgcgctggcagtgcggtactagattcaggggcctccgtcccgccgtggctccatggaccgctttactggccctgggccttccaggatgggtgctggccgtgtcggctactgcagctgcggttgtccctgaacaacacgcaagcgtggccggccagcatccccttgactggctgctgacagaccgaggtccattccacagggcacaggagtacgccgatttcatggagcgctaccgccaagggtttaccacaaggtatagaatttatcgcgagttcgctaggtggaaagttaataatctggcattggagcggaaagactttttcagcttacctttacctctagcacccgagttcatccgcaacataagactgctcggccgtagacccaatttacagcaggttacagaaaatttgatcaagaaatacggtacacacttcctattaagtgctacactgggaggcgaggaaagcctaacaatcttcgtggataaacaaaagctcggtcggaagacagagaccactgggggcgcaagtatcatcggaggcagcggcaacagcacagccgtgtcacttgaaacactgcaccagctcgccgcgagctatttcatagatcgagaaagcaccttgcgcagactgcaccatattcagatcgccacaggggccattaaagtgaccgagaccaggactggccctttaggatgcagcaattatgataacctagacagcgtgtctagcgtgctagtccaatctccagagaataaagtgcagctgctcgggctgcaggtgttgttaccagagtacttaagagaacgctttgttgcagctgctttatcctatatcacgtgcagctctgaaggggaactggtctgtaaggagaacgactgctggtgtaagtgctcaccgactttccctgaatgcaactgccccgatgcagatatacaggccatggaagacagcttgctgcaaatccaggatagctgggcaacccataaccgtcaatttgaggagagcgaggaattccaagcattgctgaagaggctacctgacgacaggttcctgaactctactgccatctctcagttctgggccatggatacatctctccaacatcgctaccagcaactgggagctgggctcaaagtgttattcaaaaaaactcaccgcattttgaggcgactgttcaacttgtgtaaacgctgccacaggcaaccccgttttaggcttccaaaggaacggagtctctcttattggtggaaccgcattcaatcacttttgtattgtggcgaaagcaccttccctggcacctttctggagcagtcccattcatgtacatgcccatatgatcagtcctcttgtcaggggccaatcccctgcgctttgggagagggacccgcttgcgcgcactgcgccccggacaattcaacaagatgtggatcttgtaaccccggatatgtactcgcccagggactgtgtcgaccagaggtcgccgagtcactggagaatttcctcggacttgagacagacctacaagacctagaattaaagtatctgctgcagaagcaagactctcgcatagaggttcattcaatctttattagcaatgacatgcgcctgggtagttggttcgacccctcctggcggaagcggatgcttttgaccctgaaatctaacaagtataagcccggcctggtccacgtgatgctcgcccttagccttcagatctgtctaactaagaatagcaccttggagcccgtcatggcgatctacgtgaaccccttcggcgggtctcattctgagtcctggtttatgccggtgaacgaaggatcgttccccgattgggagagaaccaacgtcgatgccgcagctcaatgtcaaaattggactatcaccctaggcaacagatggaagacctttttcgagacggtccacgtgtacctgaggagccgtattaagagcctggatgatagcagcaatgagaccatttactacgaaccactcgagatgaccgacccatccaaaaacctcggctacatgaagatcaatacgctacaggtgtttggctacagtctgcccttcgacccagatgctatccgagatctaatattgcagcttgattatccctacacccagggttcacaggactccgcactgctgcagctgatcgagttacgagacagggtgaatcagctttccccccccgggaaggtccggctggacttgttcagctgtctcctgcgtcatcgattgaagctggcaaacaacgaggtggggcgtatccagtcttcacttcgtgcctttaacagtaagctacctaatccagtcgaatatgaaaccggcaagctctgctcctag

SEQ ID NO: 208048 - DNA, 1611 bp, Artificial Sequence
  derived and/or modified sequence
atgccaaccctctgctcgagcttcggcctgcaggtccttttaccagaataccttagggaacgctttgttgctgctgctcttagctatattacctgttcgagcgagggcgagctggtgtgcaaggagaatgactgctggtgcaagtgtagtcccacctttcctgagtgcaattgtcccgatgcagatattcaggccatggaggattcactgctgcagatccaagattcttgggctactcacaaccgccagtttgaagaaagcgaagagttccaggccctactgaagcgcctgccagatgacaggtttcttaacagtacagcaatatcccagttctgggctatggatacctccctccaacacaggtaccaacaactgggagcggggttgaaggtgctgttcaaaaaaacacacagaattcttcggcgccttttcaacctgtgtaaaagatgccatcgacagccccgatttcgactgccgaaggagagctcaccaagaagcttatcatactggtggaatcgcatccaatccctactgtattgtggtgagtcgaccttccctggcacctttcttgagcagagtcacagctgtacatgtccctatgatcagtcctcgtgccaaggccccataccatgtgccctgggagagggacctgcctgtgcgcattgcgctcctgataattccactcgctgtgggagctgcaatccagggtatgtgctggcgcagggtctgtgtagaccagaagttgccgagtccctggaaaacttcctaggattagagactgatctgcaagacctggaactgaagtacctgttacaaaagcaggatagccggattgaagtacactccatctttattagcaacgatatgcgcttaggcagctggttcgatccctcctggagaaaaagaatgttgcttaccctgaaatcaaataagtacaaaccaggtttggtgcacgtgatgttagctctgtccctccagatctgcttgaccaaaaacagtacactcgaaccagttatggctatctacgtgaaccccttcggcgggtcgcattctgaaagttggttcatgcctgtgaatgagggtagcttccccgattgggaacgaacaaatgtcgatgccgctgcacaatgtcagaactggactattacattaggcaaccgatggaaaacattttttgagaccgtccacgtctatttacgaagtagaatcaaaagtctggacgatagctccaatgaaacaatctactatgagcctttggaaatgactgatcccagtaaaaatctcggttatatgaagatcaatactctgcaggtatttggttatagcctgccattcgaccctgatgccatacgggacctcattttgcaactcgattacccatacacacagggctcccaagacagcgcccttttgcagttgatcgaacttagagatcgcgtcaaccagttgtctccccctggcaaagtgcgcttggaccttttttcttgtctcctccggcatcgacttaagctggctaataatgaggtaggacgtatccagtcttccctacgcgcctttaacagcaaattacccaatcccgtggagtacgagaccggcaagctatgttcttag

SEQ ID NO: 208049 - DNA, 2352 bp, Artificial Sequence
  derived and/or modified sequence
atgcgatggcagtgcggaacacggtttcgaggacttagaccagcggtggcgccctggaccgctctcctcgctttgggtctgcccggatgggtgctggccgtctccgctacagcagccgccgtggtgcctgagcagcacgccagtgtcgctggacagcatcctctagactggcttctgacagatcgaggaccatttcaccgtgcccaggaatatgccgacttcatggaaagatatcgccagggattcactaccaggtacagaatctatcgtgagtttgcccgatggaaagtgaataatcttgcgctagaaagaaaagactttttctcactccctttaccgttggcaccagagttcatcagaaatattcgcctactgggacgtagacccaacctgcaacaggtgaccgaaaacttaattaagaaatacgggacccactttctcttatctgccacgctcggcggtgaagagagcctgactatattcgtcgacaagcagaaattgggaagaaaaacggaaactacaggcggtgcctccataattggcggctctggtaacagcacagcggttagtttagagactctgcaccaactcgccgcttcatacttcatcgaccgggaatccaccctcagaagactccatcacattcagatagccaccggcgcaataaaagtcacagagacacggaccggaccactgggctgctccaactacgataatctagactctgtttcaagcgtgctggtacagtcgccggagaacaaagtgcaactccttgggctgcaagtgctactccctgagtatttgagagaaaggttcgtggccgccgcactctcatatatcacctgttcttccgaaggagaactagtatgcaaggaaaacgattgctggtgcaagtgcagccccactttcccagaatgtaattgtcccgacgcagatatacaggctatggaggattctctgttgcagatacaggacagttgggccacacataacagacagttcgaagagtccgaggaatttcaagcgctactgaagaggcttccagacgaccgattcctgaacagcacagccatttcacagttctgggctatggacacctcactacaacatcgatatcagcaattgggagccgggttgaaggtgctattcaaaaagactcatcggatccttagacgtctgtttaatttatgtaagcgctgccatcgtcagcctcgttttcgccttccaaaggaacggagcctctcttactggtggaacaggattcagtctctactttactgcggagagagcacttttccgggaacattcttggaacagagtcatagctgtacatgtccatatgatcagagttcttgccagggccccatcccttgcgcgctcggcgaaggtccagcctgtgctcactgtgcccccgacaactccacacgctgcgggagctgtaatccaggctatgtgctagctcagggtctttgccgcccagaagtagctgagtctttggaaaattttttaggcctcgaaacagacttgcaggatttggaacttaaatatttactacagaagcaggattccagaatcgaagtccatagcatcttcatctcaaatgatatgcggctcggctcgtggtttgatccctcctggaggaagcggatgctgttgacgctgaagtctaacaagtacaaacccggccttgtccacgtaatgttagcgctgtccctccagatttgcttgactaaaaattctactctcgaaccagttatggccatttacgtgaacccctttggtggctcacatagcgaaagttggtttatgcccgttaatgaggggagctttcccgactgggagcgaacaaacgtggacgccgccgctcagtgccagaactggacaataactttgggtaatagatggaaaaccttctttgagaccgtacatgtctatcttagatcacgaattaagtccttggacgatagtagcaatgaaacaatatactacgagccacttgaaatgaccgatccttctaaaaatttgggctacatgaaaattaacactctccaggtcttcggatatagcctgcctttcgatccagacgcaatacgggatctcatcctgcaactggattacccttacacccagggctcacaggacagcgcactgctgcagttgatcgagcttcgtgatcgagtgaatcagctgtcaccccctggcaaagtacgcttagacttgttcagttgcctccttcgtcaccgcctgaaacttgccaataacgaagtcggacggattcagtcttcccttagggcctttaattctaaactccccaatcctgttgagtatgagaccggtaaactgtgctcttag

SEQ ID NO: 208050 - DNA, 1611 bp, Artificial Sequence
  derived and/or modified sequence
atgcctactctctgctctagtttcggtcttcaagtgctactaccggagtacctcagagaacggttcgttgcggctgccctttcgtatataacatgttcgagtgagggcgaacttgtatgtaaagagaacgactgctggtgcaaatgcagccccaccttccccgagtgcaattgccccgatgcagacatacaagcaatggaagattccctcctgcagatccaggatagctgggcgactcacaacaggcagttcgaggaaagcgaggaatttcaggccctactcaaacgcctgcctgacgaccggtttcttaattcaacggctatttctcagttctgggctatggatacctcattacaacacaggtaccagcaactaggagcaggactcaaagtgttattcaaaaaaacccatcggattctgcgccggctctttaatctctgcaaaagatgccatagacaaccccgctttaggttgcctaaagagtcctcccctcgaagcctcagctattggtggaacaggatacaaagcttgttgtactgcggcgaatctacttttcctggcacgtttctagaacagtctcattcctgcacctgtccttacgatcagagttcatgtcagggccccataccgtgtgctctgggtgaaggacccgcgtgtgcccactgtgcccccgacaactctacaagatgcggctcttgtaaccctggttacgtcctagctcaaggactgtgtagacccgaggtcgcagagagtcttgagaactttttgggccttgaaaccgacctgcaggacctggaattaaaatacttgctgcagaaacaagattcacgcattgaagtacacagcattttcatctcaaatgatatgagattaggttcatggttcgacccaagctggaggaaaagaatgttgcttaccctgaaatcaaataagtacaaaccaggtttggtgcacgtgatgttagctctgtccctccagatctgcttgaccaaaaacagtacactcgaaccagttatggctatctacgtgaaccccttcggcgggtcgcattctgaaagttggttcatgcctgtgaatgagggtagcttccccgattgggaacgaacaaatgtcgatgccgctgcacaatgtcagaactggactattacattaggcaaccgatggaaaacattttttgagaccgtccacgtctatttacgatccagaatcaaaagcctcgacgactcttccaatgagactatctattacgaaccccttgaaatgacagatcctagtaagaatctcgggtatatgaaaattaacaccctccaggtgttcggttattcccttccatttgatccagacgcaattagagacctgattctccagctagattacccctatacacaggggtcacaggacagcgcgctacttcagttgattgagctcagggaccgtgttaaccagctcagtccgccaggcaaagttaggttagaccttttctcatgccttctaagacaccgcctgaagctcgctaacaacgaagtcggacggatccagtctagccttagggcattcaatagcaaattgccaaatcctgtggagtacgaaactgggaaactctgctcatag

SEQ ID NO: 208051 - DNA, 3301 bp, Artificial Sequence
  derived and/or modified sequence
attgttatcttaagacactcatctggtgtctgagtctgcaggtgacactgcttaggtacggagcgcggagtcggagcggggacgcgccgggctgcagctctgggatgcaatccgcctgcctcgcaagctgctcgccgctgcgctggcagcgcttacgctgagctcggaggatcccattaggacttgcccggggatgtgcacctgccgtgcgctccgaggtcagtggcaggtctgcaggcagccgagggagcggtgaagccggaagacctgtctctgcccatgtgcaaggcagtgatttcggctccgagccctggaggagcagcacggagcgggagagcgtggcgagagaatgaagaaaccaatcgcccgggagaagcatgaggtggcagtgtggcactcggtttagagggcttcggccggcggtggccccatggacagccctgctggcactgggcctgcctggctgggtgttggctgtctcagccacggcggctgctgtggtccccgagcagcatgcctccgtagctggccagcatcccctggactggctgctcacagaccggggccccttccaccgcgctcaggagtatgctgacttcatggagcggtaccgccagggtttcaccaccaggtacaggatttataggcttttcccccagggagtttgcccgttggaaggtgaacaacttggctctggaaaggaaggacttcttcagtttgccattgcctcttgccccagagtttatccggaacattcgcctccttggaaggagacccaatctgcaacaggttacagaaaatctgattaaaaagtacggcactcatttcttactttctgccacccttggaggagaagagtccctgaccatttttgtggacaagcagaaactgggaagaaagacagagacaacaggaggtgcctctataatcgggggcagtgggaacagcacagctgtgtccctggagaccctgcaccagctggccgcctcctacttcatcgacagagagagcacgctgcgacggctgcaccatatccagatagccacgggggccatcaaggtcaccgagaccaggaccggtcctctgggctgcagcaactatgacaatctggactcagtcagttctgtcttggtacagagtccagagaacaaagtacagttacttggtctcacagtgtcgctactggggagcctcctgcagatctgacctcgaacgtggcccagactgcatccaaaggcatgcctaccctttgttcatcctttggccttcaggtgctgctgcctgagtatctgcgtgagcgctttgtagctgcagcactcagctacatcacatgcagctctgagggtgagctcgtctgcaaggagaatgactgctggtgcaagtgcagccccaccttccctgaatgcaactgccctgatgctgacatccaggccatggaggacagcctgctgcagatccaggactcctgggccactcacaaccggcagtttgaagagtcagaagagttccaggccctgctgaaaaggctgcccgatgaccggttcctgaactccacagctatctcccagttctgggccatggacaccagccttcagcaccgctaccagcagctgggagctggcttgaaagtgctgttcaaaaagacccatcggatcctacgccggctcttcaacctctgcaagcgctgccatcgccagcctcgcttccgcctgcccaaggagagctccccaaggtccttgtcctactggtggaaccgaatccagtccctcctctactgtggggaaagcacctttcctggcactttcctggaacagagccacagctgcacctgcccctatgaccaatcttcctgccagggccccatcccatgtgccttgggcgaagggcccgcgtgtgcccactgtgctccagacaatagcacacgctgtgggagctgcaacccgggctatgtgctggcccaggggctgtgccggccagaggtggccgagtccctggaaaactttcttgggctggagacagacttgcaggacctggagctaaagtacctgctgcagaagcaggatagccgcattgaggtacactccatcttcatcagcaatgacatgcggctgggcagctggtttgacccttcctggaggaagcgcatgctgctcaccctgaagagcaacaagtacaagcctgggctggtgcacgtgatgttggccttgtccttgcagatctgtctcaccaagaacagcaccctggagcctgtcatggccatctacgtcaacccctttgggggcagccactctgagagctggttcatgcctgtgaatgagggcagctttcctgactgggaaaggactaacgtggatgcagctgcccagtgccaaaactggactatcaccttggggaataggtggaagactttctttgagacagttcatgtttacctacggagccgaatcaagtccctggatgacagctccaatgagacaatctactatgagcccctggagatgactgatccctctaagaatttgggttacatgaaaattaacaccttgcaggtctttggctacagcctgccctttgacccagatgctatccgggacttaattctccagttggactacccatatactcaaggttcccaggactctgcactcttgcagctcattgagctcagggaccgggtgaaccagctttctccacctggcaaagtccgacttgaccttttctcctgcttgctccggcatcggcttaagctggccaacaatgaggtgggcaggatccagtcctccctgagggctttcaattctaagctgccaaaccctgtggaatatgagaccggcaaactctgtagctaatgggcggcccacttcagcactgggcaaggaggggatccatgaatctggggtacaaagataatctaagccctcaccttagtgccaacagggtgtgctcccacgagactttcagcatccagtagatgggacctcgaggctcgagctgaagcaggcgagagagaaacagctactgcgtgcgtgcgcgcacgcatacacacacacacacacacactggcacagggaggctacaactaagcagcctcagatctgtaaagttgattggtgctttctaaaatgaatgcaattgaaagaaaggagccaaggaagagattaagaaaaagaaccagctgaaccatgaaacaaacaaaaatcctaaaagtgattcttgtcattcaagaaagcaagaggggacaacaatgggaggggtcggagctcttccttcccctctgtggagtcacttttgtattcttttt

SEQ ID NO: 208052 - DNA, 2352 bp, Artificial Sequence
  derived and/or modified sequence
atgagatggcagtgcggcaccagattcagaggcctgagacccgccgtggccccctggaccgccctgctggccctgggcctgcccggctgggtgctggccgtgagcgccaccgccgccgccgtggtgcccgagcagcacgccagcgtggccggccagcaccccctggactggctgctgaccgacagaggccccttccacagagcccaggagtacgccgacttcatggagagatacagacagggcttcaccaccagatacagaatctacagagagttcgccagatggaaggtgaacaacctggccctggagagaaaggacttcttcagcctgcccctgcccctggcccccgagttcatcagaaacatcagactgctgggcagaagacccaacctgcagcaggtgaccgagaacctgatcaagaagtacggcacccacttcctgctgagcgccaccctgggcggcgaggagagcctgaccatcttcgtggacaagcagaagctgggcagaaagaccgagaccaccggcggcgccagcatcatcggcggcagcggcaacagcaccgccgtgagcctggagaccctgcaccagctggccgccagctacttcatcgacagagagagcaccctgagaagactgcaccacatccagatcgccaccggcgccatcaaggtgaccgagaccagaaccggccccctgggctgcagcaactacgacaacctggacagcgtgagcagcgtgctggtgcagagccccgagaacaaggtgcagctgctgggcctgcaggtgctgctgcccgagtacctgagagagagattcgtggccgccgccctgagctacatcacctgcagcagcgagggcgagctggtgtgcaaggagaacgactgctggtgcaagtgcagccccaccttccccgagtgcaactgccccgacgccgacatccaggccatggaggacagcctgctgcagatccaggacagctgggccacccacaacagacagttcgaggagagcgaggagttccaggccctgctgaagagactgcccgacgacagattcctgaacagcaccgccatcagccagttctgggccatggacaccagcctgcagcacagataccagcagctgggcgccggcctgaaggtgctgttcaagaagacccacagaatcctgagaagactgttcaacctgtgcaagagatgccacagacagcccagattcagactgcccaaggagagaagcctgagctactggtggaacagaatccagagcctgctgtactgcggcgagagcaccttccccggcaccttcctggagcagagccacagctgcacctgcccctacgaccagagcagctgccagggccccatcccctgcgccctgggcgagggccccgcctgcgcccactgcgcccccgacaacagcaccagatgcggcagctgcaaccccggctacgtgctggcccagggcctgtgcagacccgaggtggccgagagcctggagaacttcctgggcctggagaccgacctgcaggacctggagctgaagtacctgctgcagaagcaggacagcagaatcgaggtgcacagcatcttcatcagcaacgacatgagactgggcagctggttcgaccccagctggagaaagagaatgctgctgaccctgaagagcaacaagtacaagcccggcctggtgcacgtgatgctggccctgagcctgcagatctgcctgaccaagaacagcaccctggagcccgtgatggccatctacgtgaaccccttcggcggcagccacagcgagagctggttcatgcccgtgaacgagggcagcttccccgactgggagagaaccaacgtggacgccgccgcccagtgccagaactggaccatcaccctgggcaacagatggaagaccttcttcgagaccgtgcacgtgtacctgagaagcagaatcaagagcctggacgacagcagcaacgagaccatctactacgagcccctggagatgaccgaccccagcaagaacctgggctacatgaagatcaacaccctgcaggtgttcggctacagcctgcccttcgaccccgacgccatcagagacctgatcctgcagctggactacccctacacccagggcagccaggacagcgccctgctgcagctgatcgagctgagagacagagtgaaccagctgagcccccccggcaaggtgagactggacctgttcagctgcctgctgagacacagactgaagctggccaacaacgaggtgggcagaatccagagcagcctgagagccttcaacagcaagctgcccaaccccgtggagtacgagaccggcaagctgtgcagctag

SEQ ID NO: 208053 - DNA, 1611 bp, Artificial Sequence
  derived and/or modified sequence
atgcccaccctgtgcagcagcttcggcctgcaggtgctgctgcccgagtacctgagagagagattcgtggccgccgccctgagctacatcacctgcagcagcgagggcgagctggtgtgcaaggagaacgactgctggtgcaagtgcagccccaccttccccgagtgcaactgccccgacgccgacatccaggccatggaggacagcctgctgcagatccaggacagctgggccacccacaacagacagttcgaggagagcgaggagttccaggccctgctgaagagactgcccgacgacagattcctgaacagcaccgccatcagccagttctgggccatggacaccagcctgcagcacagataccagcagctgggcgccggcctgaaggtgctgttcaagaagacccacagaatcctgagaagactgttcaacctgtgcaagagatgccacagacagcccagattcagactgcccaaggagagcagccccagaagcctgagctactggtggaacagaatccagagcctgctgtactgcggcgagagcaccttccccggcaccttcctggagcagagccacagctgcacctgcccctacgaccagagcagctgccagggccccatcccctgcgccctgggcgagggccccgcctgcgcccactgcgcccccgacaacagcaccagatgcggcagctgcaaccccggctacgtgctggcccagggcctgtgcagacccgaggtggccgagagcctggagaacttcctgggcctggagaccgacctgcaggacctggagctgaagtacctgctgcagaagcaggacagcagaatcgaggtgcacagcatcttcatcagcaacgacatgagactgggcagctggttcgaccccagctggagaaagagaatgctgctgaccctgaagagcaacaagtacaagcccggcctggtgcacgtgatgctggccctgagcctgcagatctgcctgaccaagaacagcaccctggagcccgtgatggccatctacgtgaaccccttcggcggcagccacagcgagagctggttcatgcccgtgaacgagggcagcttccccgactgggagagaaccaacgtggacgccgccgcccagtgccagaactggaccatcaccctgggcaacagatggaagaccttcttcgagaccgtgcacgtgtacctgagaagcagaatcaagagcctggacgacagcagcaacgagaccatctactacgagcccctggagatgaccgaccccagcaagaacctgggctacatgaagatcaacaccctgcaggtgttcggctacagcctgcccttcgaccccgacgccatcagagacctgatcctgcagctggactacccctacacccagggcagccaggacagcgccctgctgcagctgatcgagctgagagacagagtgaaccagctgagcccccccggcaaggtgagactggacctgttcagctgcctgctgagacacagactgaagctggccaacaacgaggtgggcagaatccagagcagcctgagagccttcaacagcaagctgcccaaccccgtggagtacgagaccggcaagctgtgcagctag

SEQ ID NO: 208054 - DNA, 2352 bp, Artificial Sequence
  derived and/or modified sequence
atgcgatggcagtgcggaactaggttcagagggctgaggccggcggtagctccctggactgccctgttagctcttgggctgccgggctgggtgctagcagttagcgccacggcagctgccgtggtgcctgagcaacatgcctcagtggccggacagcacccactcgactggctgctgaccgaccgtgggccctttcatagggctcaggaatatgcagattttatggaaaggtaccggcagggcttcacgacacgatatagaatctacagagagttcgccaggtggaaagtgaacaacctggccctcgaacggaaggacttcttctctttgccccttccactggcacctgagttcattagaaatattcggctgctagggcggcggccaaatctacaacaggttacagagaatctgatcaaaaaatatggcacccactttctcctctccgctacgctgggaggcgaggaatcactcactatttttgttgacaaacaaaaactgggaagaaaaaccgagaccactgggggcgcaagcattatcggaggaagcggtaactccacagccgtaagcttggagacgctccaccagcttgccgctagttattttattgacagagaaagcacactgcgccgcttacaccacatccagatcgccacaggggctataaaagtgacagaaacgcgcaccggcccacttggttgtagtaactatgacaacctggactccgtctctagcgttctcgtacagtctcccgagaataaggtgcaattgcttggcttgcaggttctgctccccgagtacctgcgcgagagatttgtggctgctgcattgtcatacattacttgttcctcagaaggggagctggtatgcaaggaaaatgactgttggtgtaaatgctcgcccacgtttcccgaatgtaactgccccgacgcggatatccaagcaatggaggactctctattgcagattcaggattcctgggctacccacaatcggcagttcgaggagtccgaggaattccaggcactgttgaagcgattgccggatgatagatttctgaattccacagcgatttcgcagttttgggcgatggataccagcctgcagcaccggtaccaacagcttggggcaggccttaaggtactcttcaaaaaaacccataggattttacgcaggctcttcaatctatgtaagagatgccacagacagcctagattccgccttcccaaagagagatctctgagctattggtggaatcgcatccagtcgttgctgtattgtggtgaatctacttttcccggaaccttccttgagcagagtcacagctgcacatgcccatatgatcagtcttcctgccagggtccaatcccttgcgccctgggtgagggcccagcatgcgcccactgtgccccagataatagtacacgatgtggatcctgtaatccagggtatgtgctcgctcagggactctgtcggcccgaggtcgccgaatctctggaaaattttctcggactggagaccgacctccaggatttagaactaaagtacctgttacagaaacaggattcccgcattgaggtgcatagtattttcatcagcaacgatatgagactgggaagctggtttgatcctagttggcgcaaacgcatgcttctaactttgaaatctaacaaatataagccaggcctggtacacgtgatgttggccctctcactgcagatctgtctgactaagaactccaccctagaaccagtgatggcgatatacgtgaacccattcggcgggtctcattccgaatcatggttcatgccagtgaatgagggtagctttcctgattgggagaggacaaacgtggacgctgccgcacagtgtcagaattggaccatcacactggggaacagatggaagactttctttgaaacggttcacgtttacctgcgtagccggattaagagcctggatgactcctcgaacgagaccatctactacgaacctcttgaaatgacagacccaagcaagaatcttggatatatgaagattaatacgttgcaggtctttggctattccctcccattcgatcctgacgccattcgcgacttaatactacagctggactatccatatacccaagggagtcaggactcggcccttttacagcttattgaactacgcgacagggtgaaccagctcagcccaccgggcaaagtgaggctagatttgttctcttgccttctgcggcaccgcctgaagctggccaacaacgaagtcgggcgtatccaaagtagcctgcgagctttcaattcaaagctaccaaatccggtggaatatgagaccggtaaactgtgttcctag

SEQ ID NO: 208055 - DNA, 1611 bp, Artificial Sequence
  derived and/or modified sequence
atgccaactttatgttcttcttttgggttacaggtcctgttgcctgagtacctaagagaaagattcgtcgccgctgcattaagctatatcacctgtagcagcgaaggtgaactagtttgtaaggaaaacgactgttggtgcaagtgctccccgaccttccctgagtgcaactgtcccgatgcggatatacaggccatggaggattcgttgctgcaaatacaggactcctgggcaacgcacaatcgccaattcgaggagtctgaggagtttcaggctcttctcaagagactgcccgatgacagattcctcaatagtaccgctattagccagttctgggcaatggacaccagtcttcaacatagatatcagcaacttggggcaggattgaaggtgctttttaaaaagactcacagaatactgaggagattatttaatctgtgcaagcgatgtcacagacaacctagattccgcttacctaaggagtcaagcccaaggtccctctcgtactggtggaatcggatccagagcttgttgtattgtggtgagtcgacgttccccgggacattccttgaacagtcacattcgtgtacatgtccatatgaccagtcttcatgtcaggggccgatcccgtgtgcgttaggcgagggccccgcttgcgcccattgcgcccccgataatagcactcgatgcggctcctgtaaccccggatacgtgctcgcccagggtctgtgcagaccggaagttgcagagagtttagaaaactttctcggtctggaaacagacctccaggacctggagcttaagtacctgttacaaaagcaggatagtagaatcgaagtccactctatttttatctctaatgacatgaggcttggttcctggttcgacccgagttggagaaaacggatgttgctgaccctgaagagcaataaatacaaacctgggcttgtgcacgtaatgcttgccctttcacttcagatttgcctcacaaagaactctacactggagcctgttatggccatttatgtgaaccctttcggcggttctcactctgagtcgtggtttatgccagtcaatgaggggtcctttcctgactgggagcggacaaatgtcgacgccgccgcccaatgccagaactggacaatcacgttaggtaaccggtggaagacgttctttgagacagtgcatgtgtatctacgttctcgtattaagtcccttgatgactctagcaacgagacaatttactacgaaccgctggagatgacagatccttctaagaacctgggctacatgaagatcaataccctgcaggtctttgggtactcgctgccctttgacccagatgccatcagggatctcatcttacagctcgattacccctacactcagggaagtcaggatagtgcccttctccagttgattgagctccgagatcgggtcaaccagctcagtccccccgggaaggtgaggctcgacctcttctcctgcctactccggcaccgtctcaagcttgcgaataacgaagttggccggatccaaagctcgttgcgtgcattcaattccaaattgcccaaccctgtggagtatgaaacaggaaagctgtgcagctag

SEQ ID NO: 208056 - DNA, 3558 bp, Artificial Sequence
  derived and/or modified sequence
agcggggagcaagagaatttgaaaagagacatccgctccctctcacacgctgagggggaggcattcgcgtttccccaaatgagaaagaaccacaagaaatcatgaagtaaaaactttggaaagctgccactggagatgttgcacaaaaacctggaatcttttaggagtctcctcccagtcgttgaaggtttggggagcagctgatacagcaaggagggctcttgcaaggattcaagctccgagccctggaggagcagcacggagcgggagagcgtggcgagagaatgaagaaaccaatcgcccgggagaagcatgaggtggcagtgtggcactcggtttagagggcttcggccggcggtggccccatggacagccctgctggcactgggcctgcctggctgggtgttggctgtctcagccacggcggctgctgtggtccccgagcagcatgcctccgtagctggccagcatcccctggactggctgctcacagaccggggccccttccaccgcgctcaggagtatgctgacttcatggagcggtaccgccagggtttcaccaccaggtacaggatttatagggagtttgcccgttggaaggtgaacaacttggctctggaaaggaaggacttcttcagtttgccattgcctcttgccccagagtttatccggaacattcgcctccttggaaggagacccaatctgcaacaggttacagaaaatctgattaaaaagtacggcactcatttcttactttctgccacccttggaggagaagagtccctgaccatttttgtggacaagcagaaactgggaagaaagacagagacaacaggaggtgcctctataatcgggggcagtgggaacagcacagctgtgtccctggagaccctgcaccagctggccgcctcctacttcatcgacagagagagcacgctgcgacggctgcaccatatccagatagccacgggggccatcaaggtcaccgagaccaggaccggtcctctgggctgcagcaactatgacaatctggactcagtcagttctgtcttggtacagagtccagagaacaaagtacagttacttggccttcaggtgctgctgcctgagtatctgcgtgagcgctttgtagctgcagcactcagctacatcacatgcagctctgagggtgagctcgtctgcaaggagaatgactgctggtgcaagtgcagccccaccttccctgaatgcaactgccctgatgctgacatccaggccatggaggacagcctgctgcagatccaggactcctgggccactcacaaccggcagtttgaagagtcagaagagttccaggccctgctgaaaaggctgcccgatgaccggttcctgaactccacagctatctcccagttctgggccatggacaccagccttcagcaccgctaccagcagctgggagctggcttgaaagtgctgttcaaaaagacccatcggatcctacgccggctcttcaacctctgcaagcgctgccatcgccagcctcgcttccgcctgcccaaggagaggtccttgtcctactggtggaaccgaatccagtccctcctctactgtggggaaagcacctttcctggcactttcctggaacagagccacagctgcacctgcccctatgaccaatcttcctgccagggccccatcccatgtgccttgggcgaagggcccgcgtgtgcccactgtgctccagacaatagcacacgctgtgggagctgcaacccgggctatgtgctggcccaggggctgtgccggccagaggtggccgagtccctggaaaactttcttgggctggagacagacttgcaggacctggagctaaagtacctgctgcagaagcaggatagccgcattgaggtacactccatcttcatcagcaatgacatgcggctgggcagctggtttgacccttcctggaggaagcgcatgctgctcaccctgaagagcaacaagtacaagcctgggctggtgcacgtgatgttggccttgtccttgcagatctgtctcaccaagaacagcaccctggagcctgtcatggccatctacgtcaacccctttgggggcagccactctgagagctggttcatgcctgtgaatgagggcagctttcctgactgggaaaggactaacgtggatgcagctgcccagtgccaaaactggactatcaccttggggaataggtggaagactttctttgagacagttcatgtttacctacggagccgaatcaagtccctggatgacagctccaatgagacaatctactatgagcccctggagatgactgatccctctaagaatttgggttacatgaaaattaacaccttgcaggtctttggctacagcctgccctttgacccagatgctatccgggacttaattctccagttggactacccatatactcaaggttcccaggactctgcactcttgcagctcattgagctcagggaccgggtgaaccagctttctccacctggcaaagtccgacttgaccttttctcctgcttgctccggcatcggcttaagctggccaacaatgaggtgggcaggatccagtcctccctgagggctttcaattctaagctgccaaaccctgtggaatatgagaccggcaaactctgtagctaatgggcggcccacttcagcactgggcaaggaggggatccatgaatctggggtacaaagataatctaagccctcaccttagtgccaacagggtgtgctcccacgagactttcagcatccagtagatgggacctcgaggctcgagctgaagcaggcgagagagaaacagctactgcgtgcgtgcgcgcacgcatacacacacacacacacacactggcacagggaggctacaactaagcagcctcagatctgtaaagttgattggtgctttctaaaatgaatgcaattgaaagaaaggagccaaggaagagattaagaaaaagaaccagctgaaccatgaaacaaacaaaaatcctaaaagtgattcttgtcattcaagaaagcaagaggggacaacaatgggaggggtcggagctcttccttcccctctgtggagtcacttttgtattctttttaaccagatttcttaaaatgttgttgttttgtgaatcctgacattggttcttacttttgtatgctgcctcctctgtgccctcccagacgctgactgggaaacacaagaagtacaaccaacaggaaccagcgccaagggcaggcagcggcctccttgctcccctcccttactcctccctctgctgcctcctccccccaccaagtttcagggccctggattgttcccagttcccattgtggtcccttcagagctcctttccaacagcatctctctgtcgaagaaagaagctctgtcaagttagagagagacaatgtgtaggaaatgttcttttttaaaaaaaaataacaaaaacaaaacaaaactatttattttgtgattgttttccttgttaatctgctccaaccacctgaacatctaagtaaacatttatctggtttaatata

SEQ ID NO: 208057 - DNA, 2352 bp, Artificial Sequence
  derived and/or modified sequence
atgcgctggcagtgtggcacccgcttccggggcctgcggcctgctgtggccccctggacagccctgctggccctgggcctgcccggctgggtgctggccgtgtctgccacagctgctgctgtggtgcctgagcagcacgcctctgtggccggccagcaccccctggactggctgctgacagaccggggccccttccaccgggcccaggagtatgctgacttcatggagcgctaccggcagggcttcaccacccgctaccgcatctaccgggagtttgcccgctggaaggtgaacaacctggccctggagaggaaggacttcttcagcctgcccctgcccctggcccctgagttcatccggaacatccggctgctgggcagaagacccaacctgcagcaggtgacagagaacctgatcaagaagtatggcacccacttcctgctgagcgccaccctgggcggggaggagagcctgaccatctttgtggacaagcagaagctgggcaggaagacagagaccaccggcggggccagcatcatcggcggcagcggcaacagcacagctgtgtccctggagaccctgcaccagctggccgccagctacttcatcgaccgggagagcaccctgcggcggctgcaccacatccagatcgccactggagccatcaaggtgacagagaccaggacaggccccctgggctgcagcaactatgacaacctggacagcgtgtcctctgtgctggtgcagagccctgagaacaaggtgcagctgctgggcctgcaggtgctgctgcctgagtacctgcgggagagatttgtggccgccgccctgagctacatcacctgcagcagcgagggggagctggtgtgcaaggaaaatgactgctggtgcaagtgcagccccaccttccctgagtgcaactgcccagatgctgacatccaggccatggaggacagcctgctgcagatccaggacagctgggccacccacaaccggcagtttgaggagagcgaggagttccaggccctgctgaagaggctgcctgatgaccgcttcctgaacagcacagccatcagccagttctgggccatggacaccagcctgcagcaccgctaccagcagctgggcgccggcctgaaggtgctcttcaagaagacccaccgcatcctgcggcggctcttcaacctgtgcaagcgctgccaccggcagccccgcttccggctgcccaaggagaggagcctgagctactggtggaaccgcatccagagcctgctgtactgtggggagagcaccttccctggcaccttcctggagcagagccacagctgcacctgcccctatgaccagagcagctgccagggccccatcccctgtgccctgggggagggccctgcctgtgcccactgtgccccagacaacagcacccgctgtggcagctgcaaccctggctacgtgctggcccagggcctgtgcaggcctgaggtggccgagagcctggagaacttcctgggcctggagacagacctgcaggacctggagctgaagtacctgctgcagaagcaggacagcagaattgaggtgcacagcatcttcatcagcaatgacatgaggctgggctcctggtttgaccccagctggaggaagaggatgctgctgaccctgaagagcaacaagtacaagccaggcctggtgcacgtgatgctggccctgagcctgcagatctgcctgaccaagaacagcaccctggagcctgtgatggccatctacgtgaacccctttggaggcagccacagcgagagctggttcatgcctgtgaatgaaggcagcttcccagactgggagaggaccaacgtggatgctgctgcccagtgccagaactggaccatcaccctgggcaaccgctggaagaccttctttgaaacagtgcacgtgtacctgcggagccgcatcaagagcctggatgacagcagcaatgagaccatctactatgagcccctggagatgacagaccccagcaagaacctgggctacatgaagatcaacaccctgcaggtgtttggctacagcctgccctttgatcctgatgccatccgggacctgatcctgcagctggactacccctacacccagggcagccaggacagcgccctgctgcagctgattgagctgcgggacagagtgaaccagctgagccccccaggcaaggtgcggctggacctcttcagctgcctgctgcggcaccggctgaagctggccaacaatgaggtgggccgcatccagagcagcctgcgggccttcaacagcaagctgcccaaccctgtggagtatgagaccgggaagctgtgcagctag

SEQ ID NO: 208058 - DNA, 1611 bp, Artificial Sequence
  derived and/or modified sequence
atgcccaccctgtgcagcagctttggcctgcaggtgctgctgcctgagtacctgcgggagagatttgtggccgccgccctgagctacatcacctgcagcagcgagggggagctggtgtgcaaggaaaatgactgctggtgcaagtgcagccccaccttccctgagtgcaactgcccagatgctgacatccaggccatggaggacagcctgctgcagatccaggacagctgggccacccacaaccggcagtttgaggagagcgaggagttccaggccctgctgaagaggctgcctgatgaccgcttcctgaacagcacagccatcagccagttctgggccatggacaccagcctgcagcaccgctaccagcagctgggcgccggcctgaaggtgctcttcaagaagacccaccgcatcctgcggcggctcttcaacctgtgcaagcgctgccaccggcagccccgcttccggctgcccaaggagagcagccccaggagcctgagctactggtggaaccgcatccagagcctgctgtactgtggggagagcaccttccctggcaccttcctggagcagagccacagctgcacctgcccctatgaccagagcagctgccagggccccatcccctgtgccctgggggagggccctgcctgtgcccactgtgccccagacaacagcacccgctgtggcagctgcaaccctggctacgtgctggcccagggcctgtgcaggcctgaggtggccgagagcctggagaacttcctgggcctggagacagacctgcaggacctggagctgaagtacctgctgcagaagcaggacagccgcatcgaggtgcacagcatcttcatcagcaatgacatgaggctgggctcctggtttgaccccagctggaggaagaggatgctgctgaccctgaagagcaacaagtacaagccaggcctggtgcacgtgatgctggccctgagcctgcagatctgcctgaccaagaacagcaccctggagcctgtgatggccatctacgtgaacccctttggaggcagccacagcgagagctggttcatgcctgtgaatgaaggcagcttcccagactgggagaggaccaacgtggatgctgctgcccagtgccagaactggaccatcaccctgggcaaccgctggaagaccttctttgagaccgtgcacgtgtacctgcggagccgcatcaagagcctggatgacagcagcaatgagaccatctactatgagcccctggagatgacagaccccagcaagaacctgggctacatgaagatcaacaccctgcaggtgtttggctacagcctgccctttgatcctgatgccatccgggacctgatcctgcagctggactacccctacacccagggcagccaggacagcgccctgctgcagctgattgagctgcgggacagagtgaaccagctgagccccccaggcaaggtgcggctggacctcttcagctgcctgctgcggcaccggctgaagctggccaacaatgaggtgggccgcatccagagcagcctgcgggccttcaacagcaagctgcccaaccctgtggagtatgaaacaggcaagctgtgcagctag

SEQ ID NO: 208059 - DNA, 2352 bp, Artificial Sequence
  derived and/or modified sequence
atgcggtggcagtgcggcacccggttccggggcctgcggcccgccgttgccccttggacggcccttcttgctctggggctccctgggtgggtgctcgccgtgtccgcaacggcggcagcggtggtccccgagcagcacgcatctgtcgcaggacagcaccccctcgactggctgctgaccgatcgcggaccatttcatagggcccaggaatacgcagattttatggaaagataccggcaggggtttactacacggtatcggatctaccgcgaatttgctaggtggaaggtgaataacctggctctggaaaggaaagattttttttctttgcccctaccactcgcgcccgagttcattcggaatattcgtctgctggggcggcgtcctaacctccagcaggtcaccgaaaatcttataaagaaatacggaacccatttcctgttgtccgctacactcgggggcgaggagagcctcacaatcttcgtagacaagcagaaactcggacggaaaactgagacgacgggcggcgccagtattatcgggggaagcggcaattctacagccgtctccttggaaactctgcatcagctcgcggcatcctatttcattgaccgcgagagcacattgagacgccttcatcatattcaaatagccacaggcgcaatcaaggtaactgagaccagaaccggacctctgggatgttctaattatgacaacttggacagcgtgagcagcgtacttgtacagtctcctgagaacaaggtgcaactgctcggcctgcaggtcctccttccggagtatctcagagagaggttcgtggccgccgcactgagctacattacatgcagcagcgagggggagctggtttgtaaggaaaatgattgctggtgtaaatgcagtcctacattcccggagtgtaactgtccagatgctgatatccaagcaatggaggatagcctgcttcaaatccaagactcttgggcaacacacaatagacaattcgaggaaagtgaggaatttcaggcactcctaaagcgtctcccggacgaccgcttcctgaacagtacagcaatctctcagttctgggcaatggacacttctctccagcatcgttaccagcaactgggggccggcctgaaagtcttatttaagaagacccaccggatccttcgtcggttgtttaacctgtgcaagagatgccatcggcagccacggtttcgtctgcccaaagagcgaagcttatcatactggtggaacaggattcagagcctcctctattgcggcgagagcacatttcccgggacgtttctggagcagtcgcactcttgcacctgcccatacgatcagtccagctgtcagggtcctatcccctgcgcgctgggagaaggacctgcgtgcgcacattgtgcgccagacaactccactcgatgcgggtcttgcaacccgggctacgtgctggcccaggggctgtgccgccccgaggtagctgaatcgctggagaacttcctggggctggagacagatctgcaggatttggaactgaaatatctgctgcaaaaacaagactccaggatcgaggtgcattccatttttataagcaatgacatgcggttaggaagctggttcgatcctagctggcgcaagcgcatgctgttgaccctgaagagcaataagtataagccgggactggtgcacgtaatgctcgcactctccctccagatctgcctgactaagaactctactctggaacccgtgatggcaatatacgtgaatcccttcgggggtagtcatagcgaatcttggttcatgcccgtgaatgaaggctcttttcccgattgggaacgtactaacgttgatgcggccgctcagtgccagaactggacgattactctcggaaaccgctggaagacattctttgagaccgtgcatgtgtatcttcggagccgcattaaatccctggatgattcttcaaatgagactatttactacgagcctcttgagatgaccgaccctagcaagaaccttggctatatgaaaatcaataccctgcaggtctttggatattcacttcccttcgatcctgacgcgattcgcgatttgattttgcaactggactatccctacacccaggggtctcaggacagcgcactgttgcagctcattgaactaagggatcgggttaatcagctgtctccccctggcaaggttaggctggacctcttttcctgcttactcagacaccgccttaagctggccaataatgaagtgggcaggattcaatcatccctgcgcgcatttaacagcaagctgcctaatcccgtggaatacgagaccggtaaattgtgttcgtag

SEQ ID NO: 208060 - DNA, 1611 bp, Artificial Sequence
  derived and/or modified sequence
atgcccaccctgtgcagcagcttcggcctgcaggtgctgctgcccgaatatctgagagagcggttcgtagcagccgccctctcatacattacatgctcaagcgaaggcgagctcgtgtgcaaggagaacgactgctggtgcaagtgttcacccacttttcccgagtgcaactgtcctgatgccgacattcaggcaatggaagactctctcctccagatccaggattcctgggcaacacataaccggcagtttgaggagagtgaagaatttcaggcccttctgaaacggttgcctgatgaccgctttctcaacagtactgccatctcacaattttgggcaatggataccagtctgcaacatcgctaccagcaacttggcgcaggcctgaaagtgctttttaaaaaaacccacagaatcctcagaagactctttaacctctgcaagagatgccaccgtcagcctaggtttcgtttgccgaaggaaagctctccaaggtcgctgtcttattggtggaataggatccagtcactcctctattgtggcgaatcaaccttccccgggacgttcctcgaacagagccatagctgtacatgtccctacgatcagtcctcatgccaggggcctatcccctgcgccctcggcgaggggccagcttgcgctcactgcgcaccagataacagcacgaggtgcgggtcctgtaaccctggatacgtgctggctcagggcttatgccgccccgaggttgccgagagtctcgaaaactttctcggtctcgagacagatttgcaggatttggaactcaagtacctgctgcaaaagcaggactcaaggatagaagtccattccatcttcatcagcaatgatatgcgactgggaagctggttcgatccctcctggcggaagcgcatgctgctcacactgaagagtaataaatataagcctgggctcgtgcacgtgatgttagctctgtcgttgcaaatctgcttgactaaaaattccaccctcgaacctgtgatggcaatctatgtgaatcccttcggcggaagccactccgaatcctggttcatgcctgtgaacgaaggctcctttccagactgggagaggacaaatgtggacgctgccgcccagtgtcaaaattggaccataaccctggggaatagatggaaaactttcttcgagaccgtccatgtctacctgcgctcccgtattaagtctcttgatgatagcagtaatgagactatttactatgagccccttgagatgaccgacccctcgaaaaacctggggtacatgaaaataaatactttgcaggtctttggttattccttgccatttgatccagacgcaattcgagacctgatcctgcagttggactacccatacacgcaagggagtcaagacagcgcattgcttcagctgattgaactccgtgatagagttaaccagctcagtcccccggggaaagtccgtctggacctcttctcctgtctcctgcgtcatcgtctgaagctagccaacaacgaagtgggtcgtatccaaagttcgttgcgagcctttaatagtaaattacccaaccccgtggagtatgagacaggaaaattatgcagctag
